United States Patent Application Publication US 2017/0114356 A1 - sequence listing, part 74

SEQ ID NO: 109688 - DNA, 744 bp, Zea Mays
gggttgcccctatctttgaggaagttgtccaaggcacaactgcaatttctggtagtcaaggtagccgaccttctacctggctggaaggctgatctaatgactacaactgggagagctgttctggttcagtatgtgctcactgcaactataatttatcatgctatggctctggatcttgctcagggaataattcatgtcattgataaaatcaggcgaggattcttatggagaggcagaaagaatgctaaaggagggcattgtcttgttgcttggaagaaagtaaaaaggcctaaggagttgggggtcttgggatttcggatcttcaatgccttaactggtctctcagactaagatggctgtggctcaggaaaactgagcgggacaagccttgggctgttttcaaactacatgcagattccacggtccacaatttcttctctttggccatggtaactgagctaggtgatggtaagtcaatgctattttggaaagataggtggttgtggggcaaacgtttacaagattgggctcctcatctactcagatcggtttccaagagaattatcaataaaagaagccgaggccttggctgattggagatggttgagggacattcatggaacccttactttgcaaatccttcaggagttctttcttatcttggagcagttagagggaataatcctgcagcaaggaattcctgacaaacacctgtggaggctctctaattcaggacaatacacg

SEQ ID NO: 109689 - DNA, 2289 bp, Zea Mays
tgcatgaaacagacacgcagtcgtaatttaaatttaaccgactccacgggcgcgtaaaatggcaaaccaacccagaacccagccccgaaaatgcaccgcgccgccgccgccaccgtggcggcgccgcaggcgaccgacgcgcagctcctggcgggcgcggtggaggcggcgatcgccacccgatccgcgcggctcggccgagcggcccacgcgcgcgcgctcaggctgctgtccccggcgctcccgcccttcctctgcgcgcacctcgtcaacctctactccaagctcgacctcccgggcgccgccgccgcgtcgctggccgccgaccccagccccaccgtggtgtcctacacggccttcatctcgggcgcggcgcagcacgcgcgcccgctccaggcgctctcggcgttcgccgccatgctccggctcggcctccgccccaacgacttcacgttcccttccgccttcaaggccgccgcctccgcgccgccgcgcagcgccgccggaacgcagctgcacgccctcgcgctcaggttcggatacctccccgacgacgccttcgtctcgtgcgcggcgctggacatgtacttcaagacgggctgcctcgcgctggcgcgccgcctgttcgacgaaatgcccaacaggaacgtggtcgcctggaacgcggtcatgaccaatgcggtgctcgacggccgcccccttgagacggtcgaggcctactttgggctccggggtgctggtgggatgccgaacgtggtctcggtctgtgcgttcttcaacgcgtgcgctggtatgacgaacctgtcccttggggagcagttctatggttttgtggccaagtgcggctttggcaaggatgtctccgtgtccaattctgtggtggatttttatgggaagtgccgttgcgtggggaaggccagggcggtgtttgatgggatgggagttcggaacaacgtgtcctggtgttctatggttgttgcatatgcgcagaatggggcagaggaggaggctttctttgtctacttgggtgcaaggagagctggggaagagccgactgacttcatggtttccagtgtgctcaccacatgtgcaggcctgctaggacttgaccttgggcgtgctctgcatgcagttgctgtccgttcctgcattgattcaaacatttttgttgcaagtgccttggttgacatgtatgggaagtgtggcggaatcgaagatgctgagcaggtctttttcgagatgccacagcggaatcttgtcacatggaatgcgatgataggaggttatgctcatattggtgatgctcacaatgcactttctgtgtttgataaaatgataatgggtcaagaaacagcacctaactacatcacacttgtcaatgttctcacggcatgcagcagaggaggtttgacaaaggaagggtatgagttgttccagacaatgaagtggaggtttgggattgaaccaagaattgagcattatgcttgtgtggtggacttgctttgccgtgcaggaatggaagagcgagcttataagatcatacaggggatgccaatgagaccttccatttctgtctggggagcactacttggggggtgcaagatgcatgggaagacagaactaggaaggattgctgctgagaagttgtttgaacttgatcctcaggattcaggcaatcatgttttgctctcaaacatgcttgcatctgctggcaggtgggcagaagcaacggatgtgagaaaggagatgaagaatgttgggatcaagaaggacccagggcgcagttggatcacttggaaaaatgttgtccatgttttccaggctaaggatacaacacatgatatgaatagggagatccaggcattgttggccaagctcaaagggcaaatgcaagctgctggatacatgccagacacacaatatgctctctatgatcttgaggaagaagagaaagaatcagaagtgtttcaacacagtgaaaagcttgctctggcttttggattgatatgtataccacctggcatacctataaggatcatgaagaatctgcgaatttgtgtagattgccaccgggcttttaaattcatatctggtattgctggtagggagataattgtgcgggacaacaatatgtttcatcacttcaaaaattatgagtgttcatgcaaggattattggtgaaagttgtatccacaagatatactgatgcatgttttgttggcatctctagaagcacctctgcagatatagaaggtatctattttagttcctttacatgatttgtattct

SEQ ID NO: 109690 - DNA, 117 bp, Zea Mays
atgacgttgagtgcggagacacactacaaggatttgaagctgctggcctcgacaaagttaaagccggacgaggagccgatggcgttgcggcttgaaggtgaagccgagggcgagtga

SEQ ID NO: 109691 - DNA, 264 bp, Zea Mays
ttaaaaattactataaaacataaatacagaacgacaaacaccattttaatatataaaaacctatgtggcaaactatcaacgtaacattaatattttattgacgatataaatatgtaatattattataaatacgtcgactcaaataaaatgaatgatgtcggacaaacattataatatagaaaagatcattacaaaacatatttcttctgcaataaacataatcaaaccaccaaacccgtccagatccaaaactttagacaaaag

SEQ ID NO: 109692 - DNA, 669 bp, Zea Mays
atgcccagatcatgtgctcacctccccgcaatcaaggtcgtcacgcccgacgaggatggtcgccagtcgccgcacggcggtccggtccccaacgacggctccggcgcaggcgcgaggaagaagctccggctcaccaatgagcagtcaacgctgctcgaggacaccttccgcgcccacaacatactctccaacgcgcagaagcaggagctcgcacggcaggtggatctcagcgctagacagacaaatgaaacatacatcaaaagcaagtcactgcctattatttttgacctcaagatcttctacttcattggatttgcattgttctgcctggaggcttttctgagcatgtgggtcattcagatccactttggggtcaatagtggcgcaacaaggttctccgttgactcaagaaccaagctgttaatgaggacaccttccggcgttcagatgagtttggatggaaacctcggagggcctcctattgtgccctctgacagaagcatctcgcggacgagagagtcttcgtttaatgtgtccaaatattttcttttttccatgtcgacaaatatcatgtgttggcacaaaccacatatgagagaagcctatttagctacagctgcaactatctatgccagcaaagaggctgcatgggggaagaagaaagattaa

SEQ ID NO: 109693 - DNA, 978 bp, Zea Mays
atgccgtcatgtgcccgcatctcctccgccgtctccaccgccgccgcatcctcctcctcgccgccgccgcatcctcctcgctgccgccgcctcgccgccgccacggcgcgcgtgcgggaggggacgctccgccctgaggaagcacacgacctgctcgacgagttgcagcgtcgaggcacgcccgttctcgagcgcgatctgaacggcttcctcgcggcgctcgcgcgtgcgccgtcctccgccgcctgcaggagtggccctgccctcgccgtcgcgctcttcaaccgcgcggcgtctcgggctcaaggaccgcgggtgctgtcccccacatcccacacctacgccatcctcatggactgctgcacccgcgcgcaccgcccagagctagcgctggccttcttcggccagctcctcaggacaggcttgcgcgtcaatatcatcatcgctaaccaccttctcaagggcttttgtgaagcgaagcggacagacgaggctttggacatccttctccacagaacgcctgagttgggctgtgtgcccgatgttttctcgtacagcatacttctgaagagcctctgcgaccaaggaaagagtggccaggcagatgatttgctacggatgatggctgaagggggagctgtctgctcgcccgacgtggttgcctacagtacagtaatcgacggcttctttaaggagggtgacgtaaataaagcatgtgatctattcaaagaaatggtacagcggggcattccacctgattttgtgacttatagctctgtggttcatgccctgtgtaaggcaagagcaatggacaaggcagaggctttccttcgacaaatggtcaataaaggtgttctgccaaataactggacatataataacttgatatatggatactcctccacaggacagtggaaggagggcagtaggggtattaaagaaatgagaagacaacacatcttactaagatgttgttaa

SEQ ID NO: 109694 - DNA, 447 bp, Zea Mays
atggagttgtgcattttagtcccagggatttcctcgcaacatcatggcagtggtagcccagaacagggtcaatttgggttagcttcttggaaatgctctgaagaatcatttgcacatcaagtgaagatcagagatcctctcaagattggttttcctaatttatgggcgttgcgacttgcacgccagctacttgtgtggcatcctgaggatcggctaagtgtcgatgaagcactaaatcatccttacttccaggagccaatgtaatgtaaggagaggagattagtgataactaaccgacgaatcttcagctcggtcctttcaagttcaagatgttgtgaatataacataactagtattagaggaattcatgaatcgtttgtaatttaccatcctagccgtgtcataaagatgttgtgaatataacatgaagcaatagatagtaacgac

SEQ ID NO: 109695 - DNA, 636 bp, Zea Mays
atggcgagcacagggagtgagcaggtacggctgggctgggcgaccatggcgagggagctcgggagaaaagctacggcgcaggaagctgggcggccgaacgcgtgggagatccagggcgcgcagtacagagagctccagcggcgagcgcaggggcgcggtgcagcgaccatggccgagttggagccagggacggcgccgagcaaagaaggaagctgcggtgcgcagactgtaccgagcgccggtacaggaagatccgagctggggcgcggcggggaagctccacggtgatcatggcacagcagcgcgcgggatccggtgaagtctagtacagaggcacgacgaggtgagagatggcactaggggtgaaaacgggcgatacagacggatagtagttcatcccgtatcctaacctaatgtatttaaaacggattcaggatcgcatacgtatagttagaaacgggacggatacggatacagggaccggatatttatccgggcggataagtgacgggtacgaatattatttgatcggatatcggatacttgtcggataatgcattaattggttatcataaaatattcttgttcgaccacaaaattgcaagtaaattaatactaataaacatttaatagaag

SEQ ID NO: 109696 - DNA, 1407 bp, Zea Mays
taaatcacgacagcacccatcgcgactacttcagaatcatgaaaataatcatatctcattcatcgaactaattcaataatactagacgcatccatttatcaatccaataattaagctaacagaaatatgaatcggcttacccatgactaaatttgatatgatatcggcgaatatggcaaggattccggttcagcccttgtgtcgagcacaaaggcgagaatcgcaagtcatcgacacggtgctgcgacggagggtgatggcgaggcggagatcgagctggggccgagcaggggttggcgaggatgagaaccggtgtctgccagcagcgagattgaagaccaaagtatgacggagacacagctgcttgagggatacagtccgatgtccatggacgcgagctggagcagagcgagcagtctgtcgagcgagatgcaagggaggcgcggagccgagcaatcacttgaacatggtcgacggcgagttctgccggaagagaacactagcacacagcgcggcacgacgaacgcgcagagcttcaaaaccacgcgcgcgagacctggccggaaccaacgacaagcgaacagagaggaacatgtatgggagttcaacggcgatggggacactgccgaggtccacctccacaggctgcgaggggaacaacagcgcgcaggaaccagagctcagagtcgagcggtggccagggaacagggtcgagcggttgaatcgatgccgatcgcgagcagtttcgcatgtacgacaacccggcggaggagaacttaacggggtgctttgcggctggggagggagcggctgcgcgcacaggaagcaggcgcgcgcgcggcgatgagccgggatgcgacagatcgaggctgaggcgcagcagttccaaatcaaattaggaggagacccaggtacccacgacggccggctaggaaggaagcggcttggcacgtccatggctgagggctagctgggcgacaacgcgcgaccatggcgagcacagggagggagcaggtacggctgggctgggcgaccatggcgagggagctcaggagaaaagctacggcgcaggaagctgggcggccgagcgcgtgggagctcgagggcgcgcggtacagagagctccagcggcgagcgcaggggcgcggcgcagcggccatggccgagttggagccagggacggcgccgagcagagaaggaagctgcggtgcccagactgggcgagcgccggtagaggaagatccgagctggggcgcggcggggaagctccacggcgatcatggcacaacagcgcgcgggatccggtgaactctagtacagaggcacggacgaggtgagagatggcacatccgctcggggaggcagggaagcgatgcaggcagggagcttcgacggtgcacaaggaga

SEQ ID NO: 109697 - DNA, 141 bp, Zea Mays
ttttttcttttttctttttctctggattttctaattccttttctatttcttttctatagggttttcaattccaaattcaaattaggtttcaaattcaaataaattcaaacatgtgcaacactttgatgtcgataaaacggg

SEQ ID NO: 109698 - DNA, 423 bp, Zea Mays
atggcgcgcgtgttgagggcgtggggaggaggtgcacggccgccatcaacgctctcctacacccggatctctggagaggatgatcacgataggagagctgatgatctcaagacactctataaggcctatgctacagaagtactttcagatggaattgtggatgataagaagactgctatattgtcaaaactataccttgacgcaggaggcaaagctgacggcgtgttctgtataagtgctcttacatttgttaggacattgcaggttgtcaagttctttaaccagtatttgtgggcaactgttcgaaaaggtgactctaaatctgtataagtgctcttatagttgcgtgttccatatcttgatcacgttctttaaccagtttctagtcttcagttctgtgggaaggactatactgctacaacc

SEQ ID NO: 109699 - DNA, 718 bp, Zea Mays
gggccacaatatgtatgcacaagcttctctactttcatctgtactaattgcagcgggatacaccgagagttcagtcatcgtgtaaaatcagtatcaatggctaaattcacttcccaagaagtttcggcacttctagaagggggcaatgagcgtgctaaggaaatctatttcaagcattgggacttgcaaggccctgttattgacagtagtgatgtacatagactcagaaatttcatcaagaatgtatatgttgaacggagatattcagaccaaagaattggcgaacatttagcgcaagcaaagatccagggtaataaggactcttatggaaatagcaatgtagattcatctccaggagttttaagaagtgcatatgtcggaacttatgaagataatcacgatctaaagcgcaccaaagaaagtctctcagaaaatcaaaacaattctaatggacatccagtgagtagtacagtagaccaaaataataattctataatggcgagagaaaaggtcgaccttagaagccatctgcgtccagatgatctcttgaaaactgatggaaagtcagaaaataatcagaaggttgtgatttcatcagcttcttctgcagcacaagcttccaaagaaataaatagtaacaaggtgcttctgcccatcaaacttcctgatcctcctaggtcacagaaagcaacatcatctaatacctctactgaagcac

SEQ ID NO: 109700 - DNA, 365 bp, Zea Mays
ccagctcgtcgttcccgtggatcgccagctgaaggaacagaaggcaaaaacagagagggaaattgaacaaggaataaacaagagattgtataggaagcttgatacgaaatggaagcagagcattgtggtcagaccaccaccatctctaagggagaacaaagagaaggcaagcagagcctgtgcacgtattggttggttcagttgtgcggttgctctttttggctcttatcttcgtcaccatccttgtatttgtaggattgtggaaatgtaacccgttcaagttgctgcattagtagcagctagtagtatctgtgattcagaaatctaaaagttgtgacttgtgaggcagcctgctgccttgttca

SEQ ID NO: 109701 - DNA, 159 bp, Zea Mays
atgctctgtttctgtgttatggaaactaatctatactgcatttcagattctgaagaattccagccagttgtgcctgttgtgaaagccgagccacttaaaaatcagtgagctgatgaagatgttgaagaagatgatgtaaaagaatcatgggaagaagag

SEQ ID NO: 109702 - DNA, 900 bp, Zea Mays
atggacgcacaaaatatatttgacttaaaggtaaatgttggtctgcatcctgatgctgtggtgtatagtatgctgatggatgggtactgtcttgttggcaagatggagaaagcattaagagtatttgatgctatggtgtcagctggcattgaaccaaacgttgtagtgtattgtacacttgttaatggctattgtaaaattggaaggattgatgaaggattgagtcttttcagagaaatgctgcaaaggggaataaagccttcaactattttatacagcatcataattgatgggttatttcaggccgggagaacagttcctgcaaaggtgaaattccatgaaatgacagaaagtggtatcgctatggacatatgtacatacaacatagttcttcgtggactttttaaaaatagatgctttgatgaagcaatctttcttttcaaagaattacgtgcaatgaatgtaaagatcaatatcataactctcaataccatgatagatggaatgtttcaaaccaggagagttgaagaagctaaggatctgtttgcttctatctcgagaagtcggctggtgcctagtgttgtgacttacagtataatgatcacaaatcttataaaagaaggattggtggaagaggcagaagatatgttttcatccatgcagaatgctggctgtgagcccaattctcgattgctgaatcatgtagtcagggaattactaaagaaaaatgaaatagtcagggctggagcttacctgtccaagattgacgagaggaatttctcacttgaacatttaaccacaatgttgctggtcgatctcttctcaagcaaaggaacttgtagggaacacataagatttctccctgcaaagtatcattttcttgcagaggccagtccgtga

SEQ ID NO: 109703 - DNA, 1419 bp, Zea Mays
atgccgtcatgtgcccgcatctcctccgccgtctccaccgccgccgcattgtcagcatcactggcgcgtcgaggcacgcccgttctcgatcgagatctgaacggcttcctcgcggcgctcgcgcgtgcgccgtcctccgccgcctgcgggagtggccctgccctcgccgtcgcgctcttcaaccgcgcggcgtctcgggctcaaggaccgcgggtgctgtcccccacatcctacacctacgccatcctcatggactgctgcacccgcgcgcaccgcccagagctagcgctggccttcttcggccagctcctcaggacaggcttgcgcgtcgatgccatcatcgctagccaccttctcaagggcttttgtgaagcgaagcggacagacgaggctttggacatccttctccacagaacgcctgagttgggctgtgtgcccgatgttttctcgtacaacatacttctgaagagcctctgcaaccaaggaaagagtggccaggcagataatttgctacggatgatggctgaagggggaactgtctgctcgcccgacgtggttgcctacaatacagtaatcgacggcttttttaaggagggtgacgtaaataaagcatgtgatctattcaaagaaatggtacagcggggcattccacctgatttagtgacttataactctgtggtccatgccctgtgtaaggcaagagcaatggacaaggcagaggctttccttcgacaaatggtcaataaacgtgttctgccaaataactggacatataataacttgatatatggatactcctccacaggacagtggaaggaggcagttagggtatttaaagaaatgagaagacacagcatcttaccagatgttgttactttgagcatgttgatgggttccctttgcaagtatggaaaaatcaaggaagctagagatgtttttgacacaatggcaatgaagggccaaaatcctgatgttttctcctacaatattatgctcaacgggtacgctactaaaggatgtttagttgatatgacagatctcttcgatttgatgctaggtgacggtattgcacctgacttttatacttttaatgtgcagatcaaggcatatgcaaactgtggaatgctagataaggctatgatcatcttcaatgaaatgagagaccatggagtgaaacctgatgtggtaacctataggacagtgattgctgccctctgcagaatcggtaagatggatgatgctatggaaaaatttaatcagatgattgatcaaggagtagcacctgataaatatgcatacaattgcctgattcaaggtttttgtactcatggtattttactgaaaacccaaggaattgatttcggaaataatgaaataatggccttgcatcttgacattggttttccttcatttctataa

SEQ ID NO: 109704 - DNA, 788 bp, Zea Mays
atgtctcagtctcttcttaatataataccgggaggacagactttccctctccgatctgaacagacatttgagtacactcctccagaggcactccttaattcaaactggtttcaaggatcaagaagtgcaaggcttaagtatgtctcttttttcccatttctcttctacgaattctggtatgacatctggagcgttggagttgtcatgctagagttgatgatgggttctccccatgtttttcagataagtgaccgtacacgtattttaatggatcaacatctcggagggtggagtgaacaaacaaaggagcttgcatacaagttgaggtcatacatggagttgtgcattttagtcccagggatttcctcgcaacatcatggcagtggtagcctagaacagggtcaatttgggttagcttcttggaaatgctctgaagaatcatttgcacatcaagtgaagatcagagatcctctcaagattggttttcctaatttatgggcgttgcgacttgcacgccagctacttgtgtggcatcctgaggatcgactaagtgtagatgaagcactaaatcatccttacttccaggagccaatgtaatgtaaggagaggagattagtgataactaaccgacgaatcttcagctcggtcctttcaagttcaagccgcgtgcatttggttagaggaattcatgaatcgtttgtaatttaccatcctagctgtgtcataaagatgttgtgaatataacataacatgaagtaaaagatagtagcatatgtgaaattacatgt

SEQ ID NO: 109705 - DNA, 1431 bp, Zea Mays
atgccgtcatgtgcccgcatctcctccgccgtctccaccgccgccgcatcctcctcctcgccgccgccgcatcctcctcgctgccgccgcctcgccgccgccacggcgcgcgtgcgggaggggacgctccgccctgaggaagcacacgacctgctcgacgagttgcagcgtcgaggcacgcccgttctcgagcgcgatctgaacggcttcctcgcggcgctcgcgcgtgcgccgtcctccgccgcctgcaggagtggccctgccctcgccgtcgcgctcttcaaccgcgcggcgtctcgggctcaaggaccgcgggtgctgtcccccacatcctacacctacgccatcctcatggactgctgcacccgcgcgcaccgcccagagctagcgctggccttcttcggccagctcctcaggacaggcttgcgcgtcgatatcatcatcgctaaccaccttctcaagggcttttgtgaagcgaagcggacagacgaggctttggacatccttctccacagaacgcctgagttgggctgtgtgcccgatgtttcctcgtacaacatacttctgaagagcctctgcaaccaaggaaagagtggccaggcagatgatttgctacggatgatggctgaagggggagctgtctgctcgcccgacgtggttgcctacactacagtaatcgacggcttctttaaggagggtgacgtaaataaagcatgtgatctattcaaagaaatggtacagcggggcattccacctgattttgtgacttatagctctgtggttcatgccctgtgtaaggcaagagcaatggacaaggcagaggctttccttcgacaaatggtcaataaaggtgttctgccaaataactggacatataataacttgatatatggatactcctccacaggacagtggaaggaggcagttagggtatttaaagaaatgagaagacacaacatcttactagatgttgttaatttgaacacgttgatgggttccctttgcaagtatggaaaaatcaaggaagctagagatgtttttgacacaatggcaatgaagggccaaaatcctaatgttttctcctacaccattatgctcaacgggtacgctactaaaggatgtctagttgatatgacagatctcttcgatttgatgctaggtgacgctcagcagcagggcattccgtacgtggcccctccgcctccgccgcaatggacgttcgtccctatgggccctcctccacctccgggacttgtgctgcagcagcctcagtttagcacaccgccggcacagctacctgcccctggagcacaggacaatcaggaaggaagtggaacgatggatggcttcgtcaactccctattcgcgtacccaactccgggcggaggcagcggccaaagctccaacaaccctagccgcggcggttcgtga

SEQ ID NO: 109706 - DNA, 429 bp, Zea Mays
atggcggggagaggaagagtgagagatggcttgaatgaacatgttccattgagcagagcagagggtacaaactacagagcgctcaggagaggcagcaatcaaacacgaaagggaacgattaggggagggaggaaggaggatggggattggggacatacctcaacatcaataggaagaggtggatcaccagcggcagccatatccggcgagctggcgagcggcgacgctctgctgctcggcgagtgtaggggccacggggctctgctgtgtggcttggggggagggggtctctgctacatggcgggggtgggggctctggtgggcgccggcactccgactggacggtgggcagcgacgctccggctggcaggtgggcggccgcgctttggctggccggcggccgcgtacgtgctggcgattgctagataa

SEQ ID NO: 109707 - DNA, 3110 bp, Zea Mays
ctggcaacgacgcagaggtcgttactgagctcgacgccgacgaagcctctcccaccgctgcctcccaccatgtctcgaccaaggaaatgcaccgcggcaatgccgtcatgtgcccgcatctcctccgccgtctccaccgccgccgcatcctcctcctcgccgccgccgcatcctcctcctcgctgccgccgccgcatcctcgccgccgccacggcgcgcgtgcgggaggggacgctccgccctgaggaggcacacgacctgctcgacgagttgcagcgtcgaggcacgcccgttctcgagcgcgatctgaacggcttcctcgcggcgctcgcgcgtgcgccgtcctccgccgcctgcaggagtggccctgccctcgccgtcgcgctcttcaaccgcgcggcgtctcgggctcaaggaccgcgggtgctgtcccccacatcccacacctacgccatcctcatggactgctgcacccgcgcgcaccgcccagagctagcgctggcgttcttcggccagctcctcaggacaggcttgcgcgtcaatatcatcatcgctaaccaccttctcgagggcttttgtgaagcgaagcggacagacgaggctttggacatccttctccacagaacgcctgagttgggctgtgtgcccgatgttttctcgtacagcatacttctgaagagcctctgcgaccaaggaaagagtggccaggcagatgatttgctacggatgatggctgaagggggagctgtctgctcgcccaacgtggttgcctacaatacagtaatcgacggcttttttaaggagggtgacgtaaataaagcatgtgatctattcaaagaaatggtacagcggggcattccacctgatttagtgacttataactctgtggtccatgccctgtgtaaggcaagagcaatggacaaggcagaggctttccttcgacaaatggtcaataaacgtgttctgccaaataactggacatataataacttgatatatggatactcctccacaggacagtggaaggaggcggttagggtatttaaagaaatgagaagacacagcatcttaccagatgttgttactttgagcatgttgatgggttccctttgcaagtatggaaaaatcaaggaagctagagatgtttttgacacaatggcaatgaagggccaaaatcctgatgttttctcctacaatattatgctcaacgggtacgctactaaaggatgtttagttgatatgacagatctcttcgatttgatgctaggtgacggtattgcacctgacttttatacttttaatgtgctgatcaaggcatatgcaaactgtggaatgctagataaggctatgatcatcttcaatgaaatgagagaccatggagtgaaacctgatgtggtaacctataggacagtgattgctgccctctgcagaatcggtaagatggatgatgctatggaaaaatttaatcagatgattgatcaaggagtagcacctgacaaatatgcatacaattgcctgattcaaggtttttgtactcatggtagtttactgaaagccaaggaattgatttcggaaataatgaataatggcatgcatcttgacattgttttcttcagttcgataattaacaacctttgcaaactgggaagggtaatggacgcacaaaatatatttgacttaactgtaaatgttggtctgcatcctgatgctgtggtgtatagtatgctgatggatgggtactgtcttgttggcaagatggagaaagcattaagagtatttgatgctatggtgtcagctggcattgaaccaaacgttgtagtgtattgtacacttgttaatggctattgtaaaattggaaggattgatgaaggattgagtcttttcagagaaatgctgcaaaggggaataaagccttcaactattttatacagcatcataattgatgggttatttcaggccgggagaacagttcctgcaaagatgaaattccatgaaatgacagaaagtggtatcgctatggacatatgtacatacaacatagttcttcgtggactttttaaaaatagatgctttgatgaagcaatctttcttttcaaagaattacgtgcaatgaatgtaaagatcaatatcataactctcaataccatgatagatggaatgtttcaaaccaggagagttgaagaagctaaggatctgtttgcttctatctcgagaagtcggctggtgcctaatgttgtgacttacagtataatgatcacaaatcttataaaagaaggattggtggaagaggcagaagatatgttttcatccatgcagaatgctggctgtgagcccaattctcgattgctgaatcatgtagtcagggaattactaaagaaaaatgaaatagtcagggctggagcttacctgtccaagattgacgagaggaatttctcacttgaacatttaactgcaatgttgctggtcgatctcttctcaagcaaaggaacttgtagggaacaaataagatttctccctgcaaagtatcattttcttgcagaggccagtccgtgattgatatgttgattttttttggaatcagtccttgcacgcacctgtcacagttaaactagtatatgatcttaactaaaaccattggtttacttcatgttcatgtttctcggaagattttcttctcatttgacctgcttgatatgcagatgttcatttacttttgatccaatatatgcagagcgttttatgtttttcgaagcatattcgttccggtgctgatgtagctatgtgctctccgtacacaactgatgtgtgattctctcttgtagcatgttttatcatgtctgttaacacagccgatgttgcatttatgaggaatgacgttataactgctgggagaataatgtagcatgctgaatcctgttttgggccctggctgagccgcccagttcgtcatgaccagcaaggtaatgttcatctacatgtctagtttgctcatcttgtctttgagaagggacacccttagctgtttacattaacaaatagatagcgttcttcctcattagtgattgcaaccaaaggcagtctggcctaatgctgtggcttgtaagggcaaa

SEQ ID NO: 109708 - DNA, 978 bp, Zea Mays
tataaacccttgaccgggagacggaaaaccccaacgccggcaagaaccgcccctcgcaagcaatcgcttgctcgtcgcgctcgaatcccgcgcgttcgcgggagcggcgaggaggaggaggagcatggccgggaagggaggagggaagtcgctggtcgccgcgaagatagcggctggcatggacaaggacaagaagtcgccggtcaaccgctccgcgcgcgccggcctccatttccctgtgggacgcatccaccgccacctgaaggatagcgcacaggccggcgagcgggtgggggcgacggcggccgtgtacgcggcggccgtcctggagtacctgacggcggagatcatggagctggccgggaacgcgtgcagggacctcaaggtgaagcgcatcaccccgcggcacctccagctggcggtacgcggggacgaggagctggacaccctgatcaaggccaccatcgccggcggcggcgtcatcccccacatccacagggagctcatcgacaaggctgcctaggaatgacgaaggagcaagcagtctgagaaaaaaacctgagaaccaagtagtaccatgaacctcttgtgggtggcttcgctcttgttgcgttgtcaatctgctgatacatacacatttctcaaaaatagaggcgggcactcgccgcttcatgctcccttggatggttgttcttttcatccatcagctgaacccagctgatcatcccggtcagcattgagaattggtctgtgcatgaacttaatcgataaacagtcaaagagctcaccctttttactctaccattgacgaagaacgttatctatgtgttaaacattcattgcacgcaattctttgaaaagcaagattgcttcatcagagcatctgtttttaaaaagtcctctgataactgtgctgtatgatactaattaaatactgcaactaaatggttaatagaaattagtaaaatatgtgaagat

SEQ ID NO: 109709 - DNA, 1514 bp, Zea Mays
tataaacccttgaccgggagacggaaaaccccaacgccggcaagaaccgcccctcgcaagcaatcgcttgctcgtcgcgctcgaatcccgcgcgttcgcgggagcggcgaggaggaggaggagcatggccgggaagggaggagggaagtcgctggtcgccgcgaagatagcggctggcatggacaaggacaagaagtcgccggtcaaccgctccgcgcgcgccggcctccatgtcgccgcccccctctctttctccgctcgcttgttcttgttttgctcgtagctccgcttcgtcccacccttgtcgcgacgagggctcgtttcgttcttgggcgtgacgtacgcgcgcgtgctgctttctgtgcgttctttatcatacggggtgtgggttgttggcgcggcctgccgtgtccgcttggagtggaaagcgtgttcgttgttctcttttcaagagatttggcttcttcttcttcttttggtttgggccatttcttttgttagtttgcgtagcagtcaggcgtcggcctggaactcttgaagtagagcattcattcacgtgctgatcatgtatatctgctggtttatttggtgcatgaatgagctattatctacgttgcgcctggggacaaagcagataatgttgtgtgctaacaacagatactagtgcttatttcagtgttccattcagattatatgctacagaagtgttatattatatatcttggttccaaatataaaatccatgtctgttgtttgtcatgtgaattaagctgatcataatcgtgctgatattgtgaatgaattccatgcagttccctgtgggacgcatccaccgccacctgaaggatagcgcacaggccggcgagcgggtgggggcgacggcggccgtgtacgcggcggccgtcctggagtacctgacggcggagatcatggagctggccgggaacgcgtgcagggacctcaaggtgaagcgcatcaccccgcggcacctccagctggcggtacgcggggacgaggagctggacaccctgatcaaggccaccatcgccggcggcggcgtcatcccccacatccacagggagctcatcgacaaggctgcctaggaatgacgaaggagcaagcagtctgagaaaaaaacctgagaaccaagtagtaccatgaacctcttgtgggtggcttcgctcttgttgcgttgtcaatctgctgatacatacacatttctcaaaaatagaggcgggcactcgccgcttcatgctcccttggatggttgttcttttcatccatcagctgaacccagctgatcatcccggtcagcattgagaattggtctgtgcatgaacttaatcgataaacagtcaaagagctcaccctttttactctaccattgacgaagaacgttatctatgtgttaaacattcattgcacgcaattctttgaaaagcaagattgcttcatcagagcatctgtttttaaaaagtcctctgataactgtgctgtatgatactaattaaata

SEQ ID NO: 109710 - DNA, 1381 bp, Zea Mays
gctatctgcatatctgtaattgccctgcctttggtttctataactccgacggactactggatggatacttacatttgattattttgttcatgttgtataaagaaaatttagatgcaatgagcatggaagggaggactgcaccatgacttcttcagtagaatcttcttttcattcagcctgtcttatttggcaggatcctggaaggatattattacatattgtaactgacgcgttgaattatcctgcaatgatgatgtggtttctgacaaacccaccaactccatcagtaatccaaatccagagcctagatgatttgaaatggttgcctggtgatttcagttccagattcaagctgaagggggttcgggatccgagatacacttctgcactcaaccacttgcgtttttatttgccagaagtgtttccatctttgagcaaggttctactcttggaccatgatgtggtagtacagaatgacttgtctggattatgggacctagatatgaagggtaaggtaaccggtgctgtcgacacatgcacctcaagtgaaggtttccgccaattggatagccttattgatttttccaatccaagcgtcttcaacgaacttgacccaaaggcttgtgcatttgcatttgggatgaacatatttgacctgaacgaatggcgcaaacagggtttgagtacaacctatcatagatggtttcaactgggcaaaagtgagaagttgtggaaggcaggaagcctgccactgggtcaggtcgtcttctacaaccggacgctgcctctggaccaccggtggcatgttctagggctcggtcatgactccagcatcggaagagatgaactcgagagtgcctctgtcatccactacagtgggaaactcaaaccctggttggagatttctatcccaaagtacagaggctactggaacaggtaccttaactacgataacccgcacttgcagcagtgcaacattcacggatagaggcgatggcgggtgaggtgattcgcaaggtagaactgggatatacgcaacttcgctgtagtaacttattaggagagcaagttgttgtttttttgtttctgttgctagatgccctatttgcaattttgtttgctagtagtcacaatcggtacaaaagcaaaaaaggaagaacaaaatcgagtacacgagctacagtttcactagtgatacactgaaggtttgacagaagtcaagccactagctaacattatcaataactagtgttgcctcggacctggggaagagtgcgaattccacggagctcagttagcgtgcgttggacaagatagatgtaaagttttcgcgataatatcgttctctcttacaaagaaaggggttttactactgccattt

SEQ ID NO: 109711 - DNA, 1977 bp, Zea Mays
cagtcactgttcacacaacagctgctagtagccgtagcccgtaggcgagccagaggcggcccaattcgagagcggttccggcggcgtgggcggcgccgtgcctgagatcggagccccgtggcgcggtgctggcaactggcggcgcgatgtgggcggtccacgggagggagtccacggccgctgcgcttcgcctgctgctgatcgcgatcgcctgcggcctcgtcttcgcgctcctccacctccccctcccggatgaccgtgcgcgaaccgccgaccccggtgggcagcgcggcgctgctgggggcggcggggcccgcctgtcggtgcagcaggggagggttcgagaggccagaaggctgagtgtcgtcaccgaagagacagatgggcaaactgacgaaacggcggcggaagaagatgaaaggatatctaaatctcccccagacaccaaagagaagatctggatgatgcaagatcagctaattttggccaaggcgtacttgcatttcgcttctccccaaggtagtgtacatttagttcgagagctgaaattgaagataaaagagatcgaaagggcaataagccactcaagtggaggtacccatgtacctgggagtgtgttgcaaaaaataaaggcgatggagctgaccctttcaaaggctcagaggacctacccgcattgctctcagatgacgtcaaagctacgtgcaatgatgcataatagtgaagaattggtcagagcacaccaaagtgaatcttcattccttgagcaggttgctgtgaggacattacccaaaggccatcactgcctagcaatgcagcttaccgcagaatacttttcgttagatcccactaaacgtgaattccctaaaagagacaacattcagttgggtggttattatcattatgcgatgttctctgacaatgtgcttgcaagtgctgtggttgtcaactctacaattgctgcatcaaaggatcctggaaggatattattacatattgtaactgacgcgttgaattatcctgcaatgatgatgtggtttctgacaaacccaccaactccatcagtaatccaaatccagagcctagatgatttgaaatggttgcctggtgatttcagttccagattcaagctgaagggggttcgggatccgagatacacttctgcactcaaccacttgcgtttttatttgccagaagtgtttccatctttgagcaaggttctactcttggaccatgatgtggtagtacagaatgacttgtctggattatgggacctagatatgaagggtaaggtaaccggtgctgtcgacacatgcacctcaagtgaaggtttccgccaattggatagccttattgatttttccaatccaagcgtcttcaacgaacttgacccaaaggcttgtgcatttgcatttgggatgaacatatttgacctgaacgaatggcgcaaacagggtttgagtacaacctatcatagatggtttcaactgggcaaaagtgagaagttgtggaaggcaggaagcctgccactgggtcaggtcgtcttctacaaccggacgctgcctctggaccaccggtggcatgttctagggctcggtcatgactccagcatcggaagagatgaactcgagagtgcctctgtcatccactacagtgggaaactcaaaccctggttggagatttctatcccaaagtacagaggctactggaacaggtaccttaactacgataacccgcacttgcagcagtgcaacattcacggatagaggcgatggcgggtgaggtgattcgcaaggtagaactgggatatacgcaacttcgctgtagtaacttattaggagagcaagttgttgtttttttgtttctgttgctagatgccctatttgcaattttgtttgctagtagtcacaatcggtacaaaagcaaaaaaggaagaacaaaatcgagtacacgagctacagtttcactagtgataca

SEQ ID NO: 109712 - DNA, 4591 bp, Zea Mays
atggcggcgccgctcgcccctctcactgcggccgcggtgctccgcctcgggagccgaggcctgcgccaccgcatcctcctcgcttcgctccgcccctgctcctccgcaaccccgccccatcgttccgccctcccggccgctgcacgccgggccccgccgcctcctcgccgtttcgcccacactcttgccgcgtctgcggccacggccatctccgagggtcaggcggatttagtgcctggttcaacaacttcaaccaagggacgcatctaccacgagacgtatggttgccaaatgaatataaatgacatggagattgtgctttctatcatgaaaaatgaaggctatgatgaaattgtccctgatcctgagagtgcagagataatatttatcaacacctgtgccatccgggacaatgcagagcagaaagtctggcagcgtctcaactacttttggtttttgaaaagggaatggaaagctaatgttgctgaaggtagagcaaaatctatgcgtcctccaaagattgctgtcctggggtgcatggcagaacgactgaaggagaaaatactcgattctgataagatggttgatgttgtttgtggacctgatgcatatagggatttgcctaggttgcttcaggaagtcgattacggccacaagggcatgaacacacttctatcactcgaggaaacttatgctgatatcaccccagtaaggatctctgacaattcaattacggcatttgtgtcaatcatgagaggttgcaataatatgtgctcattctgcatagttcccttcactagaggtagggaaaggtctcgcccagtgtcttctattgtccgtgaggttggtgagctatggaaagttggtgtgaaggaggtaatgcttcttggtcagaatgtaaacagctataatgacacttctgaagtagaagagttggagcctggcaaaaattggcaactcagtgaaggattttccagcatgtgcaaggtgaagaatatggggctgcgttttgctgatctcctggatcgattatctttggaataccctgagatgcggttcaggtttacctcaccacacccaaaggatttcccagatgagctactgtatttgatgcgggataggtataacatctgcaatcttattcacttaccagcacaaacaggcagtacagcggcgctggaacgaatgcggaggggttacactcgagaagcatacttagaacttgtccacaaaattcgtgatgtcattcctgatgttgggctaagcagtgatttcataactgccaccgccggttggagactgcagcagtgcagcaggcgagcaggactgcaggagaaggggcagggtgctgtagctgccggtgtagccgccggcttttgtggagagacagaagacgagcacgccgagacccttagccttgtgagggctgttggatacgacatggcctacatgtttgcatacagcatgagagagaagacccacgctcaccggaactacgaggacgatgtacccgaaggtgtgaaacagaggcggctcatggaactgatcaacactttccgcgagaccacgaagaagaactacgactctcaagtcggcacagtgcagctcgttctcgtggaggggcccaacaagcgtgctcccaaaacggaagtgatagggaagactgatcggggccacaaggtgtcgtttgcccgcgtccctgtcccgcacacgttcgaaggcgaagaagcacgtgagccggcagtcggtgacttcgtcgagccaaatttctgtgcggtgttggtcctcccggaacaaattctgtgcagtgtcgcgaaaagcagcatacgcgcaaattcaaaaccacagattcacagcactacgctgcaaatcaaaacaaaactgaacgactcgagggagccctcgactgtcgaccatctccagccgtctatccgcggtcggacggtccaaacacgcatcaaatcaaacggacgaaaatatccccaatcccctaaaccccgttcgttgcccaccaacgccaccctctgtcatccaccaccatccatggccatggcgtcctccccggcctgccacttccgccacccgccccgcctccgcctcctcctcccgctgtccacctcggccccccacccgtggctctactcctggtcgcacccgcgccagcgcggccgactccgcgcgccgcccgccgcgctcgacctccgtccggagccgtccccgtcgtccgactccgacgatgaggacgccgtcggtgccagccgctcctccggccgctccaccatgtccctcatcctcagccgcctccgccgcgccggctactccggcgaggacccgcgtgccgccgccccaccgcacccgccgcgggggtcggtcgaggacgtcttccgcgccgacgatggcgtgctccccaacgcgcgcggcgggttcgacgccgacgacgaggagcgggcgctcggggacgcccgcttcccgtgggagcgccccatgccgccgcccgaggccgcgccgcggtccgcgcggtcgcccacgtggatggcggagctgacgctccccgccgcggagctcaggcggctgcggcacgccgccatcaggatcaagtccaggaccaaggtgggcggggccggggtcacgcgcgagatcgtggagaagattaaggagaaatggaagacggaggaggtggtcagggtcaaggtctctggcacgccggcgctcaatatgcgcctcttccacgagatactcgagagaaaaacaggaggattagtaatatggagatcagggacttctgtttctctgtaccggggagtagattatgatgaaccagaacccactaagaaatcaaagaagaattcacagtctcttgctatggatttcccaattaaggggtcttctaatccttccttactaccaactgagacagcgaacagtgtacgagacagcaatgtagctttagtttctaatgctgcgaaagaggaactagttgtacaagcaccagaaatcaagtatgaagatgaaattgacaaactgttggatgaacttggcccaagatacactgactggcctggatctgacccgttaccagtagatgcagatttacttcctgcaaacatgccaggttacaagccccctttcagagttctgccatatggtgttcggccatctcttagccgaagggacactaccaatttacgccgtcttgctcggggactgcctcctcactttgctctcggacgaagcagacaactccaaggcttagctaatgctatggtaaagttgtgggagaaaagttctattgctaaaattgctttgaagagaggagtacagcttaccaccagtgagaggatggctgaagatattaaaaaattaacaggtggtgtgatgctttcaaggaacaatgaatttatagtcttctacagagggaaggatttcttgtcctcagaacttgcagaggtgctactagagagggaaagattagcaaagtcacttcaagatgaagaagaagcacggcgaaaggcagcgtcttatttttcaagtgctgagacatatgcacagcccactgtagctggtactctaggagagactctggaggctaactctaaatatggaactaaacatgatgagaatcatgcagacaaaatggcaagaactattgaagctgcaagacatgctgacctcgtaagaaagctagagtggaagctttcacttgcacagaaaaagatggagaaagccgaaagggtactaggaaaggttgagacagccctgaggccaaccgaagattccagacctcctgaaacaataacagatgaagagagattcatgttccggaagcttggtctaaggatgaaggcatttctgctccttggaagaagaggagtttttgacggcacaattgagaacatgcacttgcactggaagtacagggagctggtgaagatactagtgaaagcgaagtcttttgcagacgtgaagaggatagcactgtcgctggaagccgagagcgggggaatcctagtttcagtcgacaaagtctccaaaggctatgccattgttgtgttccgagggaagaactacagacgcccttcctcgctcagacctagaaatctcctgtcaaagcggaaggctttggccagatccatcgagctccagagacatcaggccctgagtcgtcatttcgcaaagctaaacaggaaggtggagcggcttaaggcagaactggtccagatggaagacgtgaaggagcaaggagacgaggagctgtacgccaaactggatgccgcctattcgagcgacgacgaagacatggaggatgaggacgacgaggcctacctcaagcgctttgacaatgaggtcgccggtgctaccgccgacgacgatggcagcgacgactacacctccgccgccgacgaggccgattaccccgactcagacgacgaagctggtgattgctccgaagacgaaggcgaggacgacgaagatgaggcggctgccggagtctctgacgctggcttccacggcgaagtagtaggtttcagttccgacaccgacagacgaaaccacgacgtaaatgagtactagaacagtgctggttgtttga

SEQ ID NO: 109713 - DNA, 567 bp, Zea Mays
agccaactggttttttttttctttctcgaatgaaatggtgtcgtgtacatatgaagtaatcattaaatgatgccatttgttgtatcttattgatttattttacaggtccagatggaagacgtgaaggagcaaggagacgaggagctgtacgccaaactggatgccgcctattcgagcgacgacgaagacatggaggtgagcgcgatgaacaatcagggacaagcatggcatgcatgccctttgagattctggtaaacgttcacgatctggggccgtgtaggatgaggacgacgaggcctacctcaagcgctttgacaatgaggtcgccggtgctaccgccgacgacgatggcagcgacgactacacctccgccgccgacgaggccgattaccccgactcagacgacgaagctggtgattgctccgaagacgaaggcgaggacgacgaagatgaggcggctgccggagtctctgacgctggcttccacggcgaagtagtaggtttcagttccgacaccgacagacgaaaccacgacgtaaatgagtactagaacagtgctggttgttt

SEQ ID NO: 109714 - DNA, 2053 bp, Zea Mays
acctcgaacgcgatggcggcgccgctcgcccctctcactgcggccgcggtgctccgcctcgggagccgaggcctgcgccaccgcatcctcctcgcttcgctccgcccctgctcctccgcaaccccgccccatcgttccgccctcccggccgctgcacgccgggccccgccgcctcctcgccgtttcgcccacactcttgccgcgtctgcggccacggccatctccgagggtcaggcggatttagtgcctggttcaacaacttcaaccaagggacgcatctaccacgagacgtatggttgccaaatgaatataaatgacatggagattgtgctttctatcatgaaaaatgaaggctatgatgaaattgtccctgatcctgagagtgcagagataatatttatcaacacctgtgccatccgggacaatgcagagcagaaagtctggcagcgtctcaactacttttggtttttgaaaagggaatggaaagctaatgttgctgaaggtagagcaaaatctatgcgtcctccaaagattgctgtcctggggtgcatggcagaacgactgaaggagaaaatactcgattctgataagatggttgatgttgtttgtggacctgatgcatatagggatttgcctaggttgcttcaggaagtcgattacggccacaagggcatgaacacacttctatcactcgaggaaacttatgctgatatcaccccagtaaggatctctgacaattcaattacggcatttgtgtcaatcatgagaggttgcaataatatgtgctcattctgcatagttcccttcactagaggtagggaaaggtctcgcccagtgtcttctattgtccgtgaggttggtgagctatggaaagttggtgtgaaggaggtaatgcttcttggtcagaatgtaaacagctataatgacacttctgaagtagaagagttggagcctggcaaaaattggcaactcagtgaaggattttccagcatgtgcaaggtgaagaatatggggctgcgttttgctgatctcctggatcgattatctttggaataccctgagatgcggttcaggtttacctcaccacacccaaaggatttcccagatgagctactgtatttgatgcgggataggtataacatctgcaatcttattcacttaccagcacaaacaggcagtacagcggcgctggaacgaatgcggaggggttacactcgagaagcatacttagaacttgtccacaaaattcgtgatgtcattcctgatgttgggctaagcagtgatttcataactggcttttgtggagagacagaagacgagcacgccgagacccttagccttgtgagggctgttggatacgacatggcctacatgtttgcatacagcatgagagagaagacccacgctcaccggaactacgaggacgatgtacccgaaggtgtgaaacagaggcggctcatggaactgatcaacactttccgcgagaccacgaagaagaactacgactctcaagtcggcacagtgcagctcgttctcgtggaggggcccaacaagcgtgctcccaaaacggaagtgatagggaagactgatcggggccacaaggtgtcgtttgcccgcgtccctgtcccgcacacgttcgaaggcgaagaagcacgtgagccggcagtcggtgacttcgtcgaggtgagaattctcaggtcgtcgacagcaacgttgttcggggagccgattgcacgcacaagcctgagcgcgttccacagaaatgtttcacccggagcgcaggctgctgctgcgtgagtagcggttgaatttttggttgtggattgaaatatgtagtgatattttaaatgactagagtttttgatatagaggagaaactgagaacgtgcatgtcagcctcatgagccttggtcatttacttttttgataaggttgtattgccatgtaaaggtcaaacaatgttgacaaagttttttgcttgttactatgaagtatgaacgtcagcttgagatggctttttacagcagggataatgacccagactgactatgtc

SEQ ID NO: 109715 - DNA, 2028 bp, Zea Mays
gcgtgctcaccgttttcatcacctgggctgcgctccggttcctccagtctctgctggacatcggcatttagggatggctgaatgcttgctgtgcgcatggtgctcaaggccgttgttgcagccgcttgtgttgttgcgttcgctgtcctatacaagagggtctacaaccagaggacagacaatgggcagtggtcgtcagcagctgattcacggatgaggagattcctctatgtagctgcagcgtttgttatccctgaggtccttgccatcgtgctcttcattgtgccttgggtgcgaaacgcattggagaagacaaattggaagatctgttatgccctcacctggtggttccagagccgcagctttgttggccgaggactacgtgagggcacatttgacaatgtcaagtactccatcttttgggtgcttttgcttgccgtgaagtttgccttcagctattttctccaaatcaggccacttgtaaaacccacaaaagagatatacaagctgaatggaatccagtacacttggcatgagttctttggccaaagcaatcgttttgcagtgtttgtgctctggttaccagtggtgttgatctacctcatggatatccagatttggtatgctatattttcttctctgtcgggtgcatttgtgaggctttttgcacatttgggagagatcagggacatgaaacagctgcgacttaggttccagttctttgcaagtgccatgtcattcaacatcatgccagaggagcagcagattaagatgtctaatcagacaaaggcgcgagttgaagaccttttgtccaggtcaaagtggaacaacaattatgcaagcacatcttctgtctcaacgagacaaattttccctggcgcatcctcgtctgtagttgaaccagcagcaccaattgataaagaaaagctcagttcccagcttagggagttgcagaattcaaggaagacgacaacaagtgctagatcaatgcaatcttttagggagcaattacctgcattcagcatgagagaggggtttctgaaagcagtcgcagccaatcagttgcttaggattcattgtagcagctacatcttatgtggtctttttactctggagcacatcaacttctcagccgatgaaggaaaaattaccagtgataatgttacacagttgatgcattatttcccttgttcaggtgggctgtcacttgggatcgaaaaggatagggcatctactgccgccatggggtttgtcgacgactccaaagggcatgctgtcgctaccagaggtggagcgagtgcccatcctcgacgcaggcctccccaccgcgactggaatcgtgaggtcagttctcctgtctacgacatgcagacatataacaaacttgctactcaaatctccctccctccatcttacatagctcctgaggacactggtaaaattagtggaacaatttggaccgaggaagtggtcttacatagcacaactgctgccaacaagagtggggaagcgatgcagagaaagatggcacaaccatttgaggccaaacatcaagggaaccagcttccagtgcctcttgtaccgatcatcgacaagggagtgctagaggaggaggttatggtgagttttgtcacgactaatggtgagcccacgactatggccacgtcaaagctggtctggtggaacctcggggagcagatgatgatgacgccgacatcatgcacctctgctgcgacgctgccgaccaggagacgggcccctccgtcgcgcgcgctctacaagtctggatccatcatcgtgctcggcaagactgacttccttaggccagacatgcctccatgcttgactcatgatgaaaaccaatacgtaatatgcgacaaacctaatagagtaaacatgatgaaccagattattgataagttgatagattttgaagttgatggcttgatgtcgaaccaagtggtgtgtggtgttgtctatcaagtgaccaagatcaagtatttaagtgtgaagctgctgtgcaagtga

SEQ ID NO: 109716 - DNA, 1923 bp, Zea Mays
atgttttcttttcgggacaaggtacctatcgtgcggcgccgggttaagctctgtctttaccggcagtaacagtagcccacgaagccatttttgcccttttgtcggctagaagaacagacgatctcaatctccgaacaattattaatcgtgttcccatccctgcttgctgctgctgggggtgttcggattcgtcagataaagagacccacggcactggtcaccggcggcgatggattccggcgcggacaccgccggcgaggcgttcgacgaaatgctccaagagaagagaccaagacttgacgccgagcgcgacgagtcgccgtggggggcctccacccggacgccctgggcgtcgtgctccgcttcctcccgtgcctcgccgaccgcgccagggtgcggtccgcgtgccgcagctggcgcgccgcctcccgcggccgcggcgtggccccgccgctgcccctgctggtgatgcccaggttcaggttcgccagcatgacccccgggggcgtgctgacggcgacggcgcggcgcgcttggatgccgcaggaggtggatgccgactgcgtgggatcttccgacgcgtggctcgtgggcgccaggcaggccggcggcgagtgcttcttggtgaacgccttctcccacgaggtgcaccacctgccacgcctgggcgattccgatctcagccattccgcctgctcgcttcgcaaagtggtgctgtctggttcacctcagtcgggacccgagtgcatcgtggccgctttcgcgttctgcaggtccaagcctgaactggcgctctggagacccgggatgaagtcatggtgtgtttggcagcactctttgattgccgggcacatcgacatggccttttatcaggggaggctgtacatgctctggaggttcacgccgtccctcttcgtctttgaaatcgcggaggatgggcatggggtcaagttctctcgcatgaaggattgcctgctcgagaagctcctcgctacccctcttgggtccagtcatgtattgagctgcaacatggtggagtggcacggaaggctgctgttaatcatccgatactatggcggttaccaagtcagacacagagttctgaaggtccaagtgttcgcgatcgacctgaacacgaagccaaatagcctcactgagatccacagcttcggtggcgactgcgtctttgttggttcaggcggctgcaagtcctttcctgctggtcagtaccgtggagttgaaggtgaccttatctactttgttcctgaccattacaaccctcacgacgcgttcgtgtacaacatgatggatggcaagacaaggttcatcgccgagccattgccttgcagcatttctgcaccagagcagagctccggtttcccggtgtggttgtttccgcccgagtgatctccgtcagtcacaaatctgatctgaccagctggtggatgctgcagtttgctgtcaaagataatgtgtgttgtcatgcattctgtatcgcaacccaatttgtatgagaaagttgcatctcgttcccagtttcctgcctgtatggtgagggattgcgcacttgcagaagaactgagatcagagtaagaacttggtctctgcaatacttacgtatgtgcctcaaatgcttgaaatgcaagtattttgttggcgcttctgatggtatttatcccctcttcttttttttatactggtcataagctgctggttttccattgacttgatagtgaatacagatcaatcatgatgaagtattctgctattgttactggcgtggtgtatcttcgagagtgatattagttcgcactgtaagtggttaccagttaaaatatgtttaaatagccgtgaactgtgaatctggaatacttgcttcttgcttggtgaaaggtgactaggtgcacagccacggttccttga

SEQ ID NO: 109717 - DNA, 1316 bp, Zea Mays
caaactggacgcaattcagcacaaacccaacttccaccagacccctaaccttttcgcagctccaggctccagcgcacagccgccgccgtttcttcatcttcttcgcagagccggcgctccatcttcggctccctcccttacttgcgctcggcacgcaggcggcggcggcggcgctgtggctcgggatctcagtgacggcatcagcggcttcccctcccgcctctcgccagtcgcctccggtcctccgcacaccggccggtgatctctctcctcccgcctccggtggatcgtcaacgacgcccggccccggcggctgcgccgcgcgcgtcctgagggcagctgcaggcgctgctccaccaaggcggtcgcgccgctttgggagcggtttatgcccccaaagtgaagcgtgctcttagtgccgctctttggaaccctggctactgctgttaaatggctcaaccttcagtcattctagcaactgcaagttatgatcacacaatcagattttgggaagccaagagcggtcgctgttaccgcactattcagtatccagactctcaagttaatcgccttgagataacccctgacaagcggttcttagctgctgctggcaatcctcatatccgcctttttgacgtcaactcaaatagccctcagccggtaattagctatgattcacatactagcaatgtgatggctgtgggatttcattgtgatggtaactggatgtactcaggctctgaagatggtactgttagaatttgggatttacggactggcacttgccaacgagaatatgaaagtcgtgctgcagttaacactgtagttctgcacccaaatcagaaagagctaatatctggtgatcagaatggaaacatacgtgtatgggatttggctgctaactcatgcagctgtgagttggtgccagaagttgatactgctgtaagatctctgacagtcatgtgggatgggagtatggtggttgctgcaaataaccgtgggacatgttacgtttggcgcctgcttaagggtactcagacaattacctgcttcgaacctctgcacaaactgcaagcccatgatggctacattctgaagtgcctgctttcacccgaattttgcgatccaaacaggtatcttgccacagcatcatctgaccgcactgtaaagatttggaatgtcgatggcttcaagttggaaagaactttagtcggccatcagcgttgggtttgggactgtgtcttctccgtcgatggtgcttatctgataacagcatcttctgacactacagcgaggctatgacgaatcctcttgga

SEQ ID NO: 109718 - DNA, 1101 bp, Zea Mays
caaactggacgcaattcagcacaaacccaacttccaccagacccctaaccttttcgcagctccaggctccagcgcacagccgccgccgtttcttcatcttcttcgcagagccggcgctccatcttcggctccctcccttacttgcgctcggcacgcaggcggcggcggcggcgctgtggctcgggatctcagtgacggcatcagcggcttcccctcccgcctctcgccagtcgcctccggtcctccgcacaccggccggtgatctctctcctcccgcctccggtggatcgtcaacgacgcccggccccggcggctgcgccgcgcgcgtcctgagggcagctgcaggcgctgctccaccaaggcggtcgcgccgctttgggagcggtttatgcccccaaagtgaagcgtgctcttagtgccgctctttggaaccctggctactgctgttaaatggctcaaccttcagtcattctagcaactgcaagttatgatcacacaatcagattttgggaagccaagagcggtcgctgttaccgcactattcagtatccagactctgactggcacttgccaacgagaatatgaaagtcgtgctgcagttaacactgtagttctgcacccaaatcagaaagagctaatatctggtgatcagaatggaaacatacgtgtatgggatttggctgctaactcatgcagctgtgagttggtgccagaagttgatactgctgtaagatctctgacagtcatgtgggatgggagtatggtggttgctgcaaataaccgtgggacatgttacgtttggcgcctgcttaagggtactcagacaattacctgcttcgaacctctgcacaaactgcaagcccatgatggctacattctgaagtgcctgctttcacccgaattttgcgatccaaacaggtatcttgccacagcatcatctgaccgcactgtaaagatttggaatgtcgatggcttcaagttggaaagaactttagtcggccatcagcgttgggtttgggactgtgtcttctccgtcgatggtgcttatctgataacagcatcttctgacactacagcgaggctatgacgaatcctcttgga

SEQ ID NO: 109719 - DNA, 1183 bp, Zea Mays
cggccggtgatctctctcctcccgcctccggtggatcgtcaacgacgcccggccccggcggctgcgccgcgcgcgtcctgagggcagctgcaggcgctgctccaccaaggcggtcgcgccgctttgggagcggtttatgcccccaaagtgaagcgtgctcttagtgccgctctttggaaccctggtaatggtaatctattcctatgcatttgttaccatatataatgccatcttttgtctgtttctattttcatcgtttgagagcatgcgttgatctattttcatcgttctgaaagcatgtgatgatgtatgcgcaggctactgctgttaaatggctcaaccttcagtcattctagcaactgcaagttatgatcacacaatcagattttgggaagccaagagcggtcgctgttaccgcactattcagtatccagactctcaagttaatcgccttgagataacccctgacaagcggttcttagctgctgctggcaatcctcatatccgcctttttgacgtcaactcaaatagccctcagccggtaattagctatgattcacatactagcaatgtgatggctgtgggatttcattgtgatggtaactggatgtactcaggctctgaagatggtactgttagaatttgggatttacggactggcacttgccaacgagaatatgaaagtcgtgctgcagttaacactgtagttctgcacccaaatcagaaagagctaatatctggtgatcagaatggaaacatacgtgtatgggatttggctgctaactcatgcagctgtgagttggtgccagaagttgatactgctgtaagatctctgacagtcatgtgggatgggagtatggtggttgctgcaaataaccgtgggacatgttacgtttggcgcctgcttaagggtactcagacaattacctgcttcgaacctctgcacaaactgcaagcccatgatggctacattctgaagtgcctgctttcacccgaattttgcgatccaaacaggtatcttgccacagcatcatctgaccgcactgtaaagatttggaatgtcgatggcttcaagttggaaagaactttagtcggccatcagcgttgggtttgggactgtgtcttctccgtcgatggtgcttatctgataacagcatcttctgacactacagcgaggctatga

SEQ ID NO: 109720 - DNA, 2144 bp, Zea Mays
tgcaaatcatctcgatggaaggtagtattatgccatcataatactaccttaaagtgaggagacgtaacgacgagctcgctttcacacagatgatcaatatggtcaaggtgcggcacaacaatgtggttccaaccatggccttgggagtgcagcagctgaagaaggagctgggacgatcaaggaaggttccattcgagttcgatgagatccacgagttccttgaccggttctacatgtcaaggattggcatccacatgctgatagggcagcatgtggctttgcatgaccctaaaccggagcctggtgtcataggcatcatcaatacaagattatccccaatccaggtggctcaagctgcttgtgaagatgcatgttctgtctgtttaagggaatatgtatcaactcctgatattaacatttatggcgatccaaattttacatttccatacgtcacattacacctacacctgatgttatttgaattggtgaagaactctctccgtgcggtgcaagaacggtatatgaactctgataaagatgttcccccagttagaattacagttgctgatggagaagtggatgtcactatcaaggttagcgatgaaggtggcgggataccaagaagcagcctcccaagaatttttcacgtatctgtacagcactgcaaagaatcctcctgagctagatagacctaatactgaaggggtaactatggagtatcacatctgttggagagaatggccttcaagagcacagtgaatcggacccacttacggttagttcgtgaggtagaagcaattggaggaaatgtctctgcatcagcttcctgtgaacaaatgagctatacctatgatgcattgaagagctatacaccagaaatggttgaagttctcattgacaatgtgaggaatccagcattccttgattgggaggtcaaagagcagacccatgatagattagcttgtattgttgagatggagagaatgcaagtttgaatggctctgtgccacttgatgtacatgagagattggataagaagctttgtgcatatggccaacgacgccttcggcaggagagtcgccaaacttcttggcgatgtctttcatgtgttgcttttagttcttttaaagactcctctgagtgttgtatctgaccgagaacaattatttcgtgatgattggggtaattgggctgcccggtgtaggcaagtcaaccatcatgaacgagctttattaatatgatgcaagctacctggtttggtggtaatgcttatgtgattggtgattctgcaaagcataagcagaagtggcacgtctactatgccaccactgagcacccctaaggagcttgttgttactcttgagatgtgcatgactaggctggacaagaagagagcttatgtcttcttcaagacctctattgatggttacacatcttgtgctaaggatatgaccaagccttcagtgattgtcatagccttctatttattatttcttctgaattcgagtttcaagacaaagaacatatttaagaatttgaccagaagtcaagcatcaaccatgtcgagattagcgtgcatgatatggttagttcttgtttgctaagcataactctgaccagtggcatcgtcaaggagtgcgtcgtgaccagtggtgctggcagcaaggccatggcactcagggtccatgggtcgtgggtgtggcttgttcagcgcctactattcgcgggagtcggcgaggtgcctgctgaacttggtggaagtggagtacaattatgatgctgacatcgacctcgtgttcatcgacctgcccgtgctagagcaggagcggtaccggtggacactggagattgtggtgtaggccatgacgcgtgggcgtcgacgtcagcgcttgtcttcgcgtctgagccactctgagttggagaccattgccatttgtgatgtgcatgagagatgtattgtggcgtcttgttgtataattggtatggagagagtatgttttgctatgtccgtatttgcatactctacatgctctgaatgttgtataacactggacaataaatgatgatgtcccttcaataggaatctcatctctaaacaattaataggaatctgatcttctttactttgatcctgtattattaac

SEQ ID NO: 109721 - DNA, 961 bp, Zea Mays
taatgattattgtgtaggtccacttttcagtcgattacatgtacattattcttaatatttctaccatgtaatatcttttggtagcttgcatcgtattaataaaaaatcttggtgttctgcaatattttcatcatgtaatatattctaaaattgctctgtctagctgctttccagtgacaaaaacgattccaagaaaccacttcttgtcttcctccactggctgtctgtcatcttgctctaaaacaatcgcagtcctgcaagttgttgctgctgctcctacccctgcctctgcaattgggtttgagggatatgagaagcgcctcgagatcagcttctatgaggcacctgtcttcgctgaccccaacggaaggggattgtgtgcactcttgcgtccctagatttactctatttctgaccatgcacggtgcaccgttgtctctgagctatcaaacgaggactttgactcttatgtcttatctgagtcaagcctgtttgtctacccatacaagattctgatcaagacctgtgggactacaaagcttctgctcggtattctgaggatccttgagcttgctaaagagctctcattgccacttgttgcagctaaatactcccgtgggacattcatattccctgatgcacaaccttccccacacaagaactttgatgatgaggttaccttcctaaatcacttcttcgatggcctcaggtttggtggtaatgcttatgtgattggtgattctgcaaagcataagcagaagtggcacgtctactatgccaccactgagcacccctaaggagcttgttgttactcttgagatgtgcatgactaggctggacaagaagagagcttatgtcttcttcaagacctctattgatggttacacatcttgtgctaaggatatgaccaagccttcaggtatcttgataatttgttttccatcctgtataacttatttga

SEQ ID NO: 109722 - DNA, 908 bp, Zea Mays
atgaagataatagatactagattaaatgaaatgataactgtaggttctgccctctctgcattattacaataaggctttataatccatctacaaccgactcaccctagaaaataggaaccgactccataaatatctaaacaacttaactttctagtttatccctgaccaaacataaaactgacttactctagaaaataggaactaatttaatctaaatgaataataatcctaataaacttccgtgcttgtggccatgccaatttggtcatccgtagatgcttgtacaggtgctcttcttccactttttctggtcgtatatcactgtatatccatacaccgaccaataatttgttttgtttttttcttcctctgctttcttctggcaggtggctctggatatctcctgctctaacagctccacaaaaattgcattcaacacttgggatgagtgaccgaccgagaagttttctcgggtgcacacgagtgaagtcaaagtacgcacaaaagactcgtgttagtctgtggggatgatatatgatcgtagagggttgctgggagtaagtatcgcatagcggctcgatgcagtagatggtcggggtcggggagggggcgtggagtggcacgtgaccacggtctcgacggcgcgctgctccaacaagtggaacgtgttcatttcttgatgaggacacgtttggagcagcagagatctttagccaatcttattagtttgaacattaaaaaaacaaaaaaaaggggcattccgagaatcgaactcgggacctcttgcacccaaagcaagaatcataccactagaccaaatgccctgttatgttttactttctttagtataagtatatgacaaaaacactgtttcgcaattgtctggaaattctaagaatcgtaccaca

SEQ ID NO: 109723 - DNA, 82 bp, Zea Mays
gctccgctagcttgtttgaatacgccattcttggtcttccgaaaacaagccaacttttcattccgtttctcctccatctccc

SEQ ID NO: 109724 - DNA, 115 bp, Zea Mays
ttcaataagaaaatctattttttattccgtaaagccggttttttactattggaaatcagttttcgaggcaactagtggtttgatgatttactctagtaatgtgaatgagatcgag

SEQ ID NO: 109725 - DNA, 200 bp, Zea Mays
tttggtcctactaaggagccttttgagaatcctttcttccagtcagtggctagagctttgcgtttgggtggagttgtatgcactcaggtagagagcatatggctacatatgcacattattgtagatatttttgtcaattgtcgccaagttttcaaagctgatgttaactatgcttgggcaacaatacctatatgtcctag

SEQ ID NO: 109726 - DNA, 866 bp, Zea Mays
atggaaggtccgacccggcaccattcaatcgacccaaatcgatgcggatccactctgcgcgcgtggttccatggaaggtccgcgtggttccctcccctgcatcccatgatccggatgctgccacaacatggtcgacggtcggggccgtcggatccagatgcccgcgctctgcgtcgcgtggatcttctagatcacgcgggagctcgaccacaagtccaacaacgagaccatgaagtagctgctgcagtaggccgagccatccattatcaccgccaccggcatatgcttgcctccgtcgtgccctcactcccgtcgcgccctcaatttgtatgttccaccgcgtggtctgttcaggcgcccaggccccagcacatcgcatctcctctattctccggccttggagcagcagctcatgattttagctcaagggctctatggaagggagcattcgttgatgctttcctggctagaataaagaagaacaaagaaaacatgaatgggaagaagatttggcctcgtagatcttctattttgccagaatttgttggttccactgtgctcatttacaatgggaaaagtcatgtccggtgcaagatcactgaagggaaggttggccataaatttggagagtttgcttttacacggagacgaaggccccatcgaacaataataggaaagggaaatcaaggaaaggacagaaagtaaaagtagaaatgtgcatgaaaggtgaggttgtacgtacaccctgctcctccgtttcttattcctagcaaaacacgatggcacattcttactcatatgtgttttgcgtgctaaatcacttctaccattttggcattcgtggttcgagcaagcaccaaaatcac

SEQ ID NO: 109727 - DNA, 127 bp, Zea Mays
ttattttattatttttctcttatactaattttggactttacagcgaagcaattccgtgtgaaggatgtgcctgtcggatcgaaaacttaggagttggtctattttcgcccccggtggagtggatagg

SEQ ID NO: 109728 - DNA, 242 bp, Zea Mays
tatgaggattttcatgggtccgattttgcttttcatgttataattctattagtcttcctgtttgcatgagagtaaagcagttgttgcctccaagaaccatatgctacctggtcaagaaagatgagagtgggtggtggccaaggctgctgaaaaaggagggcaaggcacctgtgttcttgaaggctgactaggacaaatggcaggatgaggatgatcaagatgttggatgttagtatttcagt

SEQ ID NO: 109729 - DNA, 2269 bp, Zea Mays
ctgtgccgcctgcctccacatctcttcgatcagatttcagatatgcaaggacagcgtttagatttatcacttcgttgattatttgatcgaatcagagctccaaacatcgcaatcaaagcagatcgtctggtcgcacggatcgacagggcgggggcgggggcaaggttggcaatggcgaacaaggccgtctcgggggcgcggagcccgctgaacctggtggtggccatggcgctgtgctgcttcttctacgtgctcggcgcgtggcagcgcagcggctacggcaagggcgatcgcatcgccgccgcggtgagccggcagacggcctgcggcgacgtcgccgcggggctcagcttcgagacgcaccacggcggcgccggggccatcaacgcgtcgtcgtcgttgcccttcggggccgacgcggcgccgccggcgttcgcgccgtgcgcggcggcgctagcggaccacacgccgtgccaccaccaggaccgcgccatgaagttcccccgcaagaacatggtgtaccgggagcggcactgcccctccgacggcgagcggctgcggtgcctggtgcccgcgccgccggggtacgtgacgccgttcccgtggccccggagccgcgactacgtgcccttcgccaacgcgccgtacaagagcctcaccgtcgagaaggccgtccagaactgggtgcagtacgagggcgccgtgttccgcttccccggcggcggcacgcagttcccgcagggcgccgacaagtacatcgaccagctcggctccgtcatccccttcgccggtggccgcgtccgcaccgtcctcgacaccggatgcggcgtggcgagcttgggcgcgtacctggactcccgcggcgtgatcgccatgtcgttcgcgccgcgcgactcgcacgaggcgcaggttcagttcgcgctggagcgcggagtgccggccttcatcggcgtcctcggctccgtcaagctcccgttcccgccgcgctccttcgacatggcgcactgctcccggtgcctcatcccctggggcggtaacggcgggatgtacatgatggagatcgaccgcgtgctacggccgggtggctactgggtgctctccggcccgccgatcaactggaagacgaaccacaaggcctgggagcgcacggaggcggacctctccgccgagcagcaacggatcgaaaagtacgccgccatgctctgctgggagaaggtcaccgagatccgcgagatcgccatctggcggaagcagctcgacccctcggcggcgtgccccgacaggccgccggtccggacgtgcgacgacgccaactccgacgacgtctggtacaagaacatggagacttgcataacgccgccggctgctgccgtggccggcgagctgcagccgttcccggcgcggctaacggccgtacccccgcggatatccgccggtgctgtgccaggcttcacggcagagtcgtacgaggaggagaaccggcggtgggagcggcacgtggcggcctacaagaaggtgaactacaggctgaacagcgagcggtaccggaacatcatggacatgaacgccggcgtgggtgggttcgccgccgccatcttctcgcccaagtcatgggtcatgaacgtcgtgccgacggcggccgagatctgcaccctcggcgtggtgtacgagagggggctcatcggcatataccacgactggtgtgaggcattctcaacttatccaagaacatacgacctcatacatgccaatggcatcttcactctctacaaggacaggtgcagaatggaggacatcctgctggagatggatcggatcctgcgcccagagggaaccgtgatcctccgcgacgacgtcgaggtcctgctcaaggtgcagaggacggtgaaggggatgcgttggaagacgctgctggcaaaccatgaggacggccccaacgtgcctgagaaggtgctcttcgctgtcaagcggtactggacagccgccggcgaaggcacggcagcagaggagaagacgccgggcagctcttcagtagcaggcatggattcagaggaataaatggtgggtgtgagacgaggggcggacagtttggcgatggaggtggacggctggctgctttcagtttgtgtcgcacgcttggtagaagaagtgaggatttatgtttagagcgtagaagatctagaatttcagatgctttggattttttgcaattttgcagtagtttatttccttttcttctatattaatattatctattaaccataaagaa

SEQ ID NO: 109730 - DNA, 2114 bp, Zea Mays
ctgtgccgcctgcctccacatctcttcgatcagatttcagatatgcaaggacagcgtttagatttatcacttcgttgattatttgatcgaatcagagctccaaacatcgcaatcaaagatcgtctggtcgcacggatcgacagggcgggggcgggggcaaggttggcaatggcgaacaaggccgtctcgggggcgcggagcccgctgaacctggtggtggccatggcgctgtgctgcttcttctacgtgctcggcgcgtggcagcgcagcggctacggcaagggcgatcgcatcgccgccgcggtgagccggcagacggcctgcggcgacgtcgccgcggggctcagcttcgagacgcaccacggcggcgccggggccatcaacgcgtcgtcgtcgttgcccttcggggccgacgcggcgccgccggcgttcgcgccgtgcgcggcggcgctagcggaccacacgccgtgccaccaccaggaccgcgccatgaagttcccccgcaagaacatggtgtaccgggagcggcactgcccctccgacggcgagcggctgcggtgcctggtgcccgcgccgccggggtacgtgacgccgttcccgtggccccggagccgcgactacgtgcccttcgccaacgcgccgtacaagagcctcaccgtcgagaaggccgtccagaactgggtgcagtacgagggcgccgtgttccgcttccccggcggcggcacgcagttcccgcagggcgccgacaagtacatcgaccagctcggctccgtcatccccttcgccggtggccgcgtccgcaccgtcctcgacaccggatgcggcgtggcgagcttgggcgcgtacctggactcccgcggcgtgatcgccatgtcgttcgcgccgcgcgactcgcacgaggcgcaggttcagttcgcgctggagcgcggagtgccggccttcatcggcgtcctcggctccgtcaagctcccgttcccgccgcgctccttcgacatggcgcactgctcccggtgcctcatcccctggggcggtaacggcgggatgtacatgatggagatcgaccgcgtgctacggccgggtggctactgggtgctctccggcccgccgatcaactggaagacgaaccacaaggcctgggagcgcacggaggcggacctctccgccgagcagcaacggatcgaaaagtacgccgccatgctctgctgggagaaggtcaccgagatccgcgagatcgccatctggcggaagcagctcgacccctcggcggcgtgccccgacaggccgccggtccggacgtgcgacgacgccaactccgacgacgtctggtacaagaacatggagacttgcataacgccgccggctgctgccgtggccggcgagctgcagccgttcccggcgcggctaacggccgtacccccgcggatatccgccggtgctgtgccaggcttcacggcagagtcgtacgaggaggagaaccggcggtgggagcggcacgtggcggcctacaagaaggtgaactacaggctgaacagcgagcggtaccggaacatcatggacatgaacgccggcgtgggtgggttcgccgccgccatcttctcgcccaagtcatgggtcatgaacgtcgtgccgacggcggccgagatctgcaccctcggcgtggtgtacgagagggggctcatcggcatataccacgactggtgtgaggcattctcaacttatccaagaacatacgacctcatacatgccaatggcatcttcactctctacaaggacaggtgcagaatggaggacatcctgctggagatggatcggatcctgcgcccagagggaaccgtgatcctccgcgacgacgtcgaggtcctgctcaaggtgcagaggacggtgaaggggatgcgttggaagacgctgctggcaaaccatgaggacggccccaacgtgcctgagaaggtgctcttcgctgtcaagcggtactggacagccgccggcgaaggcacggcagcagaggagaagacgccgggcagctcttcagtagcaggcatggattcagaggaataaatggtgggtgtgagacgaggggcggacagtttggcgatggaggtggacggctggctgct

SEQ ID NO: 109731 - DNA, 1127 bp, Zea Mays
tttttttgccaaattgtccgtgttagcaccgcttgcacaataatggaacaaatgtcaaaaccatcgggggcaaaaggataggagaataaggaaaaaacaatggcggtgctactccgccgcgccgcggcgctcctcgtcgtggctgctgtctgcgcggacggcgcctccacgttctactcctccgaccccaacctcggatccgcccgcgtcgtcttccagacgaattttggtgatattgagtttggcttctttcctcatgttgcacctaagactgtcgaacacattttcaaacttgtgcggcttggatgctacattacaaatcacttcttccgggttgacaagggtttcgttgcacaagttgctgatgttatgtcaggtcgaaccgcccctatgaatgaggagcagaaaaaagaagcggagaaaacaattgttggtgaatttagtagtgtcaagcatgtcaggggaatcctctccatgggaaggcactctgatccagacagtgctggctcttccttttctattcttctgggcaattcaccgcatcttgatggccagtatgctgtatttgggagggtcactaaaggtgacgatacattgactaaactagagaggcttccaacccggagagaaggcatttttgtaatgccgatcgagcgtatcaacatcctatcaacttactattatgatattgatctagagagctgtgaagcagaaaaatctattctccggaggagactttctgaatcagcatcagaagttgagcgatggagaagaaaatgctttgcttaatggtggaataaggactgcatattccgtttcatgatgctggatggtttcctgaggctggatatggacgacggtgtggaaatgtgtatgccgcgtgttcttatgctatcactgtaatacttgagtagatgttagatgggtcctaaggttccacatggatcttgtttgtaacacatgagcagatgagttgttacaataaaccttcaattcgtttagttttgtcttcggcttccccaattgtagtttgaggctgcgctgcacctgatggcatttttagtttgaatcatgtctttgttctcttgggaaaaaaaagcccttggcaaagactacgaagatgacat

SEQ ID NO: 109732 - DNA, 1207 bp, Zea Mays
tttttttgccaaattgtccgtgttagcaccgcttgcacaataatggaacaaatgtcaaaaccatcgggggcaaaaggataggagaataaggaaaaaacaatggcggtgctactccgccgcgccgcggcgctcctcgtcgtggctgctgtctgcgcggacggcgcctccacgttctactcctccgaccccaacctcggatccgcccgcgtcgtcttccagacgaattttggtgatattgagtttggcttctttcctcatgttgcacctaagactgtcgaacacattttcaaacttgtgcggcttggatgctacattacaaatcacttcttccgggttgacaagggtttcgttgcacaagttgctgatgttatgtcaggtcgaaccgcccctatgaatgaggagcagaaaaaagaagcggagaaaacaattgttggtgaatttagtagtgtcaagcatgtcaggggaatcctctccatgggaaggcactctgatccagacagtgctggctcttccttttctattcttctgggcaattcaccgcatcttgatggccaggtgtttaacactacgtcaaagcttttcatgatcaatatcatctgcatcactgattgagattggcacataacaatttgcagtatgctgtatttgggagggtcactaaaggtgacgatacattgactaaactagagaggcttccaacccggagagaaggcatttttgtaatgccgatcgagcgtatcaacatcctatcaacttactattatgatattgatctagagagctgtgaagcagaaaaatctattctccggaggagactttctgaatcagcatcagaagttgagcgatggagaagaaaatgctttgcttaatggtggaataaggactgcatattccgtttcatgatgctggatggtttcctgaggctggatatggacgacggtgtggaaatgtgtatgccgcgtgttcttatgctatcactgtaatacttgagtagatgttagatgggtcctaaggttccacatggatcttgtttgtaacacatgagcagatgagttgttacaataaaccttcaattcgtttagttttgtcttcggcttccccaattgtagtttgaggctgcgctgcacctgatggcatttttagtttgaatcatgtctttgttctcttgggaaaaaaaagcccttggcaaagactacgaagatgacat

SEQ ID NO: 109733 - DNA, 1433 bp, Zea Mays
tttttttgccaaattgtccgtgttagcaccgcttgcacaataatggaacaaatgtcaaaaccatcgggggcaaaaggataggagaataaggaaaaaacaatggcggtgctactccgccgcgccgcggcgctcctcgtcgtggctgctgtctgcgcggacggcgcctccacgttctactcctccgaccccaacctcggatccgcccgcgtcgtcttccagacgaattttggtgatattgagtttggcttctttcctcatgttgcacctaagactgtcgaacacattttcaaacttgtgcggcttggatgctacattacaaatcacttcttccgggttgacaagggtttcgttgcacaagttgctgatgttatgtcaggtcgaaccgcccctatgaatgaggagcagaaaaaagaagcggagaaaacaattgttggtgaatttagtagtgtcaagcatgtcaggggaatcctctccatgggaaggcactctgatccagacagtgctggctcttccttttctattcttctgggcaattcaccgcatcttgatggccagtatgctgtatttgggagggtcactaaaggtgacgatacattgactaaactagagaggcttccaacccggagagaaggcatttttgtaatgccgatcgagcgtatcaacatcctatcaacttactattatgatattgatctagagagctgtgaagcagaaaaatctattctccggaggagactttctgaatcagcatcagaagttgagcgatggagaagaaaatgctttgcttaatggtggaataaggtgaattacttgcttattgctttcaatatttgtataaaattttcagggcagcaacttgctatatgcattacaaaagtaaggctgaaaattctgtgcacgtgatactaaagtgcttaaaacgtttagtgaatttgaccctatatattattgctagtataacacaacgagcattcttccatagaattaccaaatctgaaagcccccatatgttttagttgacttgtagagtccacaaagttaaagacgtgcatctgttctaatcccatggtacaagtgaactggtaatctgaaagcccccatctgttttttgtgagacccaaaaaaaattgtatcttctgaatcaaagctgaaacaattattaactgaaccttgagaaacatcagtcatttctgcgcatgtgaactgcatcttctccatcatgcaggactgcatattccgtttcatgatgctggatggtttcctgaggctggatatggacgacggtgtggaaatgtgtatgccgcgtgttcttatgctatcactgtaatacttgagtagatgttagatgggtcctaaggttccacatggatcttgtttgtaacacatgagcagatgagttgttacaataaaccttcaattcgtttagttttgtc

SEQ ID NO: 109734 - DNA, 1769 bp, Zea Mays
tttttttgccaaattgtccgtgttagcaccgcttgcacaataatggaacaaatgtcaaaaccatcgggggcaaaaggataggagaataaggaaaaaacaatggcggtgctactccgccgcgccgcggcgctcctcgtcgtggctgctgtctgcgcggacggcgcctccacgttctactcctccgaccccaacctcggatccgcccgcgtcgtcttccagacgaattttggtgatattgagtttggcttctttcctcatgttgcacctaagactgtcgaacacattttcaaacttgtgcggcttggatgctacattacaaatcacttcttccgggttgacaagggtttcgttgcacaagttgctgatgttatgtcaggtcgaaccgcccctatgaatgaggagcagaaaaaagaagcggagaaaacaattgttggtgaatttagtagtgtcaagcatgtcaggggaatcctctccatgggaaggtgctttctgttgataactagagcaggccactgtcttctaacatatcatcttaaagccttctggttctgtcctaaaataaacgagcatttagtattttttctacgtacttgaaaacttcaacaatgattattaagttgtttatttatttggaaaaagtttaaggtcactacttgtggttttccatacttttatttgtagttatgtacatatccagaggaatgcaatgtatgttgaaataacaaagctctggaaaacatttttattagtttcctttgcatgtaagctaacagtttctgtttctcataacatgtaaatgttttcattccttccacaaggcactctgatccagacagtgctggctcttccttttctattcttctgggcaattcaccgcatcttgatggccagtatgctgtatttgggagggtcactaaaggtgacgatacattgactaaactagagaggcttccaacccggagagaaggcatttttgtaatgccgatcgagcgtatcaacatcctatcaacttactattatgatattgatctagagagctgtgaagcagaaaaatctattctccggaggagactttctgaatcagcatcagaagttgagcgatggagaagaaaatgctttgcttaatggtggaataaggtgaattacttgcttattgctttcaatatttgtataaaattttcagggcagcaacttgctatatgcattacaaaagtaaggctgaaaattctgtgcacgtgatactaaagtgcttaaaacgtttagtgaatttgaccctatatattattgctagtataacacaacgagcattcttccatagaattaccaaatctgaaagcccccatatgttttagttgacttgtagagtccacaaagttaaagacgtgcatctgttctaatcccatggtacaagtgaactggtaatctgaaagcccccatctgttttttgtgagacccaaaaaaaattgtatcttctgaatcaaagctgaaacaattattaactgaaccttgagaaacatcagtcatttctgcgcatgtgaactgcatcttctccatcatgcaggactgcatattccgtttcatgatgctggatggtttcctgaggctggatatggacgacggtgtggaaatgtgtatgccgcgtgttcttatgctatcactgtaatacttgagtagatgttagatgggtcctaaggttccacatggatcttgtttgtaacacatgagcagatgagttgttacaataaaccttcaattcgtttagttttgtc

SEQ ID NO: 109735 - DNA, 880 bp, Zea Mays
tttttttgccaaattgtccgtgttagcaccgcttgcacaataatggaacaaatgtcaaaaccatcgggggcaaaaggataggagaataaggaaaaaacaatggcggtgctactccgccgcgccgcggcgctcctcgtcgtggctgctgtctgcgcggacggcgcctccacgttctactcctccgaccccaacctcggatccgcccgcgtcgtcttccaggtcacccgccctcttctctaccgcccttgctggtccaactgcgacggcaagattcatccaacccagatgtctgttgctctgaaatccgctccaaaggagcgatgctcagcagcctttggaggtgggaagagacccaaaggacatcaaactcgctaggtttgccgagggatttgagagctgtaggaagatctgggagagaatttgtgtgagtcggttacgctgggcttgctcttgcgagatttcgttcgagaataggttcaaaatcacacaaatgtgggaggaggtggctgctgagtggcatttaagagctgctggaagaggaattagagtgcctggacaggattgtggtttggagtgctcaaccggttgttcctttactggtcggaagatttggttgctaggaatgtacaagtagcgtataagagtgctcaactggctaatatggccgtaatttcgtagcatggtggcatcaagattcttccaagaagactgattccatgttgcatatttttctcttcagacatgatatctctggctgctcctaatctcccattagattgtgtcttctgttctccacacaattcagtgaattcactcaatctgtcagcctgatttacttatcggtccgggtactttggttatcgccttgcaatttatatca

SEQ ID NO: 109736 - DNA, 867 bp, Zea Mays
gagagctcgagccaccgacacggttgtcctttattttcagaaggctgcttcagcaggacaaagtactttctcagaaatatgttttaaaatatgttgctgcccagtcaccttctcagaaatcaaggcaacgccttcatcaggaatcacagcagccgccacaataacagcaaccacaagtgcaggtgtagcaggcgcaaccacaaaaacaagcagcacctgttatgcgcagagaatcatctattgctgctcggcaagcagcaatggcacatcaatctcaggagactaaacctgttcaatcttcgcccaagatcaagcgtcaaacaccagcgagatctggttcagtggcatccacagcctccggtagctgcatccgcaccaaaacctggtggtagtccaaagaaaggtgaggtcaaacctgctgtcgacccagttcaaactccaaccacaggtgccgattcaacgaaacccgagcctagcgccccatcactccctggagccgaaggggtggacaagatggccatcgatgaggccagtggtgacgccccagaggtagcagaagagcttgaccctgcgctcgaagaggagatgtcgatggaggagatgatccgtgtgacgcgcgccaagctaaggaggcgcacgaccaccgaagttcctgctgggaattagttgttagcggcacgggcaacgaacgcctgcaattgtaacatcatacacttcaatctggtcactccttgagtatcttcaggatgtcacatccagccgcaattttcagccggcagggaaacaagaacaactgtttttctatcattctctgtgtacatgtatctgtttgagtccctggtatacactgcagttagtctggcagaa

SEQ ID NO: 109737 - DNA, 716 bp, Zea Mays
attatgtccttttttggttaaatatctattattcatgggtttgctgttcacatgaatcgcatatagctatcacctttgctgcattcaggttgatgctatgctccaagaattagaaaaggagattgatgatgtggatgcacaaattggaaatcgttggcaactgcttgataaggaccatgatggcaaagtgacccctgaagaggtggcggcggcgacagcttatctcaaggacaccatagggaaagaaggcgtgcaagagctcatcagcaacctttctaaagacacagaaggaaaaaatccttgttgaagatattgtgaagctagcatcccaaatagagaacaatgaagaggaagaggaagcacggtagatgggagagtatatggaaacatcacactcgttcagcagtcaaaactcatgtattgaaaggcaatacatccatttcttgtgtctcttgactgactttgatagtgacttccaattagcaaggtagattttctgtagaaaggctcatgctgacatgcatttagttagccgtcgtgttgtgatttggtaggtaaattgcaaccaaaatttagaccggttgcatggacgtggataatacagatcaattgtatttgttatgctactatgcaatcccgaaatattggatctgtttcaaattctcaagtaatcattgatggatgctatttattgaccataaagcttacgaaatcat

SEQ ID NO: 109738 - DNA, 995 bp, Zea Mays
cccgccgcccagcccccgcccccagaggttggaggtgcgagcgatagccccggcgcccccactgccattacccccgccgcgatgctcgcgttcgtgaggcgtcacgcgcacatcgtgcaacccaacccccttcctccatcgcggcagaacgacatcctccaactccggcggcctccatttccccatcctcttcaacgcgcggcacaacgacctcctcctcccccaccggcggcctccaccagaccaccaccccaccggtcgtcgacctcaaccgtccgttgacctcaaccgtccaccagaccacctcacctcctccaattcccgcgcccgcgcctgatatggaaggtccgccggaggactcgggcgtcgaggccatggcggagcagcaccccttctcccccctgcctcgcgcgcggcggccgagatggtgctggctgggttgttcgagatgatggtccttcccgccctccctgctatcctcgccccaaatcgacgagaatcatgcagcccaaatctgaggtggaggcgtctgcactgtcgatggaggtgtcaagtctgcagtggtgtctgtagatgggaaggcatggtgtgcagcggcagcggccaggtggtgtcgctgagcctgcccttttacgggctcactggcacgctctccacggccttcgggaacctcacattcctgcgtatgctgaacctgagctccaattcattccgcggggaggtcctagcgaccatcgttcgccttgcgcatctgcatgcgctagacctgagctacaacgccttctccgaattctagagctgcgattcctgaggccatggagcagcaaacaatatcaattgccaaagctgccattacaataatactcattttagggacttcatttcttgcagctgccaatccaattgcaggatgctatgccgctcttaagatgctcatgacatttcccaatgcaacaaaatatctgaaaacaattataagctttggtaaggttgat

SEQ ID NO: 109739 - DNA, 351 bp, Zea Mays
ggcgggcaggctagggatccggatgggcgcggcggcgaggaggctctaggggcgccagccgaggtggtggtccgtggggactgggaggggagggcggcgatggaggagaaggcgtcgtcgccgctggttccgccgccgtcggagatcgacctcgaggcgggcggcggcggggagcagctccagtgccggatctgcctcgagaccgacgggagggacttcatcgcgccctgcaagtgcaaggggacgtccaagtacgtgcaccgcgactgcctcgaccactggagggcggtgaaggcttacagcccccctgtgcgggtggacgctcaggaactgttagatgatgtcacttag

SEQ ID NO: 109740 - DNA, 2579 bp, Zea Mays
cctcacccacatactctcccctggttgggcctgtgctgtgtggccgctctccctccacccaacccaaccaagaaacagaggcccccgctcaagctccgagagacagagaactccatggccgccatggacctcctctccggcaagctcatacgctccctgcgtctccattcctcactcctcccctctgctccttcctcctcccgcgccgtccccacatcccgccgtctccggcgccgccgccatgcccccctgtactgccgccttaccaccacctcctcctcctcatctgcctccaccaccacaaccaccggggtggaggaagacgtcaaaagccaggacctttcctccctcctcacctcctccgacccttctgccgcgcccgccgtcgggaccaagaagaagcggtcgggcggcagcagcggcgcgtctagcatcccgtccggggtgcggctggagggaatctccaagtcctacaagggcgtgacggtgctcaaggacgtgtcctgggaggtgcagcgcggcgagaaggtggggctcgtcggcgtgaacggcgccggcaagacgacgcagctccgcatcatcgcggggctcgagaagcccgacggcggcgccgtcatcaaggccaaggagaacatgaagatcgccttcctcagccaggagttcgaggtctccgcctcccgcaccgtcagggaagagttcttcagcgccttcgaggaggagatggaggtcaagcggcggctcgagcaggtgcaggcggcgctcgagggcgccactgaagacatggacctcatgggccggctcctcgatgagctcgacctgctgcagcgccgctcccaggacgtggacctcgatatggtggacgtcaaggtgcagaagctcatgccagagctcgggttcatgcctgaggacgccgaccgcctcgtcgcctccttcagcggtgggtggaaaatgaggatgtctctaggcaagatacttcttcaggaccctgatttgcttttgcttgatgagcctacgaatcatgtcgatttggataccattgagtggctggagatgtatctcaagacgcaggatgtgccgatggtcattatatctcatgacagggcgttccttgatcagttgtgcacaaagatagtggaaactgaatttggtgtgtccaagacatacaagggtaactattcagagtacattctagcaaaggcggtagcagtggaggcacagtatgctgcgtgggagaagcaacagaaggaaattgaacagacaaaggagctgataaacagacttggtgctggagttaatgcagggcgtgcttccagcgagcagaagaaattggagaagcttgaaaaagaagggttgattgagaaacctttccaaaggaagcagctaaagatcagattccctgagcgtggaagaagtgggagaactgtgttgacgataaacaatcttcaattcggatttgagaataagactttgttcaacaatgctaatctgatagtagagagaggtgaaaagatagctattattgggcccaatggttgtgggaagagcacactgcttaaacttatgttggggatggagaagccacaaggtggtgaggtgcttcttggggagcataatgtgttgccgaactattttgagcagaatcaggcagaagctcttgatttagagaagaccgtgttagacactgtagcagaagctgcggaagattggatacttgatgatatcaaaggtctccttggccgttgcaacttcagggatgacatgctggatagaaaagttcagtttttaagtggtggagagaaggcaaggcttgcattttgcaagttcatggtgactccatctactctactcatcttggatgaaccgacaaaccatcttgatatcccatcaaaagaaatgcttgaggaggcaatatcagaatatactggcaccgtcataacagtttctcatgaccggtacttcataaaacaaattgtcaacagagtcatcgaagtgaaagatcagactatccaagactatcaaggagattacaattactaccttgagaggaaccttgaagcccgagaaagggaacttgcccgcgaggaagagctcgaggagagagcccccaaagtaaaagccaagtccaagatgtcgaaggcagagaaagccgtcaggaagaagcagaagatgcaggccttccagcagagcaagcagaaatccaagtcgcttaagaactcgaagcggtggaactgagattttttcgtcgttcgtagaggcggcgttggcgttcgtcacaatgcagaatgccatctgagacaccttgcaatgcagataccagtgtttgctactctgcctgctgtgccgtatgctataatagtcgccatatcagcagaagcactgcaaatacatcatcagaaagtagccctagtagcaatgaatgtagaagatcgtgaaaaaaaaaatactgtaactataagcaggaagcgttatgtgaccttgtacataatacatgcactttcggatggaggaacggcttattttttggatgaacggaataatggaatcaaatcgcacagcatttcagaattattatgcccttc

SEQ ID NO: 109741 - DNA, 1343 bp, Zea Mays
tagggatgatttcagtggagaacaaactaaagaagagaacaagtatatggcattgtgctccacctggagaaccaaggaaaggcagaagcagaaaggacaagcaaccaaacgaatagtgttactgactagtgtgacaagccactgaaaaagaatcagatccatcagtacgtttgatggagatgttccttagattatacacaccgttgaaattttttcactaattgtttaaccacagatccctcattcattcatatgcgcggcaggattcaagctggtagaatctccgacgcagctgctccattagctgtgcccgtctcagtggctacatggtgtcgaaggtttctatggttagtatcaaagaaacttcagcactacgaataatctctgcagcggaaatcattggtgggtcacaatctacaatgttagattagatgcacctctcgccaggctgaaggacgtaccagttactgaattattttgtgtggatgtcgcgcttgtactcgagaagacgatgcatcaccgggcaccggacgcaccaattccaccgcccgaggcagatgcaagtgaaggcggctcaggactcatcctgtccgccttgctgtatccttcgcttgccatttgctgtacaaagaaaaaaaaaggcgtttctgacagtgactttgaaatcttgtcgcgagcttactagttggctggtgctgtcatgtcaggaaacggatgattgcagattaccgaacattacctgttgggaagggaaaaaacaaacggtgctcttgcatccgacgcgattacaagttggcagcatcttatgccttttggcgatcaagtccacaggagagtgctcattgcatctaaaacggtgaagtgatgggtgctgtggcattcaggctgaggcgaaacctgcgaacctactgtatattcaggtatgttttagccaaccttcagggctcagtgcctatcctatggtaccattcagaatcatagtgcctttagttagttgatggtgctggtggttggaacacaataattacctgatcgccaaggcctgcaactgagccctctcaagattgttaattccatgtaaagttctcctgtggatgttgcattgggtggggggctagttggagacaaaatcttctcctacctttttctcaagaaccctagaaagaaacatttctcaattgtgatttgttggcgcgcgcaaaggggaaagaaaagaataggcaagacgacggcaacttggcagaacagtggcggcaagtgcgctgcagcggtggctcagctgtggtgctccttgagttaatattatgggtcaattttctgtatgtcatcgaaaaatatattcg

SEQ ID NO: 109742 - DNA, 186 bp, Zea Mays
cgtaacttatgttaagtaacatgaatatcatttttgcatgcacggttttccaagtttctagtgacctgcagttcaaatctgaatttttcgaagaaattcaaataaacgaactaaatctactaacgattgaaaactctgttataattgtccacaaatgatacatgtaggtctacatagagtaggaac

SEQ ID NO: 109743 - DNA, 308 bp, Zea Mays
tctcggcgacctaaaatggttaaaggtgctcaagatcacgtggtccttctgccactccaccgacggagagtgccgtgcggcgcttctgtcgtccatcggcaggtggtcccacctccagtccctaaccattcactgcggactcggctgctccatggagttcctgggcaccctctcctatccgcccgagcacctcaggaagctcaaggtgacggggggcgtgtttgcaggcgttctccggtggctcagtgtgccttcacaccacttgtctttcctgcagatcaccatttgcagcatcacggcagatgatc

SEQ ID NO: 109744 - DNA, 558 bp, Zea Mays
ggatagatccttgcagctctcaaggtccagcacctgcagtatctgaaacttggacagggtagaacggagagctttgaaactgcccagagccgtcagagaccggacgtgcgacagcttcatcctctccaccgtctccttctctggctgatcgctcttctggacggacagccggcgcaccttgtagcttgggaacggtgtgtgccagtggccgccaaccaccgtgatgaagttctcgtcgtttgatttgacgacgatgtgctcgaggaccatgtcgtggacctggcagctcttcaccctgccgttgctgctgttgttgaccgctcggattaggttcctgctgatgagctcgttgaagcagtcctcggctacttcctccactgtcttcccgtgcttctcagcgatgaacccttcggcgatccatcttctgatcagacgctttctactgatgaaacaacccttgggaaacatgctcaggtagagtaggcaggtcttaaggtctgcaggcaattgggtatagcagtggttcactatctctgtgactccttctgtggagagatt

SEQ ID NO: 109745 - DNA, 646 bp, Zea Mays
gtagttccagctctacattaggagcataggggctctatctacatacagagtttgacccacggtacggctgaaaaaggtaagccggttaagtgctttaaccatttagtcaaagagactgagcgagtgaattggttttctgttttgtcagcggatcttacgagctttcatagaaagcatactatactatatattttaccgcgtacaaggacaagtggtggcacgacacggaaagtagcatccccataaggatgaattgttggttcaaatcggataatcaatcaatagggaaaaaggaagggattactgtaagatggaatgctcgcgtcggaattcattcttctcgttacggtagcctaagagcattcaagagctcagttagagcctctcaattgatagaggcatgttcatatgaagcgctacgcatatcttattttaccaaaatagggtggggctggtaattgaagatctgggatctatcagtcaaagtggactactaaaaaaaacttctgttgcaaggtaattttttttaagtctatttagcttcttcgtagaaagaagggatttgctgctttcttagtaacaatattcttatgctatctggctatcgagaagaagaatggttaaaaaaaagggaagataaacaaac

SEQ ID NO: 109746 - DNA, 1554 bp, Zea Mays
gaccaatcgttcctatgaagatcaccgtgcagtcgtcgaagctggtcacgggcagctccagcggcggtcgtccttcttccgccgatgccgccgaggcggtcccgctcacggtgttcgacaagctccactacgatctgtacgtgcatgccttatacttcttccacccgccagcgccgcccagctccgtcctcgaggccgggctcgccgccgcgctggccgagtacccggagtgggccgggcggctcggcgtggacgcgcgcggcaaccgcgccatcctgctcaacggcgcgggcgcgcggctcgtcgaagccacggccgccgccgccgacgtctgctcgctcgacagcgtcgtgccgccggagccagcgactcccgcgaccatgagcctgcaccccagcgccgaggacgccgtcgacggcgaggtcctgctgctccaggtcacgcggttcgcctgcggctccttcgtcgtgggcacggcggtgcagcatgtcgtcggcgacggcgccgccttccactgcttcgtgagcgcctggggccaggcctcgcgcggcgccgccgtggaccccgcgcccgtgcacgaccgcgtgtccttcttcgtgccccggcacccgcccttggtcgagttcgagcaccgcggcgcggagtacaagcggccgcctcgccctcgcgagggcgaggagaaggccgggggcagcgagtcaggggccaaggccaaggccaacgccgacgtcggcgaaaagcagctggtgacgcgtagggtgaactttagccgagagttcgtcgccgagctcaagacgagggcgtcagcgggggcgcccttgccgcggcggtacagcacgctgcagtgcgtggcggcgcacctgtggcggtgcgtgacgagggcgcggaggctcgacgcgcgcgcccgcaccaccctccgcatcgccgtgaacgggcggtcgcggatgaggaacccgcgggtgcccgaggcgtacgccggcaacgtcgtgctctgggcgcgggcgaccgcggccgcaggcggcctggtacggagcccgctcccggaggccgtgcggctcgtgtccgaggcggtggcggccgtggacgacgcctacttcaggtccgtcatcgacttcgccagctccggggccctggaggaggaaggcctggtgccggcggccgacccgttggagacggtgttcagcccggacgtcgaggtgtacagcctgctgggggcctcgttccaggacttcgacttcggcggtggcccgcccttcttcttcatgccgagctactcgcccgtggagggcgccgtattcgtcgtgtcgtctttctccggcgacggcagtatcgacgcctacgtccctctcttcagccacgcgatggacatcttcgacaaatgctgccactccctgcctgctgcggacgcacgactttaggcgcgttgactttgcttcgtccgagatgatacatttcgtgaaataatcatttgcaaaaaaaagaagtaagatggattcggttatcatgtcaggagatgaatattaaggtagataattaagatatttccataatata

SEQ ID NO: 109747 - DNA, 1494 bp, Zea Mays
atggttttgctcgggggcggcggtgggaaagggacggacggcgtgccgaacaagctcgtgatggcggcccttcgcgccggcgaagaggcgcgcggcccttctccccgatacggtgtatcgatgggaatcacaggaagagagggctacagacttgtcttggagccagaccaggaagctttagcggagctgaaagaagatggtttgcagttggccatatccttcagtcaagaaggttcaatacttgccattggtggtgaagatgttcttttaatagtcttcaagtggccggctatggcgcctgttctcacagaaactgatactaaaacatcaattaaggatcttaccatcagttccgatgagaggtttattgccgtgaataggagcagtggcccatgcagagtgtgggatttgcagtcatctgaagttgtagccagtctgccaagagaagcaggggaaatgtttggattctgcagattttgtaataaggcagacaacagtcatgtcctatttataacagcaatggaaggtgattatggaaaaatagtatcttggaatactacctcatggacaagaacaggatcaaagaaaataactcgtgaggcaatttcagcgtttgcggtgtcgcccaacggtgctctccttgcaattggaacaatcgaaggaagcgtggtcatagtcgactcaaaagacatgcggacacttgtaacagttaaaaaggcccatcttggtgttgtgactacactgtccttctctcaggattcaagaacattgctgtcaacttcctttgactctactgcaagggtgacgtacgttggttccccgaagagtaatggaacaagtatatggcccatcctactagttatcattcttgcagttttagtgtactactgtatgcagcacaaagaagacattctggcgatgttgccgcgttgagatagatttctgttgagccccaccgctcccctgactgatctactctactggacatattagtagtgttgcttcagagattggacaagttttggacttaggtcaacttcattattttctcaaggatacaacaatacagcaaaaggtgttgagccctttcatgtttgtagtagaaagggtcatgtactcaggttgtccaagttttgtaagttgatgatggccgcaagtgatagtcatctgtgtttatgtttaatcatgccgcacttgtgagttgcaaggagatcgtcccaagagtccaatacagtgagttgcaaggagaacaatctgtgtttggatgaccttttttttgcgttggaacttgcaaatgtcttgttgcccttgctaggtttgctgaactcaatggtgtcatctttggttactatccccaagaccaatactgcgcgtgtactcagcagtgaagtgcactacagtcagacgaaccttctgagttctgagtgtcaaaagggtcaaaggcgtgagcttaacgatcttctgaagctcttcatcgacctcaccaaattttga

SEQ ID NO: 109748 - DNA, 261 bp, Zea Mays
atgaccacacttttttctcaactacccgatggagaagaacaacgtgatcgagatctccttgtgggagcaggccgacaacaccatctccccacggactcgacgttctcagcgctcaagaagtccaccttctccgatctcacctccgaccagctcgagacactgctcctattccacgcgctctccaagttcctactgaccgagttcaaaaacctgaactcgctcaacccggtggatagcttcatgggtcgccctacacgctaa

SEQ ID NO: 109749 - DNA, 722 bp, Zea Mays
aagttttaacggggtggcggtttcctcgggcgagcgagcggtggcggtggtttctttggcgagcgagcgacggcgatcccgggggctagcagctgtggcacgccgaggcgggcgaccggcggcgatgctcctatggcagacgggcaagcaccgacggcgctcctgaaccggacgagcgacggcgacggcggtttcctcgagcgtgcaagcggcggcgatcccgagagctagcggttgtggcgcgccgaggcaggcgaccggtggcgacactcctatggtgggcgggcaagcaccgacggcgctcccgaaccgaacgagcggcggcgatgcaccctaggcccagcggtgacggtggttgcgcgaggcgcggtaggcttcggcagcagcggcagcggaacttggaggagcgcacacggcggcaaatccctaggcgcgagcgacgacgacgaacttccctaggcggcgagcggtggtggatcgatggtcctatttttatgctattttgtatacatatttatgtcaacgtcaataggtttttatgatacttctattcatattttatgtaaaagtttgttgatttttacgtagtgtaccgtaatgcataaataccttcgacatgtagcataattaatatcagtatatatcctaaactggttctcacgagcctaactgcatggttgttggagagatcatgtatttatggacgaaataaaacattgaaa

SEQ ID NO: 109750 - DNA, 699 bp, Zea Mays
caggctcttgatcttgtcgtgcaggaacacgccgtcgtacttgggacccctcaccaggcccagcaggttcgccaccggcgtcaggaacccggaccctgtgcaccaccacaaaccaaagtatgaatttgctggacccgttgggtagctgtagcttagagttggtggatagatgcgatgcatgcgacacgaagaacaaccgaactaactgacgcatgaatgaaagtgacagagagctaccaaaccaaggaagaagaaagagcgtcaggcggatatgaacggcgtatactttttctgagggaagatcttgggcccgttctcgaggtagaacgtgttgaggtcctttgcggcgaacagcggccggttgttctggtccggcgccgccagcatcgacgtgagaagggcgccggtgctcgtcccggcgatcacgtcgaagtagtcggcgatccgagcatctgggccgtccagctcctgcagcttggcctcgaggtgcgcgatgatggtggctgggatgaggccgcggatgccgccaccatcgatgctcagaatcgtgatcagcttccctgtcgacggcggcggctgcggcacggtggcgcagttggacgaggcgttgctctccatatgtctgaaacttaactggagatcggtctagcagagctctagagtataaaaaaagccaagaaggaattaaggatcggatca

SEQ ID NO: 109751 - DNA, 956 bp, Zea Mays
gccgaaccagtgacccgcaggcgcagctgccaattgcaagcatgtgcgggagtaagaaatccgtagcctacttcgcccacgaccgggcgcaccggctgctccccattgccggcggcgacgacttcacctgcggcgggtgcctggtcgctggcgccggcccgcggtaccggtgcgcccacccgggctgcagctttaccgtccacgaggcgtgcgcgcgccgctccccgaggacgctcaggtccgccgtgcacccgctgcacaggctgaggcggcgcgaggccgcgggagccgacggcagcggcggcggcggcgggtgcgaggtgtgcggcgaggccgtggagcgcgcgtgctacgcctgcgtcgcgtgcggggtcgccgtgcacccgctgtgcgcgcggatgcccgggtcggcgcggggccccgcgcacccggacgacggccacgaggcgtggctggtccgagtcgcgtcgccgccggacgacggcgatggcaagcagaagcagaagcaggcggcggggtgcggctcgtgcggccgggccctgggcgcgtggcggtaccgctgcgtgacgtgcgccgcggagttgcacccccgctgcctggtgccggcggtagaccagtgccgcggcgccggcgagggcgaggccgggcgcgcgggttccgcggccagtagctgctgcttggggctggtgcacgacctgacgcgctgcttggccacgctgggcaccgccctccactaccgtggttactacaatggttgacgttgtaacgcgggaagcttggaaattatgcgtgcatagccatagcatcggcactctggagatggatctcccagctctgaatatgatcgagtgcaaaacagtagcagtactaccaacctgttccttgtttgctcacccttgccatgtctgtcgtccttgtcctgatgagttatcatgaaaaagctcaagatggccacc

SEQ ID NO: 109752 - DNA, 473 bp, Zea Mays
tgccattctaaatagaagcaatactgatggcccaaaacaagatgattgtggtggttctcctccttgccacctttcttgtggtggcaagatcgttgtgggttccagaagaaccctcaaatgcgaatgacataagaggtgcttgcatcgaggagtgcaccaaagaaaataaggctcccgacgacaagaagacctgcgaagtgttgtgcaccgagctcacaaaaaagcctaccaaagaagtcaaacatgattgatgaagtagcactctaacaatatataccctggtggatcagtggtcatctttgtagccatatatgtctacgacacgatggccatgattatattgtcctattgttcgatttttggtttccactagtatcctaattccttttcatgtatcctaatgtcactcaaagaattttatatgattcagttagttaaataaatacaaaggcaaaggcatgttctgttttgat

SEQ ID NO: 109753 - DNA, 2298 bp, Zea Mays
ggacttcgtgcttattgaccatctatacacagcacgcggtccaaccaacctaccaaaacctagctagatttagaggaaaaaaaaaactgtccccaaccgtgagatggctgagtacggcgagcgctaccagggcaacggcgacccggccacgcccgagggtggctacgcgcagaccgagtacgccgccgccggtggctcgccgcccgccgaccgcaagccctccgtgttctccgaccacgctgacggtcgctcctcccagccccagcatgagactcaatcacatggcagtggttcctccaaatctcgagaaagggaccgagaacgtgataagggaaaggacagggagcgaggcagagaccgtgtccgcgaaaaggagagggaccgagacagggacaaggatcgtgaaagaggtgacagagacagggatcgtgatcgccaccacatggatcgtcgcgagcgcagcgagataagggaacaccgtgatcgttctgatgatcgtgaccgtcaccgcgatgatcgtgaccgtcgcaggagtcatgattctgagaggagaagagatcgtgacagagatggccatcgtaggcatcgctcccgttccccttctatgagtcgtgaccgtgaccgcagatctagatctcgttcacgctctagatcgaagagcaagcgcgtgagtggttttgaccaagcacctacacaacaggcacttcctattgttgctgctggtgttatccctggtcagctgcctggtgtcaccgctcctattcctggggttggggtgcttccaaacttgtataatttggctgcaggacagccacaagccatgacacaacaggctaccaggcatgctcggcgtgtctatgtgggcggacttcctccaactgctaatgagcagaccgttgccatattcttcaatggagttatggctgctattggaggaaacacagctggtccaggtgatgctgttcttaatgtctacataaaccacgacaagaaatttgcttttgtggagatgagatctgtggaggaagcaagcaatgcaatggtcttagatggcataatgtttgagggagcaccggtcaagattagaagaccaacggactataatccttccctagcagctgctctgggcccgagccagccaaatccaaatctcaatctttctgctgttggcttaacacctggctctgctggaggattagaaggtccagaccggatctttgtaggtggtctacaatattacttcactgaggcccaagtgcgggagttgcttgagtcctttggacctctgcgtggatttgatcttgtaaaggatagagaaactggtaactcgaagggatatgccttctgtgtgtaccaggatcttaatgttaccgacattgcctgtgctgctcttaatggcatcaagatgggagacaagactcttactgttaggcgggcaaaccaaggagcttctcagcctaggccagagcaagaaagcatcctgttgcaagcacagcagcaggtgcaaatgcagaaattcgtataccaagttggaggtgccctgccaacaaaagttgtatgcctgacacaggtagtgacagaagatgaactgagagatgatgaggaatatgatgacattgtggaggacatgagggaggaaggacacaaatatgtcccgcataatgccattgcagattgttttgtagtccgaccttatgcaatagtggcaatcgggccttaacccacagaagacactattcttttgactttgattaatcattttattattagcgcgtcttgtctatatatatctactctgctcactaagatttggacaggtaacttggtgaaagttgcaattccacggcctgaccccagcggtgctcctgttgctggtgttggaaaggtgtttttggaatatgcagatgtggagggctcaaccaaagcaaagacagggatgcatgggcggaaattcggcgggaaccaggtggtggcggtgttctaccctgaggacaagtttgcagctgagcagtacgactgaaaagttttagaacccctattctagagttgcagttgtggcacacaatgtggttgttttgaccttttgtagttaagtttggtgattgatccgctgataagtgatataagtttcgtgctcaagtattatatcagctggtaagagtgatacaagtctcgtgcccaagtttcggtctatcaatcgactgcatgttgccctgttggcttcttgcacactgagtgatgtgatcttgtatgacatatacaacatctaggatctagtagttgctgcattagaatgct

SEQ ID NO: 109754 - DNA, 2068 bp, Zea Mays
gcacgcggtccaaccaacctaccaaaacctagctagatttagaggaaaaaaaaaactgtccccaaccgtgagatggctgagtacggcgagcgctaccagggcaacggcgacccggccacgcccgagggtggctacgcgcagaccgagtacgccgccgccggtggctcgccgcccgccgaccgcaagccctccgtgttctccgaccacgctgacggtcgctcctcccagccccagcatgagactcaatcacatggcagtggttcctccaaatctcgagaaagggaccgagaacgtgataagggaaaggacagggagcgaggcagagaccgtgtccgcgaaaaggagagggaccgagacagggacaaggatcgtgaaagaggtgacagagacagggatcgtgatcgccaccacatggatcgtcgcgagcgcagcgagataagggaacaccgtgatcgttctgatgatcgtgaccgtcaccgcgatgatcgtgaccgtcgcaggagtcatgattctgagaggagaagagatcgtgacagagatggccatcgtaggcatcgctcccgttccccttctatgagtcgtgaccgtgaccgcagatctagatctcgttcacgctctagatcgaagagcaagcgcgtgagtggttttgaccaagcacctacacaacaggcacttcctattgttgctgctggtgttatccctggtcagctgcctggtgtcaccgctcctattcctggggttggggtgcttccaaacttgtataatttggctgcaggacagccacaagccatgacacaacaggctaccaggcatgctcggcgtgtctatgtgggcggacttcctccaactgctaatgagcagaccgttgccatattcttcaatggagttatggctgctattggaggaaacacagctggtccaggtgatgctgttcttaatgtctacataaaccacgacaagaaatttgcttttgtggagatgagatctgtggaggaagcaagcaatgcaatggtcttagatggcataatgtttgagggagcaccggtcaagattagaagaccaacggactataatccttccctagcagctgctctgggcccgagccagccaaatccaaatctcaatctttctgctgttggcttaacacctggctctgctggaggattagaaggtccagaccggatctttgtaggtggtctacaatattacttcactgaggcccaagtgcgggagttgcttgagtcctttggacctctgcgtggatttgatcttgtaaaggatagagaaactggtaactcgaagggatatgccttctgtgtgtaccaggatcttaatgttaccgacattgcctgtgctgctcttaatggcatcaagatgggagacaagactcttactgttaggcgggcaaaccaaggagcttctcagcctaggccagagcaagaaagcatcctgttgcaagcacagcagcaggtgcaaatgcagaaattcgtataccaagttggaggtgccctgccaacaaaagttgtatgcctgacacaggtagtgacagaagatgaactgagagatgatgaggaatatgatgacattgtggaggacatgagggaggaaggacacaaatatggtaacttggtgaaagttgcaattccacggcctgaccccagcggtgctcctgttgctggtgttggaaaggtgtttttggaatatgcagatgtggagggctcaaccaaagcaaagacagggatgcatgggcggaaattcggcgggaaccaggtggtggcggtgttctaccctgaggacaagtttgcagctgagcagtacgactgaaaagttttagaacccctattctagagttgcagttgtggcacacaatgtggttgttttgaccttttgtagttaagtttggtgattgatccgctgataagtgatataagtttcgtgctcaagtattatatcagctggtaagagtgatacaagtctcgtgcccaagtttcggtctatcaatcgactgcatgttgccctgttggcttcttgcacactgagtgatgtgatcttgtatgacatatacaac

SEQ ID NO: 109755 - DNA, 725 bp, Zea Mays
acttccaaatggttttcgaagtaggatatgaacttatttgttgagtcagtggtaagtggtgagaatggagctacatgtaaatctaacactgcacatgcatttagtttgatgccaagccatcaacttgtaagtctaacaccgcacatgtatttaatttgatgccaagccactaacttgtaaatctaacaccgcacaaattgccaattaccaagtgtcaaccccaaaacagctgcatacagcataatctaatcgaactgttgcttggttctgccacttctgtgagctacccatctgacccctatacttcatttaccgttagagatgaactaacacgctttgcccctcttgcctttgcagcgttgtttcagatcatcaggacggcaaccagcggcggggtggcttgagagccggcccacatctaatccccagtatagagagttgcttgttatacatgcatccagctaggattgggtagcagctaaaatgttaaacgtgacaagactgccctgcattccgttcatttggtgggccttgaatctggaactgaaccataaggcagaatcatgtaccttatataaagtgttaaatgggtaactggatctcagtgtttcatttaatctttccccggtgttggattttttgtgtgtgtgattctaagatactatgcctttgttcacctgtgttggcttgtgacaattgaagtttcagtagctgcactcaacata

SEQ ID NO: 109756 - DNA, 673 bp, Zea Mays
ataaagcaccctctccttgcgcgaattcggacacggccaccacacatcccttcctctctttctcctcgaggctcgagcattcgtgctgctccgaccccaccgccacaggctcggcggtccggcgatctcgctcaccggcgggaacatgactacttcaaggcgccttgctgacaggaagaccgcaaagttccagaagaacatcaccaggaggggttctgtgcctgaaaccactgtcaagaagggaaatgactaccctgttggccctctagtgcttgggttcttcatctttgtcgtcattggatcatcgttgtttcagatcatcaggacggcaaccagcggcggggtggcttgagagccggcccacatctaatccccagtatagagagttgcttgttatacatgcatccagctaggattgggtagcagctaaaatgttaaacgtgacaagactgccctgcattccgttcatttggtgggccttgaatctggaactgaaccataaggcagaatcatgtaccttatataaagtgttaaatgggtaactggatctcagtgtttcatttaatctttccccggtgttggattttttgtgtgtgtgattctaagatactatgcctttgttcacctgtgttggcttgtgacaattgaagtttcagtagctgcactcaacata

SEQ ID NO: 109757 - DNA, 841 bp, Zea Mays
ataaagcaccctctccttgcgcgaattcggacacggccaccacacatcccttcctctctttctcctcgaggctcgagcattcgtgctgctccgaccccaccgccacaggctcggcggtccggcgatctcgctcaccggcgggaacatggtaagcgactcgaatcactctccttcgctgaagttttgtgcgttggtcgcaattgtcgcgggagggggatccaggatcgaacccagatctctctctgcgcggagggatggaccggacagatggggggtctcgccttcctcgcgtgcctgttggctggtgctacgatcggtccccacgcctcgtagaccttcgttggatcttcctcctgggtcgatccttaggatctagtagatcgtccctgccgcctcgcgcccgcccaaggtgtccacggatcgcgagatccgatggttgttttcggctcccagcggacggatccgtgagatccgtcggtgggaatggagctgctcagggcttttcgcctgtcacgttccggtgcccagacgtggagcggcgcgggcctgcaccggtacttggccttccaggttcagattcagggcggtaacggttggtttgtttaccccgcgctagttttcacttgagttaggaaacgcgaaacttttgccaggggatttcgtccctggcgatgggaaacataagaaagactttctggcttcatgctgtagccctgtaggagggatcatcaccgatccttgtgagcatgagtggatgcaaacggtggaggtatcatcactggtccttctgaatcgatgtataccagcgtggaaggggtagttcgtggttgttgaactgccc

SEQ ID NO: 109758 - DNA, 225 bp, Zea Mays
gccaagggtttagctcatcttcatgaagactgtcatccgaagatcatccaccgcgacattaaggcatctaacattcttcttgacttcaaatttgaagctaaggtatgctctaagtttttcttttctgttctagagttaatagctgactgtttctgttaactgaaaatgtatttgtcacacaatgcttatataaaccacttgattaagttatattatgttaggaca

SEQ ID NO: 109759 - DNA, 1228 bp, Zea Mays
gatgattctgattcgagtgatactgatgacaacacacttatgcttgtcactctttttaccctcaacattgaggctagacgccgtctccatagacgatccggtatacctcgccgcatcataaacagggatcattatgttggagagaacctcatccaccatcactacttcggcccgaacccactgtatccaccccacgtgtttcgtagaaggttccgcatgagtaggtcgttgttcatccgcattatggaaggagtgcaacaacacgatacttactttactcaacgggtcgacgcaacaggcctggcaggactcggcccccttcaaaaagtatgtgcggcaatgcagatacttgcttatgggttacctactgatgtcgtagacgagtacattcaaataggggagtctaccgcttgggaatgccttaatcatttctgtcgcgcattaattgcacattttagtgggtggtatctacgaactcctaatgaagctaacattgcacgtatcatgcacaatagcaagtcgagggggtttccagaaatgttgggttccatagattgcatgcattgggagtggaggaactgtccaaccgcgtggcgtggatagtttggtggcagaaatagaaaacctaccatgatactcgaggttgtagcaacgtacgatctatggatttggcattgcattttttggcatgtccgggacaaataatgacgtcaacatgctacaccgatcaccagtatttgaccccatgacaagcggtcgaataccacccatgaattacacaatcaacggtcatgcatacaacttcggttattaccttgttgatagcatttaccccaactagccaacttttgtgaaagctattagacacccttatgaggaaaataaggtatatttcacaaaaatgcaagaaagttgcagaaaggatattgagcgtgcatttggagttcttcaagcacgatgggcggtgctacgtggtcctgcgtacggttgggatcgtaaccgtttaaccgagataataacagcatgcatcatcatgcacaacatgattgtcgaaaacgaaggtgactttgcaggaaacactggttttggagagaccaattctggcattgaaccatgtcaactaattcaagaaggatgctccgaatgggtaattaatcacttcgatcttcgtcggcaagaaaggtcttccacactacaaaatgatcttgtcgagcatttgtgggctcac

SEQ ID NO: 109760 - DNA, 2767 bp, Zea Mays
tggcacattagcccgggtgatactgcggtgggcccgcgttttggttcctccgccattcgacgccaccggtgtgccgtctggtccgtctaccaagctggaatcggtagaccgtttcgttccatttgtccccacacgcgactaaaatttacatcacctcgaacggcggcggcggcggcggcggcggtttctcatctgcggcgcctcttcgatgctgtttgctttgccaaggctttgatcccagatggggatctcgtcgggtgcagacttccaccagcagcccaccccacaggccgtgctgccgccacgcccccatggccgtgcgccgacgctgcagacgtctctctccctggctggttccgcctcgccggagcaggtcgggtcgcctccggacacacaggagccgctgtcgaactccgacgcggggcatgactccgccacagagagcgccagctcacgggagacttggcctggggagcccggcaagagtggtggcggcgacgctcctcccgtggcatcagcaccgataactgcactgaggatagctgataataaggagaaggaggtggttggtaatggcgtcgccgagctgcaggcctttcggagtaggatcccgagtgcaggccggatgactctcagggaggttgcttgggacagggtggacctcgttgctgagaagatgaagggtatgagcgatgagctgctggacgaaaccaaagccgagctgcagtcgattctggaagggactggcggtcagcaccagattcaggagttcatgtacctgcagaagcttcttcagggcagggttgatctcaccctgcccatccttttgatggctcaccatgtgcagctggagatcctggttgccatcaagactgggatacaggcgttcttgcacccgagcgtcgacataccccagatccgcctcgctgagattttcctgtacaagaggtgccgcaacattgcttgccagagtgctgtgcctgctgaggagtgcaagtgtaacatatgcagtaacaggaacgggttttgtaatctctgcatgtgcgtgatctgcaataagtttgattttgaggtcaatacgtgccgctgggttgggtgtgatatctgctcgcactggactcacacagactgtgcaattcgtgatggaaagattgggactgggcagacgattaagaacggcgttggccatgcagagatgcttttccggtgccaggcctgccagaggacatctgaactgtttggatgggttagggatgtctttcagcaatgtgcacccaattgggacagggatgccttgctgcgtgagcttgactatgtttgcaagatattccgtctaagtgaggactcaaaggggaggaaattgttcagaaaatgtgctgagctagttgaaagattgaggggtggttctgctgaatcaatgactcctagaattctgctacaagcgctgcaagagctggacattgattcctccaagaactttgagcaccaagagccagggcggctgatcactccccaggaggcctgcaaccggatcgctgaggtcgtccaggaagcagtgaggaagatggagatggtggccgaagagaaattgcggacgtacaaacgcgcccgcctcgctgtggaggcgtgcgacagggagctggaggagaaggcccgggaggcccaggagctgaaggtggagcggctgcggaagctgcagcaggcggaggagctggagagcatcatccggctgaagcaggcggagtcggagatgttccagctgaaggcgagcgaggcccaggaggaggccgagcggctgcggagcgtcgcgctggcgaagcggaagtcggaggcggcggggcaggactacgcgagcatgtacctcaagcggcgcctcgaggaggccgaggccgagaagcagtacatcttcgagaagatcaagctgcaggagaaccagcatgccacgagcagcagcggcgggggtgcccgcctcggcggcggagctccctccgccggggaaccctcgcaggcgatgatgctgtccaagatccaggacctgctgaagaacgtgcgcagcgtgccgtccggcaagccagatgggcagcgctccaagtagcagtagcgtcgtggggtgggctcggctgggcgggaactgccactccatcggcctgctggttgttactacttgttattagacgtagtagttgttaactagcagtgtagtaagtttacatgatatatatactgcatttttttggggggaacaaaatgttgattacctgcgcagcattgtcctaggtgtgtttagtagcgacttgttttcactgattatgtgatatgtatgaattgtatgtgcaggtgattcaagtgtaaccaaacagcgtagctgctgtacggataagtgctaaggctgtctgtagcggtaggggtactcttctcgtaaccgttctccctataaattcttctatatatccctctacacattaaatatatattttcacctaactaacataaccaacttatttttctattttctttttccttttcgacacgtccgccatgtcgccatgttggaatttattttttgttaagtaaaaaaatatttgtggtttataaattgtgcagaacatacaaacataatttaagttaaatttaattttggaaatccataacaaactttattattgtgcgtcgtctagatttttcttaaacatcgagacatgaatattgaaccaaacttccgttggaagcacacaacgaacagtcgtacgcagcaagccacggttgg

SEQ ID NO: 109761 - DNA, 1519 bp, Zea Mays
ttttttgtatctatctaaaattagttcagttagaacttcctaatctgctaagctttctttgatccgtttgtatatgcgtgtgaaaattgcaggccgtcctatttgtgacgataaggcccttttcgaagagcttctaccgtcggatcaacagattcttggccgagctgctgtggcttcagcttgtctgggtggtggactggtgggcaggtgttaaggtacaactgcatgcagatgaggaaacttacagatcaatgggtaaagagcatgcactcatcatatcaaatcatcggagtgatattgattggctcattggatggatattggcccagcgttcagggtgccttggaagtacacttgctgtcatgaagaagtcatccaagttccttccagttattggctggtcaatgtggtttgcagagtacctctttttggaaaggagctgggccaaggatgaaaagacactaaagtggggtctccaaaggttgaaagacttccctagaccattttggctagctcttttcgtcgagggtactcgctttactccagcaaagcttctcgcagctcaggaatatgcggcctcccagggcttaccggctcctagaaatgtacttattccacgtaccaagggatttgtatctgctgtaagtattatgcgagattttgttccagccatttatgatacaactgtaatagtccctaaagattcccctcaaccaacaatgctgcggattttgaaagggcaatcatcagtgatacatgtccgcatgaaacgtcatgcaatgagtgagatgccaaaatcagatgaggatgtttcaaaatggtgtaaagacatttttgtggcaaaggatgccttactggacaagcatttggcaacaggcactttcgatgaggagattagacctattggccgtccagtgaaatcattgctggtgaccctgttctggtcgtgcctcctgctgtttggcgccatcgagttcttcaagtggacacagcttctgtcgacgtggaggggtgtggcgttcactgccgcagggatggcgcttgtgacgggtgtcatgcatgtcttcatcatgttctcccaggctgagcggtcgagctcagccagggcggcacggaaccgggtcaagaaggaatgaaaaatggagggtggagatgaggttctcgtggggtttgttatgggcaaccttcaaaaggactctccattcatattagtattaattcatatatatgcagcgccaaattccagacattgatatgctctcaaataggatgttctgctcccctcttgtatttgtatgcaggaaagggtttgtagggagtttacccccccccccccccccccccgcctttcttttgggcagaaagacatattctggaagcctttcagtagttcatttatcagcaacaattgcatctttcttccattgctgtgcaccttgtatcacctatcagaatgtggtcatatggggattgtacggcagcactgctgtgtgtgttgaaatgttgttccgttctgtga

SEQ ID NO: 109762 - DNA, 1790 bp, Zea Mays
acaccatcctctcgtgttggctgttgctctgccaatgccacctatggacgcatccgctacactccacctcctccctctcgtcccagtcccagcggccagcgctcatccatccacccccatcctataataaaacctccgaatgcgcctcgcgtgccccgtcctcctcgtcgccggcggagccgcctactatcgcctggagaaggagcgccgcggggagcttttcccactgccgactgccgtctgaccctccgagatcggaagcggcgccggcgccggccggcgatggcgatcccgctcgtgctcgtcgtgctcccgctcggcctgctcttcctcctgtccggcctcatcgtcaacgccatccaggccgtcctatttgtgacgataaggcccttttcgaagagcttctaccgtcggatcaacagattcttggccgagctgctgtggcttcagcttgtctgggtggtggactggtgggcaggtgttaaggtacaactgcatgcagatgaggaaacttacagatcaatgggtaaagagcatgcactcatcatatcaaatcatcggagtgatattgattggctcattggatggatattggcccagcgttcagggtgccttggaagtacacttgctgtcatgaagaagtcatccaagttccttccagttattggctggtcaatgtggtttgcagagtacctctttttggaaaggagctgggccaaggatgaaaagacactaaagtggggtctccaaaggttgaaagacttccctagaccattttggctagctcttttcgtcgagggtactcgctttactccagcaaagcttctcgcagctcaggaatatgcggcctcccagggcttaccggctcctagaaatgtacttattccacgtaccaagggatttgtatctgctgtaagtattatgcgagattttgttccagccatttatgatacaactgtaatagtccctaaagattcccctcaaccaacaatgctgcggattttgaaagggcaatcatcagtgatacatgtccgcatgaaacgtcatgcaatgagtgagatgccaaaatcagatgaggatgtttcaaaatggtgtaaagacatttttgtggcaaaggatgccttactggacaagcatttggcaacaggcactttcgatgaggagattagacctattggccgtccagtgaaatcattgctggtgaccctgttctggtcgtgcctcctgctgtttggcgccatcgagttcttcaagtggacacagcttctgtcgacgtggaggggtgtggcgttcactgccgcagggatggcgcttgtgacgggtgtcatgcatgtcttcatcatgttctcccaggctgagcggtcgagctcagccagggcggcacggaaccgggtcaagaaggaatgaaaaatggagggtggagatgaggttctcgtggggtttgttatgggcaaccttcaaaaggactctccattcatattagtattaattcatatatatgcagcgccaaattccagacattgatatgctctcaaataggatgttctgctcccctcttgtatttgtatgcaggaaagggtttgtagggagtttacccccccccccccccccccccgcctttcttttgggcagaaagacatattctggaagcctttcagtagttcatttatcagcaacaattgcatctttcttccattgctgtgcaccttgtatcacctatcagaatgtggtcatatggggattgtacggcagcactgctgtgtgtgttgaaatgttgttccgttctgtga

SEQ ID NO: 109763 - DNA, 2303 bp, Zea Mays
atgcggggcgccgacctcatcaacccggcgctccccgacgagctcctcgacgacgtgatccgccgcgtcggctcgggcggggccaagcgcgacctcgacgcctgcgcgctcgtctgccgccgctggcgccgcctggagcgcgcgtcgcgccgctccgcgaggctcgccgcgtccggggagcgcgccgacgaggtggtgcgcctcgtcgccgagcgcttcacggcgctcaccgaggtgtcggtggacgagcgcctcaccgccgcggccgccgcctccgggtccgcccccagatcgtaccgctccggaacgctgcatattcctaaccggatccgacgccggaggagactgcccctcgcatcaaaccttactcttcatatagccccgttcccgttggaccagccagtcagtgatgaaaggacagagcgcagctgtttgactgacgtcggcttgactcatctcgcaaggggttgcagagggcttgagaagttaagtctggtgtggtgttctgccatatcctcaacaggcttggtgaggatagctgagaattgcaagaatttgacttctttggatctccaggcttgctttattggagatccaggacttgttgctattggggaaggatgcaagctgcttaggaaattgaacttgcgatttgttgaaggcaccacagatgaaggcttgattggattagtaaagaactgtggccaatcgctggtctcactttctgttgcaacttgtctttggttgactgatgcatctttacatgctgttggatcccactgccctaacctagaaattctatcggtggaatcagatcgtgttcaaagtgtgggaataatatctattgctaaaggatgccgacaattaaaaaccttgaagctacaatgtattggtactggggatgacgccctagatgctattggttcattctgtcctcttttagagatcttgtcactcaacaacttcgaacgatttacagacaggagccttacttcaattgcaaaagggtgcaagaatctcacagatcttgttctcactgattgccagttactaactgatagaagccttgaatttgtagctcgtaactgcaaaaagttagcacgtttgaagatcaatggttgtcagagcatggaatctgttgcactggagcacattgggcgatggtgtccgcgccttttggagctctctctaattttctgccccaggatcgagaacagtgcattcctggagattggtagcggctgctcccttcttaggactcttcatttgattgactgctcaagaataactgatgacgccttgtgccacatagctcaaggctgcaagaacttaacagaactttctattcggcgtggttatgaggttggagacagggcattggtgtctatcgccgagaactgtaaatcgctcagagagttaacgctccagttctgtgagagggtatccgatgcagggctatctgcaatcgcggaaaactgccctctgcataggctaaacttgtgcgggtgccacctaatcaccgataccgggctgacggcagttgccagaggatgccctgatctagtcttcctggatatgagcgtccttcggatcgtaggtgacatagcgcttgcggagataggcgacggctgtccgaagctgagagagatcgcgctctcccactgccctgaggtcaccaacgtcggcctgggccaccttgtgcgagggtgcctgcagctggagtcctgccagatggtctactgccggcggatcaccagctccggggtggcgaccgtcgtctcgggctgcgggaggctgaagaaggtcctcgtggaggagtggaagatcgaaaatgttgtaccagatgttgtatcagaagtgatgaccaaataaagacgagacgaaggaagtggcaagagcttcatcaaatgctgtaccaaattgctgttactcgtcttgtacctcgagtgcttcttcgatttctatgccacgtgttcacgtcctcaagtcagatcgaaaatgttgtaccagatgttgtatcagaagtgatgaccaaataaagacgagacgaagtggcaagagcttcatcaaatgttgtaccaaattgctgttactcgtcttgtaccttgagtgcctcttatgtcacgtgttcacgtcctcgagtcaggcatgtgagatataggaaagaactgtattatcatcaacttaacgtcagaaagttgttagtgctgttcagcagaacatcgctacgtagttcacgagccgttacaaacactcctccgaatatcattacacaacgaatggcaagcactatctcttcactt

SEQ ID NO: 109764 - DNA, 2447 bp, Zea Mays
atacggccacgcctgaatgcccgacctccgtccgatccggtcaaatcctcgccgcccacgcccccgcctccgccggcgatgcggggcgccgacctcatcaacccggcgctccccgacgagctcctcgacgacgtgatccgccgcgtcggctcgggcggggccaagcgcgacctcgacgcctgcgcgctcgtctgccgccgctggcgccgcctggagcgcgcgtcgcgccgctccgcgaggctcgccgcgtccggggagcgcgccgacgaggtggtgcgcctcgtcgccgagcgcttcacggcgctcaccgaggtgtcggtggacgagcgcctcaccgccgcggccgccgcctccgggtccgcccccagatcgtaccgctccggaacgctgcatattcctaaccggatccgacgccggaggagactgcccctcgcatcaaaccttactcttcatatagccccgttcccgttggaccagccagtcagtgatgaaaggacagagcgcagctgtttgactgacgtcggcttgactcatctcgcaaggggttgcagagggcttgagaagttaagtctggtgtggtgttctgccatatcctcaacaggcttggtgaggatagctgagaattgcaagaatttgacttctttggatctccaggcttgctttattggagatccaggacttgttgctattggggaaggatgcaagctgcttaggaaattgaacttgcgatttgttgaaggcaccacagatgaaggcttgattggattagtaaagaactgtggccaatcgctggtctcactttctgttgcaacttgtctttggttgactgatgcatctttacatgctgttggatcccactgccctaacctagaaattctatcggtggaatcagatcgtgttcaaagtgtgggaataatatctattgctaaaggatgccgacaattaaaaaccttgaagctacaatgtattggtactggggatgacgccctagatgctattggttcattctgtcctcttttagagatcttgtcactcaacaacttcgaacgatttacagacaggagccttacttcaattgcaaaagggtgcaagaatctcacagatcttgttctcactgattgccagttactaactgatagaagccttgaatttgtagctcgtaactgcaaaaagttagcacgtttgaagatcaatggttgtcagagcatggaatctgttgcactggagcacattgggcgatggtgtccgcgccttttggagctctctctaattttctgccccaggatcgagaacagtgcattcctggagattggtagcggctgctcccttcttaggactcttcatttgattgactgctcaagaataactgatgacgccttgtgccacatagctcaaggctgcaagaacttaacagaactttctattcggcgtggttatgaggttggagacagggcattggtgtctatcgccgagaactgtaaatcgctcagagagttaacgctccagttctgtgagagggtatccgatgcagggctatctgcaatcgcggaaaactgccctctgcataggctaaacttgtgcgggtgccacctaatcaccgataccgggctgacggcagttgccagaggatgccctgatctagtcttcctggatatgagcgtccttcggatcgtaggtgacatagcgcttgcggagataggcgacggctgtccgaagctgagagagatcgcgctctcccactgccctgaggtcaccaacgtcggcctgggccaccttgtgcgagggtgcctgcagctggagtcctgccagatggtctactgccggcggatcaccagctccggggtggcgaccgtcgtctcgggctgcgggaggctgaagaaggtcctcgtggaggagtggaaggtgagcgagaggacccggcggagggcggggcccgtcctgtcgttcctctgcaccgggctctaatcgaaaatgttgtaccagatgttgtatcagaagtgatgaccaaataaagacgagacgaaggaagtggcaagagcttcatcaaatgctgtaccaaattgctgttactcgtcttgtacctcgagtgcttcttcgatttctatgccacgtgttcacgtcctcaagtcaggcatatcgaaaatgttgtaccagatgttgtatcagaagtgatgaccaaataaagacgagacgaagtggcaagagcttcatcaaatgttgtaccaaattgctgttactcgtcttgtaccttgagtgcctcttatgtcacgtgttcacgtcctcgagtcaggcatgtgagatataggaaagaactgtattatcatcaacttaacgtcagaaagttgttagtgctgttcagcagaacatcgctacgtagttcacgagccgttacaaacactcctccgaatatcattacacaacgaatggcaagcactatctcttcactt

SEQ ID NO: 109765 - DNA, 2485 bp, Zea Mays
atacggccacgcctgaatgcccgacctccgtccgatccggtcaaatcctcgccgcccacgcccccgcctccgccggcgatgcggggcgccgacctcatcaacccggcgctccccgacgagctcctcgacgacgtgatccgccgcgtcggctcgggcggggccaagcgcgacctcgacgcctgcgcgctcgtctgccgccgctggcgccgcctggagcgcgcgtcgcgccgctccgcgaggctcgccgcgtccggggagcgcgccgacgaggtggtgcgcctcgtcgccgagcgcttcacggcgctcaccgaggtgtcggtggacgagcgcctcaccgccgcggccgccgcctccgggtccgcccccagatcgtaccgctccggaacgctgcatattcctaaccggatccgacgccggaggagactgcccctcgcatcaaaccttactcttcatatagccccgttcccgttggaccagccagtcagtgatgaaaggacagagcgcagctgtttgactgacgtcggcttgactcatctcgcaaggggttgcagagggcttgagaagttaagtctggtgtggtgttctgccatatcctcaacaggcttggtgaggatagctgagaattgcaagaatttgacttctttggatctccaggcttgctttattggagatccaggacttgttgctattggggaaggatgcaagctgcttaggaaattgaacttgcgatttgttgaaggcaccacagatgaaggcttgattggattagtaaagaactgtggccaatcgctggtctcactttctgttgcaacttgtctttggttgactgatgcatctttacatgctgttggatcccactgccctaacctagaaattctatcggtggaatcagatcgtgttcaaagtgtgggaataatatctattgctaaaggatgccgacaattaaaaaccttgaagctacaatgtattggtactggggatgacgccctagatgctattggttcattctgtcctcttttagagatcttgtcactcaacaacttcgaacgatttacagacaggagccttacttcaattgcaaaagggtgcaagaatctcacagatcttgttctcactgattgccagttactaactgatagaagccttgaatttgtagctcgtaactgcaaaaagttagcacgtttgaagatcaatggttgtcagagcatggaatctgttgcactggagcacattgggcgatggtgtccgcgccttttggagctctctctaattttctgccccaggatcgagaacagtgcattcctggagattggtagcggctgctcccttcttaggactcttcatttgattgactgctcaagaataactgatgacgccttgtgccacatagctcaaggctgcaagaacttaacagaactttctattcggcgtggttatgaggttggagacagggcattggtgtctatcgccgagaactgtaaatcgctcagagagttaacgctccagttctgtgagagggtatccgatgcagggctatctgcaatcgcggaaaactgccctctgcataggctaaacttgtgcgggtgccacctaatcaccgataccgggctgacggcagttgccagaggatgccctgatctagtcttcctggatatgagcgtccttcggatcgtaggtgacatagcgcttgcggagataggcgacggctgtccgaagctgagagagatcgcgctctcccactgccctgaggtcaccaacgtcggcctgggccaccttgtgcgagggtgcctgcagctggagtcctgccagatggtctactgccggcggatcaccagctccggggtggcgaccgtcgtctcgggctgcgggaggctgaagaaggtcctcgtggaggagtggaaggtgagcgagaggacccggcggagggcggggcccgtcctgtcgttcctctgcaccgggctctagtaagtagggttcgcaagaaagggcaatgaatctgcccagcgtcagacttgctcaagtctttggatgaacagagcttgtcttgcgctggtgctgtgttgtgtcgtataccatagttccatagcatcgttcgttgcctcaaacaaaaggtgttgtgtgaactgttttaatttactcacaatgtgttgcacagatcgaaaatgttgtaccagatgttgtatcagaagtgatgaccaaataaagacgagacgaaggaagtggcaagagcttcatcaaatgctgtaccaaattgctgttactcgtcttgtacctcgagtgcttcttcgatttctatgccacgtgttcacgtcctcaagtcaggcatgtgagatataggaaagaattgtattatcatcaaactttaaaatgttgtgtggactgttttaatttactcacaatgtgttgcacagatcgaaaatgttgtaccagatgttgtatcagaagtgatgaccaaataaagacgagacgaagtggcaagagcttc

SEQ ID NO: 109766 - DNA, 249 bp, Zea Mays
atgaagattgaagaacagaactacacaaaagaatacctccagaagatgaactcatgccgacgaaaaaatctagatttctggagtccgtcggtgaagtccggaacttggaagttggaagaactggattcgcgcgtgctggaactcgggattggattcgcgcgtgctggattggaagtctggagtggagcagtggactttggatgcctagattccagaacaagaactcaagaagagccgccgaggaggtag

SEQ ID NO: 109767 - DNA, 1040 bp, Zea Mays
ggctgcccattttttttgtttctgaaatgatctgtagttttggatgttgcatgttataagggtattttctgatgcagattggactgagatggagaacagaaaaggaggtgatatctggcaaagggcaattcatctgtggtaataggcattgtgatgaaaaacatggtctaggtagttatgaggtcaatttttcttatgttgaagcagaggagcagaaacaagcactagtgaaattggtagcttgcaaaagatgtgcagaaaagcttgcttataagaggcaaaaggagaaagagaatgaaaatgagctccctggtgaaaaggaaattgatttgaaagacagcgacaagagaaagagaaaacatgaggaaagtgaccacagctcagaggacgagaaatatagaagaaagaaaaaaggatttaaggatgccaaaaattctggtagccagagacctgcagatcggtgtggagcatcttcaaagagttcagggaacagtgacgaagccttcgaggagtacctggaaggcatgttcccgtgatcggattcgtagttcttattaaaagaaaaaggtgactgaaggcttcttgatcagcccatgaaaaaaatgatgcacgggtcttggaacaacaccattagcgggtgttggagtagcaagtcagttccagttcgaacctcaacgagtcaacgctctgctgactctacaacgtcatgtaaagtgcgacctgtaattatgcgtgcctgggttgtttcggtgggttttttttctcccattgctttcagagacatggttgacgcctgttagtcaaagaagattgtaatatactaactactactcccttgcccgcactatactgtatgacatttccagcagcgttgctttttcgtccatctctacatcacttctctggctatagagattcagtgtttaccgtatgattagtattctgatgtatgaactgtggttactcggcttcgtatggtattaaaaatttgccaagtttccgtaaaagagtatattgaggaacttggaattatatttata

SEQ ID NO: 109768 - DNA, 1487 bp, Zea Mays
gcggtcaggccaggcccgggaggtgcgccacgacctgaccgacgccgccgcaccaggcgctcgattcccagccgcccccaaaaacccggcgcagatcctagcggtgcggcggccggagctggtgctccagcgcccttcgcggctgcccaggggtggggcgaggctgacgcgcagcgggcgggcgagcgattgcgatggcgtcgctagggcggctcaaatccgccatcttcgatagggaggagaggaagatgcagtaccaatcgcacatccgcgggctcaatgcctatgatcgccataagaagttcatgaaggattatgttcagttttatggccacgagaaaaatgtggatagtagtttgcccatcaaaactgataaagatacgctgagagaaggatacaggttcattctttccgaggaagatgagatggattctacttgggagaaaaggctggtcaaacgttactatgacaagctgtttaaggagtattgcattgctgatatgacccagtataaaaaaggcaagattggactgagatggagaacagaaaaggaggtgatatctggcaaagggcaattcatctgtggtaataggcattgtgatgaaaaacatggtctaggtagttatgaggtcaatttttcttatgttgaagcagaggagcagaaacaagcactagtgaaattggtagcttgcaaaagatgtgcagaaaagcttgcttataagaggcaaaaggagaaagagaatgaaaatgagctccctggtgaaaaggaaattgatttgaaagacagcgacaagagaaagagaaaacatgaggaaagtgaccacagctcagaggacgagaaatatagaagaaagaaaaaaggatttaaggatgccaaaaattctggtagccagagacctgcagatcggtgtggagcatcttcaaagagttcagggaacagtgacgaagccttcgaggagtacctggaaggcatgttcccgtgatcggattcgtagttcttattaaaagaaaaaggtgactgaaggcttcttgatcagcccatgaaaaaaatgatgcacgggtcttggaacaacaccattagcgggtgttggagtagcaagtcagttccagttcgaacctcaacgagtcaacgctctgctgactctacaacgtcatgtaaagtgcgacctgtaattatgcgtgcctgggttgtttcggtgggttttttttctcccattgctttcagagacatggttgacgcctgttagtcaaagaagattgtaatatactaactactactcccttgcccgcactatactgtatgacatttccagcagcgttgctttttcgtccatctctacatcacttctctggctatagagattcagtgtttaccgtatgattagtattctgatgtatgaactgtggttactcggcttcgtatggtattaaaaatttgccaagtttccgtaaaagagtatattgaggaacttggaattatatttata

SEQ ID NO: 109769 - DNA, 1370 bp, Zea Mays
gcggtcaggccaggcccgggaggtgcgccacgacctgaccgacgccgccgcaccaggcgctcgattcccagccgcccccaaaaacccggcgcagatcctagcggtgcggcggccggagctggtgctccagcgcccttcgcggctgcccaggggtggggcgaggctgacgcgcagcgggcgggcgagcgattgcgatggcgtcgctagggcggctcaaatccgccatcttcgatagggaggagaggaagatgcagtaccaatcgcacatccgcgggctcaatgcctatgatcgccataagaagttcatgaaggattatgttcagttttatggccacgagaaaaatgtggatagtagtttgcccatcaaaactgataaagatacgctgagagaaggatacaggttcattctttccgaggaagatgagatggattctacttgggagaaaaggctggtcaaacgttactatgacaagctgtttaaggagtattgcattgctgatatgacccagtataaaaaaggcaagattggactgagatggagaacagaaaaggaggtgatatctggcaaagggcaattcatctgtggtaataggcattgtgatgaaaaacatggtctaggtagttatgaggtcaatttttcttatgttgaagcagaggagcagaaacaagcactagtgaaattggtagcttgcaaaagaaaagcttgcttataagaggcaaaaggagaaagagaatgaaaatgagctccctggtgaaaaggaaattgatttgaaagacagcgacaagagaaagagaaaacatgaggaaagtgaccacagctcagaggacgagaaatatagaagaaagaaaaaaggatttaaggatgccaaaaattctggtagccagagacctgcagatcggtgtggagcatcttcaaagagttcagggaacagtgacgaagccttcgaggagtacctggaaggcatgttcccgtgatcggattcgtagttcttattaaaagaaaaaggtgactgaaggcttcttgatcagcccatgaaaaaaatgatgcacgggtcttggaacaacaccattagcgggtgttggagtagcaagtcagttccagttcgaacctcaacgagtcaacgctctgctgactctacaacgtcatgtaaagtgcgacctgtaattatgcgtgcctgggttgtttcggtgggttttttttctcccattgctttcagagacatggttgacgcctgttagtcaaagaagattgtaatatactaactactactcccttgcccgcactatactgtatgacatttccagcagcgttgctttttcgtccatctctacatcacttctctggctatagagattcagtgtttaccgta

SEQ ID NO: 109770 - DNA, 1243 bp, Zea Mays
gcggtcaggccaggcccgggaggtgcgccacgacctgaccgacgccgccgcaccaggcgctcgattcccagccgcccccaaaaacccggcgcagatcctagcggtgcggcggccggagctggtgctccagcgcccttcgcggctgcccaggggtggggcgaggctgacgcgcagcgggcgggcgagcgattgcgatggcgtcgctagggcggctcaaatccgccatcttcgatagggaggagaggaagatgcagtaccaatcgcacatccgcgggctcaatgcctatgatcgccataagaagttcatgaaggattatgtatgcgtgggcacatacaagatacccgtgatgctcgaaattcagttttatggccacgagaaaaatgtggatagtagtttgcccatcaaaactgataaagatacgctgagagaaggatacaggttcattctttccgaggaagatgagatggattctacttgggagaaaaggctggtcaaacgttactatgacaagctgtttaaggagtattgcattgctgatatgacccagtataaaaaaggcaagattggactgagatggagaacagaaaaggaggtgatatctggcaaagggcaattcatctgtggtaataggcattgtgatgaaaaacatggtctaggtagttatgaggtcaatttttcttatgttgaagcagaggagcagaaacaagcactagtgaaattggtagcttgcaaaagatgtgcagaaaagcttgcttataagaggcaaaaggagaaagagaatgaaaatgagctccctggtgaaaaggaaattgatttgaaagacagcgacaagagaaagagaaaacatgaggaaagtgaccacagctcagaggacgagaaatatagaagaaagaaaaaagatcggtgtggagcatcttcaaagagttcagggaacagtgacgaagccttcgaggagtacctggaaggcatgttcccgtgatcggattcgtagttcttattaaaagaaaaaggtgactgaaggcttcttgatcagcccatgaaaaaaatgatgcacgggtcttggaacaacaccattagcgggtgttggagtagcaagtcagttccagttcgaacctcaacgagtcaacgctctgctgactctacaacgtcatgtaaagtgcgacctgtaattatgcgtgcctgggttgtttcggtgggttttttttctcccattgctttcagagacatggttgacgcctgtta

SEQ ID NO: 109771 - DNA, 707 bp, Zea Mays
aactgtaattctataaaggaaaaaataagacttcttttccctatggtcaaccaaagaaaattccttgttgaagatggactcaacaaaggagcattatcctgctgacatgctttcaaataaaaaatatttgtgcatccttaattagttttgtttatgcagtcagcaagctacatatacaaattgcagataaggatacagacaatcaacagatcctactagaagaagagaaggatgtaaccacttgtcttacaaccctgatatctgagttatcaggtcctaaagaatgggtgcctatggaaagactcctttcagagatttctaaacgttttggtaaaaaatggcttcgtgacagggtaagcaagtacttaccacaaaagggcatgtctggctcttcaactaaagttgatcataggccatggtgtagcttgtgggagctactcaggaagcacccagagcattttgtcatgaccacattgacaagaggagaagaaacatcagattatgttggcttggtacacctggtatctgtggaaaatgaaccatgaatcctagacccattattgccattcgaaggacttccgtaccattatgggctagttatgtttgaaataaactaggacatattattgttatcatataaaatttgaagcccattttgtagtatggctatcatgttctattgtaaaactatgcagctttgatgtggt

SEQ ID NO: 109772 - DNA, 1155 bp, Zea Mays
cttccgtcctgttctcgtcgcacctctttacctccgccgccgccgctattgtcccattccaatctagaacccatagtcttcttcgtgattgtgcggttctttggtgagagcatgagctcgtctacttccggaacacgagagatgttatctccaaattctacagcaacatctattggccaagttcaaaaggtgcctggttttgccaagcttcagggtgaaaactttgtgtacttcatgcaaacttattcaatcatgttgggacgcactagcagaagttatactgcagactttgatctctctaaatatgaatgtgggagccaatgtgtttcccgatgccatgcatgtatattctacgactttgaactccgccattttgccattgaagtccttggaagaaatggatgcaccattcgaggggtctcttatctcccaggtagtgtccctattaaattgaattctcaggacctcattgagattgctggcataaaattctactttcttctaccatctcgctccatttttgccactcttgctgctcgagatgctactatgttgcctccacaatctccatccttgttgcaccctaattaccctgggaatccaagtgctaatgattgtggtcgtagcaatggtgagaatggggttaaaatcagcaatgacatgcaagggaagttggtgaaacaaaagagaagtttttctggagaattggatatatcttacagttatggcaccaaaaaaaatgttgatcgagttggaacacttgatggattcagcaagctacatatacaaattgcagataaggatacagacaatcaacagatcctactagaagaagagaaggatgtaaccacttgtcttacaaccctgatatctgagttatcaggtcctaaagaatgggtgcctatggaaagactcctttcagagatttctaaacgttttggtaaaaaatggcttcgtgacagggtaagcaagtacttaccacaaaagggcatgtctggctcttcaactaaagttgatcataggccatggtgtagcttgtgggagctactcaggaagcacccagagcattttgtcatgaccacattgacaagaggagaagaaacatcagattatgttggcttggtacacctggtatctgtggaaaatgaaccatga

SEQ ID NO: 109773 - DNA, 867 bp, Zea Mays
atgttcccgcctccggctcccgtgatcccggccccggcgatggtgggccgcctccagttcgtgtccgtgggcgcgtccaacttcgccaccgagatggacttcatcggctctctgctgcccaggttccgctacatcgcgatagacgccgagtaccctggcactgtgcacggcgcgcccgcgggggccgggctgtccccggccgcgcgctactacgcggtcgtgaaggccaacgtggaggagctccccgtcctgcagctcgggctcaccatctgcgacgaggagggcaacctccccgtcgtcatggacgtggacggcctcccgctgcagatcgcgtgggagttccacttctccgacttcgacgtcgcccgcgacccgcactccgtcgagtccgtcaacttcctgagggcgcagggcttcgacttcgtccgcgcgcgcgcgcacggcgtcgcgtccgcggacttcgcgggcaagctcgccgccctgctggcgtcggtgccgcgctggtgccagccgccggcgtgggtggcgttcggcggcgccttcgacttcgcgttcatggtcaagatgctgtccggcggccagccactgcccgagaacccacaggacatggtggcgcgggcgagcgacctgctccgtggccccgtgttcgacgccaagtacatggcggagcactgcggccgcccggagctgtgcgttggcgggctcaggaccgtggctgccatcctcggcgtgccccagctcgacccggcgccgccgagccttgcgggccccaagagccacaccgcctgccgcatctactacaacgtgatgaggatgctcgagcacgatggcgccggctatgacggcctcatcgatggcctctactga

SEQ ID NO: 109774 - DNA, 1461 bp, Zea Mays
accattctgctgtagttgacaatcatgatatttgaaaaacgagctcacaactatatttcacacaattgatgctccaaattatttttctgtaattgaaacctaatgtaggaatgtgtaggatatttgctttgcctattagagaaagatttgataggatgtttgctttgcttggttgggaaatatttgataggatgtttgctttaactgataggaaaataccaacattctcatcttcttatggccctgtgcttttactttatgtgctatctaaatatagagtacaatgtaaagctatttttgcagattggaactgcagggtggtcgggttctcagatgtaagctgcacaacattatgctattctccccatcgatattgcacactttaacttgttaccatatttagttcttttgtatgcctttatagtggcttgttaatttacactgctggttcctgcaaccttttacaaattggtaaaaaatgaaaattgacagaggaaaatttgtgctgaagctttattcgttctttggttaagtgattaatgaatgaaaacaaatttgtaaatagtaataaggtttttgttctatcaaacacaatcaagatttgttagcttgcttgctgctgcttagatcaatattggtttctcacatcaactatgctaatgttgaggtgataatcagtccttcactagcataaggatgtatatacagactaatttttgtctccgttgcatggcatttgtgttgttgtataccgctcaagtactgcttatgagattgcttgaactttatcctggaacctcaagggttgtcgttggccaaagctacatctatctttctttcagtgttttgctggaactgataacgttttgagtctgcagaagaatgaatcatagaaagttaatgtgtgcatccatggttgtggtcttgacacggcggagcggacctcgctcgggaagctgctgcagccggtagactattgattggaacttttaggtacataagttctccacatgtagatgagtgttatcgtcatagatatggggtcaatccctgttttgttcccatggttgaaagtgatggtcttcattttgttggttgtgacaaaagtcaaaaccggatggagattgtggagcagattgcgggttttgaatttcttttccaaatgtcgtcttcgcgcccaccgcggaggggtggtgaccgaagagatagtggcagaggcgtcccttgtgggctctgctcctatctcgcggtatgaagcctttaacttatgagatgagataggagtctgtgttcttatcccagtataaggtctacaatggcacaatgcttgtaccatctgtttttggggtaacttatttttatcatgcagtgcatgtgacttgaaactttgtgttagcctttattgctttctaccttatggcacctgtagtagtgaactgatgatattcttgtggactctga

SEQ ID NO: 109775 - DNA, 852 bp, Zea Mays
atggctgctatcattggcagaaccgaagagacgttaaatgacgatatagtcctatatctctacattgaaatgcatgacagcatgactgttaggcttattgcctttattttctcctttctccttcatgacttatctatacagagtgcttctgcttctacagattcacaattaaacatacttgataaaagagtatggcgtgtactgaagggtccattcaactacacgactcgtgatgaagttggtataccccgagaatggttcccccagattgacgcgtccgcgccgcgcttgcccagatcgatggaatctgcggtctccagatgcgagtccggggctcgctatctgtggaaggcgaggagagacgaagtgacctcgtccatgcctccaccgttggacgagaatatcttctccgatctcaccctcttcgctccaccgcaggagccgctctcgctagagaagaagttgtgcctcgtcatgggcctccacgacggatcaaccaagtgcttatatcctgctttggaatatagttccaagaagaacgccaaggggaacaaacctagaaaagaaagaaacataatttttgaagctttcagaacgcctagagaagctattgaagaaaggaggagaaaatatgagaacaacgaataccaagttaagatcgagatactgaaaatcaactttcatgagaggaagaagaacgcttgggaagattcaagctcagatgacatttctggtgttatcacacgctttgatggtgttgaccttcaggtttatgaaaccctcactcagtcactctctattatctctatatatgaaacagacaatttggtgctcagtcccagtgatggttag

SEQ ID NO: 109776 - DNA, 1620 bp, Zea Mays
attagtcccagatctctctaatagtctagtcccccccaagccgactccgcccggctatcttcccgacgctgtttatccccctatgaactaggatccataacagatggtgtgtcacttcaaaaatagtcagatgtgatgattaatgagataatgctgcttgccccatgagagtggaaacaaaattatttgatactgcaggaccttactcaaacagtatggaaaagtattaggcctagatcctaaaaggattccacagaattgggcagccactcaatttgctgaagcattgggcagagcatgggccgagtataacaatgacagtgctgttgttttgatggttgtccaacctgaagaaagaaatatgtacgaccagtactgtcttgtcaatcatctgaaggaatcatgaaaacattggcacaagtagaggctcaagggcaggttcttacagatggaacacttgtggtagatggtcggacagtggctgttgtgtatttcagagccgggtatgcaccaactgattacccttcggaagcggagtggagagcgaggcttctgatggaacaatcatctgcagtgaagtgcccttcgatagcctaccatttggtaggaacaaaaaagatccagcaagaactagcaaaacctaatgttcttgaaagatttcttgacaacaaggacgacattgccaaactacgcaagagtttcgcagggttgtggagcttggataatgaagagattgtgagatctgcaatacagaaacctaacctgtttgtcctgaagcctcagcgagaaggcggagggaacaacatatatggtcaggatttgcaggacacactgatcaaactccagaaggaacagggggaggcgcttgcggcgtacatactgatgcagaggatttttccaaaagcatctcttactcctctagtcaggggcggtgattgctttgaggaccttacaatctcggagctgggaatatacggagcctacctgcggaacagagacaaggtgatcttgaataaccagtctggctacttgatgcgcaccaaagtttcttcttcaaacgagggcggcgttgctgcagggtttgccgttttggacagcgttctcctgactgatgagtgagacagcagcgaggtggcagagctatgggtgacacctgacctgcattagtgacagtgcccacagtcaactcaaacgatgacaatatcaactgcaatcgtaggggaaactatgaaattgcttacagaattgcggacagtcggagaagatggcagtgttacgttatgatatagtttcatgtttgtatgctggttgaaaatgtagggaaactcttgttttcactagaaaggaacccctggaggggggagtaacggtgtagaaggtttatgttgtcacagttggcatgcattcatcatataggaatagctaggagatggcaccgttatgccaacacagttataacaaatatcaattgtaaattttatgattggttatcgactaagcaaaacaattttataagaaattgttgtgcggcaatatcgtttgactaaatcttagtcagatgctcgaatattgctatggtttgtaaatataatatatcatatttatagattttgttgtaat

SEQ ID NO: 109777 - DNA, 2216 bp, Zea Mays
gcccacatcggactaggaacaaccgaacaggaacccattcccaattcccctctccggccttcgccgccgccaaggcacgaagccagagcgcgacggcataaatcgcgggagcgcccgccttcgaatcggtttcccccacgccatgtcctccccctgcgtctcgcaccaacagcaggtccgtctccgtctccgcgctgccagccgccttcccgccccagacacggcctcgttcgcgccgcccgcgccccggcggcttcgggtggcgcacgcggcgatgagcgccaaggcgcccctcggcgtggcgccggcggaggagggggccgggacgccggggcagcaggccgtgctggggcagatggtggaggatgccgccgtgtggtgcgccgtccacgggctcgtcgtcggagatcgcgccaaccagagatcaggaacggttcctggggttggcctggttcacgctccattctcgctgcttccagcgcgttttccggcatcgttcttcaatcaagcatgcgagctggctcctatcttcaatgagctcgtggatcgtgtcagcttggatggggagttcttgcaagctgctttgtctaggcaagttctgaattctatccactggattcttttggttaacagcggattatcattttccaatttcagaacaaagcaggttgatgaatttacttcaaggctgctagaaattcatgataagatgatgtctataaataagaaagaggatatacgcttaggattgcaccggtctgactatatgctggattctgaaaccaattcactacttcaaattgagctcaatactatcgcatcatcctttcctggccttggctcccttgtcagtgaacttcacaggaccttactcaaacagtatggaaaagtattaggcctagatcctaaaaggattccacagaattgggcagccactcaatttgctgaagcattgggcagagcatgggccgagtataacaatgacagtgctgttgttttgatggttgtccaacctgaagaaagaaatatgtacgaccagtactgtcttgtcaatcatctgaaggaatcatatggtgtggcaactataaggaaaacattggcacaagtagaggctcaagggcaggttcttacagatggaacacttgtggtagatggtcggacagtggctgttgtgtatttcagagccgggtatgcaccaactgattacccttcggaagcggagtggagagcgaggcttctgatggaacaatcatctgcagtgaagtgcccttcgatagcctaccatttggtaggaacaaaaaagatccagcaagaactagcaaaacctaatgttcttgaaagatttcttgacaacaaggacgacattgccaaactacgcaagagtttcgcagggttgtggagcttggataatgaagagattgtgagatctgcaatacagaaacctaacctgtttgtcctgaagcctcagcgagaaggcggagggaacaacatatatggtcaggatttgcaggacacactgatcaaactccagaaggaacagggggaggcgcttgcggcgtacatactgatgcagaggatttttccaaaagcatctcttactcctctagtcaggggcggtgattgctttgaggaccttacaatctcggagctgggaatatacggagcctacctgcggaacagagacaaggtgatcttgaataaccagtctggctacttgatgcgcaccaaagtttcttcttcaaacgagggcggcgttgctgcagggtttgccgttttggacagcgttctcctgactgatgagtgagacagcagcgaggtggcagagctatgggtgacacctgacctgcattagtgacagtgcccacagtcaactcaaacgatgacaatatcaactgcaatcgtaggggaaactatgaaattgcttacagaattgcggacagtcggagaagatggcagtgttacgttatgatatagtttcatgtttgtatgctggttgaaaatgtagggaaactcttgttttcactagaaaggaacccctggaggggggagtaacggtgtagaaggtttatgttgtcacagttggcatgcattcatcatataggaatagctaggagatggcaccgttatgccaacacagttataacaaatatcaattgtaaattttatgattggttatcgactaagcaaaacaattttataagaaattgttgtgcggc

SEQ ID NO: 109778 - DNA, 191 bp, Zea Mays
caactactccaatgctctagactgttattggcataataaactttgccatgtttgtccaggcacttgacacaataaagaaacctgcatccagtttgtccaaggctgatgtaaagaggattggcttttcagaactatttttcttttagtctacatgtgtactgaagcacctgtgctgtagcggacataatatg

SEQ ID NO: 109779 - DNA, 226 bp, Zea Mays
caccacaattatatgatcacaaaagcatcacaattataatattattcacaattagatcatttacaaatagctagatcattcacaaaagctccagagatgatcagtcacaaaagcaccacagcgacatcactccagcttgaagcagttcaaaagcccacaactacatcactaatgtttcatatcactccagctattgttcaaaagcccacaactacatcactctagc

SEQ ID NO: 109780 - DNA, 910 bp, Zea Mays
aggaacccattcccaattcccctctccggccttcgccgccgccaaggcacgaagccagagcgcgacgacataaatcgtgggagcgcccgcctttgaatcggtttcccccacgccatgtcctccccctgcgtctcgcaccaacagcaggtccgtctccgtctccgcgctgccagccgccttcccgccccagacacggcctcgttcgcgccgcccgcgccccggcagcttcggatggcgcacgcggcgatgagcgccaaggcgcccctcggcgtggcgccgacggaggagggggccgggacgccggggcagcaggccgtgctggggtagatggtggaggatgccgccgtgtggtgcgccgtccacgggctcgtcatcggagatcgcgccaaccagagatcaggaacggtccctgcggttggcctggttcacgctccattctcgctgcttccagcgcgttttccggcattgttcttcaatcaagcatgcgagctggctcctatcttcaatgagctcgtggatcgtgtcagcttggatggggagttcttgcaagctgctttgtctagaacaaagcaggttgatgaatttacttcaaggctgctagaaattcatgataagatgatgtctataaataagaaagaggatatacacttaggattgcaccggtctgactatatgctggattccgaaaccaattcactacttcaaattgagctcaacactatcccatcatcctttcctggccttggctcccttgtcagtgaacttcaaaggttgtacaaaatgatattccaccagaaagcatggatgccatgcgcccggtgcagcagcacttgccaacacggacaagcactccaccctccaaaatgaataaccttccaaaggatgcacagaacatggaagtgtctacacc

SEQ ID NO: 109781 - DNA, 879 bp, Zea Mays
acaattttgcactcccacccctaaacatttccagccgccactcacccctctcttctccttcagccgacgtgcacccgctccctgtcttcttcctcacggtggccagcagggagctcggccagcagccatggcctcctccacttcttccccgtggaagccggctccctgctccttgctccacgaccagcagaggtcagcggcgccctccctgctcctcctggcgagcggctgcagcagggagcaggagcttccaggccacccagcgccccttcttcttcatggcaggagctcctcccatggccgccgacgccctactctcctccatggccggcgctcgagctccactcctccccatggcgccaccccctgcagttttcccctccgcctcgacgccctccctgctccatttctttgttcccctactgttcccctgcgcgcagggagcactatggccagcgcccccttgaccctctgctcccagccatggcgcccaaaaatcccccagccgagccacctctcccagccagcgccctcccctgctcctcctatttttttccccacaaaacagcggcagctcgccccacctcccctcgctgcgcagcccctcggtgaaacgccgctgttcctgcagccccgacaccttccctggcttcctcgctgctagcgctgcgcgcgtgccacgtgttcggcgatttgtccaagtggggtgtcgagcagtgagcagcacgtcgtgatgcagccagtggtttgctgtttttggcgcagacccgctcgcgacgtcgtcgaccctcgccaccgtcaaagtcgcgctccgcgccttgcagttcgacgaaatgccgagccatgtggaccatgcggctaaatcccgactcgttcagg

SEQ ID NO: 109782 - DNA, 1142 bp, Zea Mays
gttgtacaaaatgatattccaccagaaagcatggatgccatgcgcccggtgcagcagcacttgccaacacggacaagcactccaccctccaaaatgaataaccttccaaaggtaaatacttagatgagtgggtcaatgaaacttgactggtgattgggtttgggtccacggtgaattggattctaatcggaagctgatgcaacaggatgcacagaacatggaagtgtctacaccagtacccccaataaatccggaaggaaatgatgaggacgagactccaaagaacactgtctctagaaatggtggtttcctgcagaatgcagttgggcaagacctagtccatcttggcgttgcaagaacagcaagtggttgcccttcggctgtcgcttccggtgttagcaccagacaccagcacaacagaatggatcttgatccagcatccagcagcgtggataatttcaaaacaccagaacttacaaaagaaaacggtctcgaggaggatgggaaaggagagagtagtatgtatgatgagaggcaacctaagagaaggaagcgtacccttatgaataatgagcaaatagatgaattagagaaggctctagtagatgagcctgagatgcacaaaaaccctgttctattgcagagttggtcagagaagttaagtctgcagggcccagagatcacaacatcacaacttaaaaactggttgaaaaaaagtgttgtatgcaaattctgacgagggtgatatataatactataatcctaagtctgacagcctaaataacctggttctaagctcctgtttgatctttttttttctataccttttatgcaaatctgaacagttgtttttacacaactgaacacctttttaatgtgagatattgagcattataattgttagtatattaggttagagtaaattagttaccaagctaggcagccccgctccggtatttatctccacggatgaaaaggggacgcagctatgtcattacattctatagatgctgaagcatttattttcatgattgaattttttttgggagagcacagtaccgtcctaatttttaattcgcttaactttttttactaaatatgtaaatagatggatagatatacatagacggttacaagcgtaa

SEQ ID NO: 109783 - DNA, 766 bp, Zea Mays
actttggggcattctattcttaggtcttaattgctgaatgcattctcatttatggaaaatacggccgtgcttttgtagggcccagagatcacaacatcacaacttaaaactggttgaacatccggaaagctaagcttgctcgcattgcaaaagaaagggcggagaatgctgataaaccatctactccccatcccggtgagtcttcagaaagtgccggggaggacaactatctaccccctgcaggtgtgatgactgctctatccaaaggtggtagcctgttgagcccggacagcactgagcaaacgtcgcaggcagagctatccccgaacacgacgatgatggtacgtccattcacgagatccttctcgctggagcccggccgcctcgtatcattagtcgacaacgatgggaaggaggttggcaggggcaagatcttccaagcgccagggaagagcacaacgaagagctgcgtttgcgtggttgatgtcactgagctcaggaccgagaagtggagggagctcccccacccttcggaggcatttgggtggacgttccaggaggcggaggcgaggaatggtggcatcataagggtctcttgggacgccgtcaggttgttccctgtagcgtagaaggccgattgtataacaagatgagtagagggaaactgtggcctaagtaacattatgttaaaagttgtggttaactgtgttgtattcatgaactaattgttttgagcaattcaggtggttactgattttacattttt

SEQ ID NO: 109784 - DNA, 1418 bp, Zea Mays
caaaatctcatttttatcataataacacaactgcagagcgtgcacactaaatagaggttgtacaaaatgatattccaccagaaagcatggatgccatgtgcccggtgcagcagctcttgccaacacggacaagcactccagcctccaaaatgaataaccttccaaaggatgcacagaacatggaagtgtctacaccagtacccccaataaatccggaaggaaatgatgaggacgagactccaaagaacactgtctctagaaatggtggtttcctgcagaatgcagttggccaagacctagtccatcttggcgttgcaagaacaacaagtggtggcccttcggctgtcgcttccggtgttagcactggacaccagcacaacagaatggatcttgatccagcatccagcagcgtggataatttcaaaacaccagaacttacaaaagaaaacggtctcgaggaggatgggaaaggagagagtagtatgtatgatgagaggcaacctaagagaaggaagcggacccttatgaataatgagcaaatagatgaattagagaaggctctagtagatgagcctgagatgcacaaaaatcctgttctattgcagagttggtcagagaagttaagtctgcaggtaattttttttttcactttggggcattctattcttaggtcttaattgctgaatgcattctcatttatggaaaatacggccgtgcttttgtagggcccagagatcacagcatcacaacttaaaaactggttgaacaaccggaaagctaagcttgctcgcattgcaaaagaaagggcggagaatgctgataaaccatctacttcccatcccggcgagtcttcagaaagtgccggggaggacaactatctaccccctgcaggtgtgatgactgttctatccaaaggtggtagcctgttgagcccggactgcactgagcaaacgtcgcaggcagagctatccccgaacacgacgatgatggtccgtccattcacgagatccttctcgttggaacccggccgcctcgtttcattagtcgacagcgatgggaaggaggttggcaggggcaagatcttccaagcgccagggaagagcacaacggagagccgcgtttgcgtggttgatgtcactgagctcaggaccgagaagtggagggagctcccccacccttcggaggcatttgggtggacgttccaggaggcggaggcgaggaatggtggcatcatcagggtctcttgggacgccgtcaggttgttccctgtagcgtagcaaggccgattgtataacaagatgagtagagggaaactgtggcctaagtaacattatgttaaaagctgtggttaactgtgttgtattcatgaactaattgttttgagcaattcaggtggttactgattttacatttttact

SEQ ID NO: 109785 - DNA, 1254 bp, Zea Mays
ccacggagacaccacatggccgccgccggcgacggcggtgagtcccactaccgggaggcgctccgcgaggccttcggtgactcgtcgagcagcgattccgacacacccgccggtgtcagccccggagcaggccgcgggcactggaggtgggaggcggtggctggggtcagggggctgtggctctgcgccgccttcctctccgccgacgagcaggcgcgcctcctcaacgccatccagcgaggcgatgagattcggcgacctcccttcgtgggcagtcgaactttctgcacttatccgcgaagctatctgcgtcggcgacgccagtgccggtcttggtgcggaggcgacgaacgaggacgaggatgcgtgccctctgccatcagacttgttgtggcgggagccattttttgatcagatgatcgcgaacagatacagaccaggtgagggcatctgtgctcacgtcgatctgatgcgctttgacgatgggatcgcgatcgtctcgctcgagtcagcctgtgtgatgcgcttcagtcgagcagaagcagcctctgacaccccgaagcaagggggcagtgccagtgaatctactgcagaggtccccgttctgctgaacccgggctcccttgcgctcatgtctggcgatgcaaggtatctgtggatgcatgagatcaaccggaaaccaggcaggcagctgtgggatggcagggagctcgagcagcgcaggaggacctctgttacgttgagaaaactcctgccttatacggactagatcactggtcatgacagtgaacaaactgttctgcagttacaggacagtaacctttttgtggtggaaaattgtaatatgctgttgctaaagacagccatcattggataatcaaaaggcgcagcctaagaggagtattgttgagtgcctcgagctctatattattggcaggaagctgtagcatttaccatgcatcagatccggggaaaggagagaagatcaggggacggcggcctttgtgagtgcaggaggtgtccggcgaccaacacaaaagcactgcgtccgaagagcgccatcggaaacgcctccgtcgtccagcctccaagctcgccgcagagtatcgtaggtactagtcgtagcactgacgaaatcgtgttttgtgcttaactgctattgctgtctggtgacttgaagtgagaatacttgcagttgtgtccagtgggtcatgtttgaagatttattaattacggtattgtttcaggacttga

SEQ ID NO: 109786 - DNA, 1355 bp, Zea Mays
cttgggcatacacagaaggcgtaacgagttgaatgaatcttgctgtaccgctctgtgctgcgagactggaagagactccacggagacaccacatggccgccgccggcgacggcggtgagtcccactaccgggaggcgctccgcgaggccttcggtgactcgtcgagcagcgattccgacacacccgccggtgtcagccccggagcaggccgcgggcactggaggtgggaggcggtggctggggtcagggggctgtggctctgcgccgccttcctctccgccgacgagcaggcgcgcctcctcaacgccatccagcgagaaggatggtttattaatgcagacaaccaagcgatgagattcggcgacctcccttcgtgggcagtcgaactttctgcacttatccgcgaagctatctgcgtcggcgacgccagtgccggtcttggtgcggaggcgacgaacgaggacgaggatgcgtgccctctgccatcagacttgttgtggcgggagccattttttgatcagatgatcgcgaacagatacagaccagggcatctgtgctcacgtcgatctgatgcgctttgacgatgggatcgcgatcgtctcgctcgagtcagcctgtgtgatgcgcttcagtcgagcagaagcagcctctgacaccccgaagcaagggggcagtgccagtgaatctactgcagaggtccccgttctgctgaacccgggctcccttgcgctcatgtctggcgatgcaaggtatctgtggatgcatgagatcaaccggaaaccaggcaggcagctgtgggatggcagggagctcgagcagcgcaggaggacctctgttacgttgagaaaactcctgccttatacggactagatcactggtcatgacagtgaacaaactgttctgcagttacaggacagtaacctttttgtggtggaaaattgtaatatgctgttgctaaagacagccatcattggataatcaaaaggcgcagcctaagaggagtattgttgagtgcctcgagctctatattattggcaggaagctgtagcatttaccatgcatcagatccggggaaaggagagaagatcaggggacggcggcctttgtgagtgcaggaggtgtccggcgaccaacacaaaagcactgcgtccgaagagcgccatcggaaacgcctccgtcgtccagcctccaagctcgccgcagagtatcgtaggtactagtcgtagcactgacgaaatcgtgttttgtgcttaactgctattgctgtctggtgacttgaagtgagaatacttgcagttgtgtccagtgggtcatgtttgaagatttattaattacggtattgtttcaggacttga

SEQ ID NO: 109787 - DNA, 1534 bp, Zea Mays
agccggaagtgagccttcttgggcatacacagaaggcgtaacgagttgaatgaatcttgctgtaccgctctgtgctgcgagactggaagagactccacggagacaccacatggccgccgccggcgacggcggtgagtcccactaccgggaggcgctccgcgaggccttcggtgactcgtcgagcagcgattccgacacacccgccggtgtcagccccggagcaggccgcgggcactggaggtgggaggcggtggctggggtcagggggctgtggctctgcgccgccttcctctccgccgacgagcaggcgcgcctcctcaacgccatccagcgagaaggatggtttattaatgcagacaaccaagcgatgagattcggcgacctcccttcgtgggcagtcgaactttctgcacttatccgcgaagctatctgcgtcggcgacgccagtgccggtcttggtgcggaggcgacgaacgaggacgaggatgcgtgccctctgccatcagacttgttgtggcgggagccattttttgatcagatgatcgcgaacagatacagaccagggcatctgtgctcacgtcgatctgatgcgctttgacgatgggatcgcgatcgtctcgctcgagtcagcctgtgtgatgcgcttcagtcgagcagaagcagcctctgacaccccgaagcaagggggcagtgccagtgaatctactgcagaggtccccgttctgctgaacccgggctcccttgcgctcatgtctggcgatgcaaggtatctgtggatgcatgagatcaaccggaaaccaggcaggcagctgtgggatggcagggagctcgagcagcgcaggaggacctctgttacgttgagaaaactcctgccttatacggactagatcactggtcatgacagtgaacaaactgttctgcagttacaggacagtaacctttttgtggtggaaaattgtaatatgctgttgctaaagacagccatcattggataatcaaaaggcgcagcctaagaggagtattgttgagtgcctcgagctctatattattggcaggaagctgtagcatttaccatgcatcaggtaattataagctctctttctcctttttgacactaaccatagctggagttagggttagttaggctgtctccagcacgagccgctaaacggcgctatatctaaatgtggcggaagggaatcgtccgccaaacgcctgttgcttcctcctcccgcttcgtcggctagatccggggaaaggagagaagatcaggggacggcggcctttgtgagtgcaggaggtgtccggcgaccaacacaaaagcactgcgtccgaagagcgccatcggaaacgcctccgtcgtccagcctccaagctcgccgcagagtatcgtaggtactagtcgtagcactgacgaaatcgtgttttgtgcttaactgctattgctgtctggtgacttgaagtgagaatacttgcagttgtgtccagtgggtcatgtttgaagatttattaattacggtattgtttcaggact

SEQ ID NO: 109788 - DNA, 1470 bp, Zea Mays
cttgggcatacacagaaggcgtaacgagttgaatgaatcttgctgtaccgctctgtgctgcgagactggaagagactccacggagacaccacatggccgccgccggcgacggcggtgagtcccactaccgggaggcgctccgcgaggccttcggtgactcgtcgagcagcgattccgacacacccgccggtgtcagccccggagcaggccgcgggcactggaggtgggaggcggtggctggggtcagggggctgtggctctgcgccgccttcctctccgccgacgagcaggcgcgcctcctcaacgccatccagcgaggcgatgagattcggcgacctcccttcgtgggcagtcgaactttctgcacttatccgcgaagctatctgcgtcggcgacgccagtgccggtcttggtgcggaggcgacgaacgaggacgaggatgcgtgccctctgccatcagacttgttgtggcgggagccattttttgatcagatgatcgcgaacagatacagaccaggtgagggcatctgtgctcacgtcgatctgatgcgctttgacgatgggatcgcgatcgtctcgctcgagtcagcctgtgtgatgcgcttcagtcgagcagaagcagcctctgacaccccgaagcaagggggcagtgccagtgaatctactgcagaggtccccgttctgctgaacccgggctcccttgcgctcatgtctggcgatgcaaggtatctgtggatgcatgagatcaaccggaaaccaggcaggcagctgtgggatggcagggagctcgagcagcgcaggaggacctctgttacgttgagaaaactcctgccttatacggactagatcactggtcatgacagtgaacaaactgttctgcagttacaggacagtaacctttttgtggtggaaaattgtaatatgctgttgctaaagacagccatcattggataatcaaaaggcgcagcctaagaggagtattgttgagtgcctcgagctctatattattggcaggaagctgtagcatttaccatgcatcaggtaattataagctctctttctcctttttgacactaaccatagctggagttagggttagttaggctgtctccagcacgagccgctaaacggcgctatatctaaatgtggcggaagggaatcgtccgccaaacgcctgttgcttcctcctcccgcttcgtcggctagatccggggaaaggagagaagatcaggggacggcggcctttgtgagtgcaggaggtgtccggcgaccaacacaaaagcactgcgtccgaagagcgccatcggaaacgcctccgtcgtccagcctccaagctcgccgcagagtatcgtaggtactagtcgtagcactgacgaaatcgtgttttgtgcttaactgctattgctgtctggtgacttgaagtgagaatacttgcagttgtgtccagtgggtcatgtttgaagatttatt

SEQ ID NO: 109789 - DNA, 953 bp, Zea Mays
atgaatcttgctgtaccgctctgtgctgcgagactggaagagactccacggagacaccacatggccgccgccggcgacggcggtgagtcccactaccgggaggcgctccgcgaggccttcggtgactcgtcgagcagcgattccgacacacccgccggtgtcagccccggagcaggccgcgggcactggaggtgggaggcggtggctggggtcagggggctgtggctctgcgccgccttcctctccgccgacgagcaggcgcgcctcctcaacgccatccagcgagaaggatggtttattaatgcagacaaccaagcgatgagattcggcgacctcccttcgtgggcagtcgaactttctgcacttatccgcgaagctatctgcgtcggcgacgccagtgccggtcttggtgcggaggcgacgaacgaggacgaggatgcgtgccctctgccatcagacttgttgtggcgggagccattttttgatcagatgatcgcgaacagatacagaccaggtgagggcatctgtgctcacgtcgatctgatgcgctttgacgatgggatcgcgatcgtctcgctcgagtcagcctgtgtgatgcgcttcagtcgagcagaagcagcctctgacaccccgaagcaagggggcagtgccagtgaatctactgcagaggtccccgttctgctgaacccgggctcccttgcgctcatgtctggcgatgcaaggtatctgtggatgcatgagatcaaccggaaaccaggcaggcagctgtgggatggcagggagctcgagcagcgcaggaggacctctgttacgttgagaaaactcctgccttatacggactagatcactggtcatgacagtgaacaaactgttctgcagttacaggacagtaacctttttgtggtggaaaattgtaatatgctgttgctaaagacagccatcattggataatc

SEQ ID NO: 109790 - DNA, 877 bp, Zea Mays
agccggaagtgagccttcttgggcatacacagaaggcgtaacgagttgaatgaatcttgctgtaccgctctgtgctgcgagactggaagagactccacggagacaccacatggccgccgccggcgacggcggtgagtcccactaccgggaggcgctccgcgaggccttcggtgactcgtcgagcagcgattccgacacacccgccggtgtcagccccggagcaggccgcgggcactggaggtgggaggcggtggctggggtcagggggctgtggctctgcgccgccttcctctccgccgacgagcaggcgcgcctcctcaacgccatccagcgaggtgagtcctcggttgccgggacctcctgtagcattcttgttccccttcttgcgaggagaaaaaggggatttcttttagcttcgtgttttgttcggtttggttccaatcataaattttgaaaggacgttatttgttactggtcgatccatctctccttgtgatagttagaatcatcggatctgattaggcagctgcgatgcagttagtaatgttaggaatcggtgaatcgatcgatccccttttcctctgaccatgtactagttctgattataaagttatctagctatatgtaaccatgttaaattgtaatttgcaataagccttttggtctctaactgatactatacttatctctggattagttaaatattacgtctcccagtagagcagtagcaaactaccctaagcacctatgcagaagtaactcagctctagtttgttgttcctcgagaacagaaataacaatggctcgacgctagtcataaatctgatggcttttctttttgtgcagaaggatggtttattaatgcagacaaccaagt

SEQ ID NO: 109791 - DNA, 1148 bp, Zea Mays
atgggtgccataaacccgcgggtcgcgggtttgggtaacatacgctacccgtcgcgggtagcgggtgcggatacgggtttaatattaatgtcgtggagtttattaggactcgtagctacctcggagttcacttctgtaaatatgagtaacaccctgccagcgcacgatatgtcggaatccacagggtcagaccccatctccaataaatggaccttccttctttgcctgggaagcttgtgcatcgggctactcttcaccaacagattggtgattgacaaagagactggcaagccaaaaggttatggcttttgcgagtacaaggatgaggaaactgctttaagtgcatgctggaaccttcagggttacgagattaatggtcgtcgattatgtgttgattttgctgaaaataggaggaacactgataaaaatagagaaaaggtcgataatcctcaaaattactatagaagagtctttcctaccactttggagttctttgttaatatgagtagttgtatagtcttcgttcctgtgaatgataatagttgtgccttctccgaccatcctgtgtctcctgttgcaatttcttacaagcatgtttatatgtttgagatcttgttatgcgttggaaataaagcagatcttgtacctggttatagcgtgcagaacatagaatatattgaggtatgtgcttccaatgctgactttgataagtgtcgatcagtggatggtgatagccaaggcttaaagcgactccttggagctctttctgcacatatgtggcctggaatagttctaaaatctagaatcaggataactgccccattctttgttgaaaaacaaggtcctgagttatctggatgataggtgcagagttatagcaacaaagtaatattgcaattatctcatcagtaatcttcaagcttgaatctaaattaagtaggtgcaatatagcaacaaagttagaactgtaattttcccgtatgaatttgatatacaaactaatgttaagtcaaataaaaagataagttatctggatgataggtgcagagttataacaacaaagtaatattgcaattgtctcacgaataatcttcaagcttgaatataaattaagtaggcgcattatagcaacaaagttagaactgtaa

SEQ ID NO: 109792 - DNA, 3884 bp, Zea Mays
atggaccctcctctccggctcctgcccgatgggcgcctcatggcggcgctgctactcctggccgcttgcctgtccgcctgcagcgtgcaagcggttacgagcgcggaagcttcctacatcgcccaccgccagctgctggccatgaaggaggccggcggcggcgaggccggcgacctaccggcggacttcgagttcgacgaccgcgtcggcgccgccaacttccccaacccgcgcctccgccgcgcgtacatcgcgctccaggcctggcaccgcgccttctactccgaccccaagggctacaccgccaactgggtcggcgaagacgtgtgcaagtacaatggcgtcatctgcaccgaggcgctggacgaccccaagatcacggtcgtggccgggatcgacctcaacggcgccgacatcgccgggtacctccccccggagctcggcctgctcaccgacctcgccttcttccacatcaacaccaaccgcttctgcggcatcatccccaagagcatgtcgcggctgtcgctgctgcacgagttcgacgtcagcaacaaccgcttcgtgggcgtcttcccctacgtctgcctcgagatggtgtcgctcaagtacctcgacctccggttcaacgacttcgagggcgagctgccgccggcgctcttcgacaaagacctcgacgccatcttcgtcaacaccaaccgcttcgtagggcccatccccgagaacctcggcaattccacggcgtccgtcatcgtcttcgccaacaacgccttcgtcggatgcatccccaagagcatcggccgcatggttaagacgctggacgagatcatcttcctcaacaacaagctcgacgggtgcctgccgttggagatgggcctgctggtcaacaccaccgtcatcgacgtcagcgggaacatgctcgtcggcaccatccccgagcagctctccaacatagccaagctggagcagctcgacgtgtcccggaacgttttcaccggcatcgtgcacgagtccatctgcgagctcccggcgctcgtcaacttcagcttcgccttcaacttcttcaactcggaggccgccgtgtgcatgccgtccgacaaggcgctcgtcaacctcgacgacagggacaactgcctcggcgcgctgcgcccggcgcagaagaccgcgctgcagtgcgcccccgtgcttgcgcgccccgtcgactgtagcaagcacgtgtgcgctggctaccccacgcccggaggagggccgccgtcgtcgccggtgccagggaagcctgctgcgtctgcgcccatgccatccccgcacacaccgccggatgtatcgccagagccgcttccagaaccttcgccggtgcctgcacctgcacccatgccgatgccgacccctcattcaccgccagcggacgattatgtaccgccaacaccacctgtacccggaaagtcaccgccagctacctcaccatcgcctcaggttcagcctccagctgcctccaccccacctccgtcactggtgaagttgtctcctccgcaggcaccagtggcatcaccaccgccacctgtgaagactacttctccaccggcccctattgcttcaccatctccaccaccaccagcgccagtggtctcaccaccaccgcccgtgaaatcacctcccccacccgcgccagtggcatcacctccaccacctgaaaaatcacctcctccgccagcaccggtggcctcaccaccaccgcctgtgaaatcacctcccccaccaacgctagtggcatcacctccacctcccgtgaaatcacctcctccaccggcaccagtggcatcaccaccgcctcctgtgaaatcacctcccccaccaacgccagtggcatcacctcctccgccagcaccagtggcatcttcacctccaccgatgaaatctccaccacccccgactcctgtgagctcacctcctcctccagagaagtcaccaccgccaccgcctcctgcgaaatcaaccccacctccagaggaatacccaacaccacccacttcggtgaagtcatcgccgcctccagaaaagtctctacctccacccacactgattccatctccgccaccacaagagaagcctactcctccatcaactccgtctaaaccaccttcatctccggagaagccttctccaccgaaagaaccagttagctcaccacctcaaacaccaaagtcttcacctccaccagctcctgtaagttcaccacctccaacaccagttagctcaccaccggcactagctccagtaagctcaccaccgtcggtgaagtcttctccaccaccagcgccactaagctcaccaccgcctgcacctcaagtgaagtcttctccacctccagtacaagtgagttcaccaccgccggcgcctaagtcatcacctccacttgctccagtgagttcaccacctcaagtagagaagacttctccaccaccagcaccactcagctcaccaccattggcgcccaagtcatcacctccacatgttgttgtgagctcaccacctccagtggtgaagtcctctccaccacctgcaccggttagctcgccaccattgacgcctaagccggcaagcccacctgcgcatgtgagctcaccacctgaagtggtgaagccatccacaccaccggcaccaacaacagtcatctcacctccatcagagcccaagtcatcaccgccacctactcccgtgagcttgccacctccaatagttaagtcctctccaccaccggcaatggttagctcaccaccgatgacgcctaagtcgtcacctccaccggttgttgtgagctcaccaccaccaacggtgaagtcttctccaccaccggcaccagtcagctcaccaccagcgacacctaagtcgtcacctccacctgctcctgtgaacttgccacctccagaagtaaagtcttctccaccacctacaccagttagctcgccaccgccagcgcctaagtcatcacctccacctgctcccatgagctcgccaccacctccagaggtgaagtctcctccaccaccagctccagttagctcgcctccacctccagtcaagtcgccacctccacccgcccctgtgagctcacctcctccccctgtgaagtctccaccaccaccagcaccggtcagctcgccaccacctccagtgaagtcaccgccacctccagcaccgatcagctcaccaccacctccagtgaagtcaccgccacctccagcaccagtgagctcaccaccacctccagtgaagtctcctccgccaccagcaccagttagctccccaccacccccaataaaatctcctcctccaccggcaccagttagctctcctccaccagcaccagtgaagccaccatcactaccaccaccggccccagtaagctcacctcctccggttgtcacccctgccccgccgaagaaagaagagcagtcattaccaccaccagcagaatcccaacctccaccatcattcaatgacatcatccttccacctatcatggccaacaagtacgcatctccgcctccccctcagttccaagggtattaagcgccacagagacatggttgatgaagcatgaagggaacagtctataaggtcacacgcgcagacaaactgctacatgtaaaacactgtaaacgtgtgtgaaattgttttttcttttgcacgtgcacgtgtgagtatattcttattcatacatatgtacggacgtgtgtatgtgtgaactaactacactacatgaggcggcaagttgtaagagagtgtgatttgtgtgccttatgtatcacttttttacatatagaaaaggaaacgacaatttccttaaaaatggggtacaagatgatggaacgaagttaagggattat

SEQ ID NO: 109793 - DNA, 424 bp, Zea Mays
ctgttgtatgcaacctcgctcgtcgacatcaccagtagccgtatcctcgtcgtctgtatcaggttcgatcagcagccatggacgggacgagccagtcgaggcggattggagtttgaatcacggccacacaatacactcatcagttacattattactagtgcaagcacctccactagtagattgggattcgatataaattcaagaagaaaatgaaatggaaggaataacagaactttgtagtgaagaacaagtttatgcacttttgggtctctatcctgaccttgagcagtttagatgaatagtgttatctggtaagcgtgcttatttggatgatagataatcctttgcgagttgcctgaacatttatacatcacattcatcctacacgtaattagtccgtattaaatcctgaaagtgaaatgca

SEQ ID NO: 109794 - DNA, 323 bp, Zea Mays
ccatcacagtacacaatcgatggcccattaggtccatttggcgttcccagttgccctccacgctcagacgctctacctcgctcgaatcctcgatcccaccggtggcggctgagcggctccaagctcctaagcacgacggcgccactgcggactgcggtacgcctgttgctgagctcctacgcgcctgtggacgaccggtcgtggctccgcgcgcgtgcgagacggcgtcgcggcgagcggtgcgccggcgccgtggccgtgcgctcgtccgcagcgggcccgtggtgaggcgacgaggcggctccaccggccgcggctaccga

SEQ ID NO: 109795 - DNA, 354 bp, Zea Mays
atgctccagggattacatcactctgaagacacagtcatcgccactgtcgccaatggcgaggccatgtggtccaccttgtgcggacgcgccgtgggcagagtcaacctttctggtataaggtgcttcgacaacgcatgcatgaacctcatctctgcagggttcctcgttcgccgcggctgcgagatcaggcagaatttacagggcgtcgagatctggaggggcgacgttctcgtcggcggggggcgcctgcttcccaacaacctgtggtcggtggatttcctggacgacatccatctgggcgagccgccggcatgcacgggttgcccgagcccgcactggatgctcattgattga

SEQ ID NO: 109796 - DNA, 2637 bp, Zea Mays
tgtgggaacatccactctgcagtctgcatctctaccgaaacaagaatcctcaacagctacatccaagagctatactttcagagaaggtgatagggtgcgttacgttggtccagctcagctatcctcattgtcacaaaggggaccaagttatggttatcgaggcagagtgatgcttgcttttgaagataatggatcctcaaaaattggagtccgatttgacaagcagatccctgatggtaatgatcttggtggtttgtgcgaggaagatcatggcttcttctgctctgctgaatcacttcgcccagacttttctgctggtgaagaagttgagaggctagctatgaccgagttaatagaggtcatttcagaagagaacaaatctggacctctgattgtgttacttaaggatgtagagaaatcattcactggagttaccgagtcactttcatctttgcggagcaaatttgaatcgcttccatctggtgttcttattataggatcccacactcagatggacagccgcaaagaaaaggcgcatcctggaggttttcttttcacaaagtttgccagtagcagccagacactttttgaccttttcccggatagctttggtagcaggtggttgcatgaaagaagcaaagaaagtccaaaggcaatgaaacatctgaataagcttttcccaaacaagatttcgattcagcttccgcaggatgaagctctacttacagattggaagcagcagttggatcgtgatgttgaaacccttaaagccaaatcaaacattggtagcattcgcacgtttctgagtcgcaatggaattgaatgcaatgatattgaagaattattcatcaaagaccaatcactgagtaatgaaaatgtggacaagattgttggatacgcagtgagttatcaccttaagcacaataaaattgaaacctccaactcgaaggataataaacttgtactcacaagtgaaagccttaagcatgggctcaacatgctgcaaagcatgcaaagtgataacaagagctcgaaaaaatcactgaaggatgttgtcacagagaatgaatttgagaaaaggcttttggtggatgttataccacctaatgacattggagttacctttgatgatattggagccttggagaatgtaaaggacacattaaaggagctggtgatgctccctttacaaagacctgaattgttctgcaaagggcagctaacaaagccttgcaagggaatattgcttttcggacctcctggcactgggaaaactatgcttgccaaagcagtagcaactgaagcaggtgctaatttcatcaatatatcaatgtcgagcattacgtcgaagtggtttggtgaaggggagaagtatgtaaaggctgttttctcactagcaagtaaaatagcccccagtgttatatttatcgatgaggtcgatagtatgctaggaaggagagaaaatccaggggagcatgaagcgatgcgcaagatgaagaatgaatttatggtaaattgggatggactgcgcactaaagataaggagcgtgtgcttgttcttggtgctacaaatagaccttttgacctggacgaggctgtgattaggaggttcccccgcaggttaatggtaaacttgcctgatgcatcaaatagagagaaaattctgaaagtaattttggcaaaagaagagctgggatcggatgttgatctcgactcacttgccaatatgactgatggttattcaggaagcgacctgaagaatctgtgtgtgaccgcagcgcattaccccattcgagaaatcctagagaaggaaaagaaggagaagagtttggctaaaacagaaggtaggccagagcccgcattgtatggaagcgagcacatccgtcctcttagcatagacgacttcaaatccgcccatgagcaggtttgcgcgagcgtttcatccgactcggcaaacatgaacgagcttctccaatggaacgacctgtacggtgaaggcgggtcgaggaagaggaaagcgctgagctacttcatgtgacggcgagagacataaaaccagaaggatcacaaccgcgccataaagccagaaggtatcgcagttgcgccatattgtacagccgccatagtacttcccccctccctggccctaaatccagccagggttttcctcctccctcctgggtagccgtggccgcctgtagtccctccctcgtgtaattagaaccgtgtaccgagtcgagttcatttacccactgtttgaggttccagagagttgagatttaaattttaagtggcgccattgcccttcctttcttcctcccctcctaagtattaactttgttgcggccattgttgtcgtgactctggccatagatccttttatgtacatgcgaaatgtaaccaagggatatggaataagaacatgttcatcctgttgtagacagcatggtggtacaggaattctttttatttttcatagttgattggtgatgaactggatcggtgccagcataagaattatgataaggtaccttttctgccgctgaattttttggtgtatgtcgatttgtcgagtggatttagtattgagatgaatgatatgacatcacatggatttttatgcgtctcatgttgtta

SEQ ID NO: 109797 - DNA, 821 bp, Zea Mays
ccgaaagaactctcgctcgaggggtggaaaagaagcggaaggagagacgagacgagaggaaaccctcgcctccgccacacgccatggtggagactcgccggagctcggccgctgcgaagcgcccgtccccgtcgccgtcctcttcgtccgtacctcccccgaagcggcccaaggcggagtctccggggtcaccgacggcctccgcgcccgcgagagcggaggaggattccgtggcgggagcggcacccgcgaggagcgacggctcggccgacgacgcggcggcggcggttgcacagaaagatcaaggagcggataagccttcttccgccgcggccgagagttcaaagaggagaaaggagccggagcaacagcaacccgcagcgccatgggcaaagctgctctcgcagtgctcacagactcctcactatcccatcattgccgctcagttttctgttggtcaaagcaaaaactgtaatttgtggctgaaagaccagcctgttagcaaggtgctttgcaagctgcggcgccttgagcatggaggtccatgtgagttagaagttcttggaaagaagggtatggtccaattaaatggaaggtccataagttcaggcacaaaagttccccttacaggaggggatgaagtcatattcaattcatgcggcaagcatgcttatatttttcagcatcctttgagtgacaaagctcctaaaacggtgccatcatctgctgttagtcttatagaacctccggttgctagcgtaaagcgcatccgtacagataagagaacaggagacacttctgctattgctggtacagagatg

SEQ ID NO: 109798 - DNA, 493 bp, Zea Mays
gagaatcacaaagttattatcatgtcttcacatgataggtcattaacagctataagggatgactttgcagataatgaatgaaactattcttgtggaatgtccttggacattaaatagacaatatcacaacactacatggatggagcataccttctcaccacaagatatattggaaatgtttttccaacttttctttgtaggcctcacactgaaaacaacaccttctgaaaatgggtccatgtaatcaacaagtccagttcagaagaacctccaagagtaatcatctgaaaccatatcgtttgttaatacaaaaacccatttgaacaagtgcaacctgcctcatgaaacaagaattttaccagcacatagttctaattcattgaggatctaattatatcagtagtgattaatttttagggtcagtgacaccacatctcattactgatccaatccaacaccaccagtcgctcagacagacatcagataatacagt

SEQ ID NO: 109799 - DNA, 190 bp, Zea Mays
gcaccacaacaaaatcattcacaaaacctacacatgttattatgttttgcacatatttgcaaacactttacaaaatcactcacaaaagtactaacgcttcaagtgattcgcaaaagccttcacaaaagcactccaacttcttgtatcctcttgttttaaggcacaagcttgtaggggttgtgatgtcgcc

SEQ ID NO: 109800 - DNA, 1362 bp, Zea Mays
ctcagaataaaaatggagacctcgttagttaatttgacttcctgtgccgcttcatcgcggtttctaactatttattaggacgagcagaggatccatcaactcagctttgcagagaagcagccaagcaagagcctttccgagtgtgtggagcagcagcagcagcagccgtaaggtatgcatgcctcgcttctagcttgatcaaattgtattcatatattttccatggcaaagtaagcttcatatctacctatacgcatgcatgcaatattttggacaactggatattatttcaagtctcttctccatgcatgggatgttttgatgcaatgcaggctcttcggaaaggtggcgatcgtcacgggcgccgccagcaaactgggcgaggccatcgcgaggaagttcgtcgacaacggcgccaaggtcatcctcgccgacatcaaccgccactcctgcgagaacatagtagcggctctcaacaagaccaaccatggccccgcggtggctcacgcgatgcgcatcgacgtcagcgaacccgacagtatcctggccaccgtcgaggaggcgaagaaggtctacaagcaagatgtcgacatcttctacaacaacgcgggggtcagcaacgtctcctccccggcctcctccatcgacatgatgagcttcaggaacaccatggcggtcaacgtcgagtccgtcatagccagcatcaaccacgccggcgccgtgatgcgcagcaacaagatcggcggcgggtgcatcctgtgcacgggcagccccgtgggctcgctcggcgacgtggtgccctcggcgtacagcatctccaaggccgcggtcgtgggcgtcgtgcgcgccgccgcggccgagctggggggacacggcgtgagggtcaatgccatctcgccgtacggcgtcgccgccaggtttgacaagggcgtgctgaggcacatcttccctcacgcgactgaccagcagctggatactatgatcagcagctacggcacctacacggtgaccgaggacgacgtggccaacgcggcggtgtacctggcgtccgacgctggcaagaacatcaatggccaaaacatcgtcctcaatggcaagttcggtctttagaagtgtggccgccaacggttctgttggggctcattagcggcaacttcacacaccctgggcgacttccattcatgccccgttgtttcctgaataaatagtgtggctgtcagtgagccacgtaacgtgtgtttccatttctctttttatttgcgaaatttcgatgtttcaaagtttggcaacaagatgtacttcaaatccatttgtcctcccatttaattctcataatgaataaaatcgtcgtctttacagtcc

SEQ ID NO: 109801 - DNA, 2110 bp, Zea Mays
aatcacggcggtcatctcgctaacgctttcctcttggacagttccacttctctgctggcctgccacaaggctacagcggcggcggctgcttcgccggccggccggccgccccctcctgtagcgcgctgagcaagtcaagtaagatggccggcgagcggcgcggtcttgccatcgggatcgatctgggcacgacttactcctgcgtcggggtctggcagaatgggggcgtcgaggtcatcgccaatgaccaaggcaaccgaaccaccccatcgtacgttgccttcaccggctccaggctcctcgtgggggatgctgccaagaaccaggccgaaatgaaccccagcaacacaatcttcgattccaagcggctcattggtagaagatttagcgatgcttctgtacagagtgacattaagcactggcccttcaaggtcattcctggacctgatgacaagcctatgatagttgttcaatacaggggtgtggagcagcagtttgcagctgaagaaatctcctcgatggtcctcgtcaaaatgcgggagattgctgaagcctatcttggcaccacagtcaaggatgctgttgtcactgttcctgcctgctctaccgacttgcagagacaggccacatggaatgcaggagtgcttgcaaatcttaatgttatacgcatcatccctgagcccactgctgctgccttggcttatggtcttaataggaaggctgcccagattatgggtgaatatgacgttctcgtgtttgatcttggaggtggtacctttgatgtctctgttctcgcaattgaacagggtatctttgaggtcagggccacagctggtgctgctcaccttggaggtgaggacttcgacaacaggatggtaaaccactttgtcgaggaattcaagagaaagaagaagaaggacattagcggcaaccctagggctctcaggaggctaaggacagcctgcgagagagcgaagaggaccctctcctcctatttagaggcgagcattgagattgattgcttgtatgaggacatcgacttctactcagccatcacccgtgccaggtttgaggagctcaacatggatctcttcagaaagtgtatggcgattgtggaggactgcctcagtgatgcgagttatgtacgttcaattcatgatgtcgtccttgttggtggttcctctagaattccaaagatccagcagcttcttcaggagctctttgatgggaaggagctttgcaacagcatcaaccccgatgaagctgttgcctacggagctactatgcaggctgctatcttgagccgagagggtggctatgagatccagaattatctcctgttggatgctacccctctttctcttggtttggagacggatgggggcctcatgaccttcttcagcttgttcgctgcggcttgctgcggctgcaatccggctgcggctgcggcttctacagtatttttctctctatggattgcagctgcagcagtccaaacagctgcaacagtgtcggcttgcagccaaccgaacacgccccttgatgattccaaggaataccaccattccaaccaaaaaggagagggtcttatcgactgactccgacaaccagccttgtatccgaatccgagtgtacgagggtgaggggtctattactcgtgacaaccacctgttgggtgagtttgagttttcccttcttcccgcacctagcggcgttcctcagatcactgtttgcttcgatgtcgacattaacggtatcctgaatgtctccgctgaggacaaaaccactggccagaagatgaaaaaagtcatcacaaagaggtttcgtttaaagcgttaattatctgatcaataactacacgaactagacagttttatgtcctttcataggattgatcgtctccaaggtcaaggcatatagtactggtgtttgtttagacagccgatgtcttattttacttgccaagcttggtggttgccttgtaaattgagcattttatttggaggttgtaaactgtttaatacatctatgtgtctatgatcaaagcataagtgtgtacgtcattggtgtctttataccatacatgtgaagtaaaaatatcattgcagtt

SEQ ID NO: 109802 - DNA, 2045 bp, Zea Mays
ccaccgtctccaccctccttccaagggccacgatgagggcgcctctcctctcctcgctcctcgtcctcgccgtcgtcgccaccgtgcctctactagtcccggcggtgtgcatctcgcggcacgacaagtccgagagcaaggctgacgaagaagctgctgctactaccgttgccgccgacgagcatggctctgtcaagaccatgtccctcgacgcatacgggccactggagatggccgccaagaagcccaaggagcaggtcctgaacgcgcaagctacgccggcgacgaccgctggcgctgacacatatgaccagaaacccgttggtgaaaaacaggctgaaacggccacggcctccgctgccgatgaacaacccgacaaatacgtggaagctctagttcctgacgagaaggcggaggaatttcccgataaatatgtggaagctctagttcctgacgacaaggtggaggtgaagaagaagaaggtaaagaaggaaaagaaggacgagtctgatgattctgatgtagctacgtcttataagaagaaggagaagtctgatgattctgaggtgtctacatcttataagaagaagaagaaatctgacgattctgatgaagatgcatctcttgataagaaagaaaagaaggcgaagtttgcagcatctgacaaaaaagaaaagaaggacaagtctgacaacacatcttccaagaaagaaaaggaggagagatccgccgattccgatgcatctgcgtatttcgacaaggaagagcagaaatccggcgattctgacgccgccacgtctgttgagaagcaaaagaagcagaagaaggagaaatccggtgattatttcgacaaggaaaaggaggagaaccccgaggaggacgctgcgcccgtcgacgtctccgcggacggcgtgtatgtgcctctcaagaaggagaaatccggcgaagacgccacgccggtcgacgtctccaccaccaccggcaaatacgtatcttcttcttccaaggcaaacggcaagcccacgggaggtcagcccgcagagagctccaccaccgccaccgcggatgcgtacgcgtctccaaagcagaaagtcgtcagcagccagcccatggccagcgccgctcctgacgagcttccgctggcggccaagagctccaccacctccgacgcgtacgcatctccaaggcagcagcaggtcgccagcagccagcccatgtctggtggcgctcccgacgagcttccaccggtggccaagacctctgccacgcccgaaccgtacgcatctctgaacgtcgccggcggcgggcagcccaacgagccggcggcggggaggccgccgaagctgtcgatggagacgttctcggggatgatcaagaggccgttcgccaagttcctgagcccggtgatcaagagcgtgtgcgccaagacggagtacccggaggactgcgagtcgtcgatcgggggcctcccgggggccgcgtcggcggcggccacggacagcgtgggcgtgctgaagctggccatggaggcggtgcggcagaaggccatcgaggcgatgaacgcggccacggacaggatgaacgcgccgggcacggacccgacgaccaaggaggcgctcgactcgtgcacgtcgtcgtacagcgacatcaagacgagcctggagacggtggacgacgcgctcaagcgcggcgacgtcgacacggcgcacaccaacctcgactcggtggagacggacatcaccacctgcgacgacggcttccaggagcgcggcaccccgtcagtcatgaccgaccacgaccaggagctccagaagctcgccagcaacctcctctccatcggcgccgccatccaccactagaaagagaggagggaggtgcggcgtccacacacgcatgcatgcatgcatgcatgcattgcgtttgcgtctcaagagttcacttgtaaatttgtaatcgaggaagaaaagcacctctcgatcgattaacatgtctagctgctacgatcctgtgattcgacgatgttaattaatcggcagctttcatta

SEQ ID NO: 109803 - DNA, 3386 bp, Zea Mays
atggcatcatgcggcggcggtgtctgtctcaagagagatcgacgagaggaggaggagaacgacgacgacaagggcgagacgagcggccgcaacaagagaccaagctccggcgcttattacacgggcgcgggagtcgatgctcagagaacggatgacgacgacagcgccgccgccgattacatgtacgagtacgacgacggctacgaggaagaagaatccgctgctgagcaacccaagggcgacgacgcctcggcgcgcgacacggagcagaggtacgccgtgctgaccgaggacgacgtccgcgcgcggcaagaggcggacacggccagggtcgcggaggtgctgtcgatcccggcgggcttcgcgcgcgcgctgctgcgccacttcaagtggcgcgtcgggcgggcgcaggaggagtggttctcggacgcccagcaccagcagcgcgtccgcggcgccgtcggcctagtccccgcggcttgtccggacggcgacgccctggtccccgccgcgcgcagcccgcggccgcgggtgtgcggcatctgcttcgacgcgtttcccgcgggcgggacgcggtcggccgggtgcgccgcccactactactgcgacggctgctggtgcggctacgtcgcggcggcggtaggcgacggcgcgcgctgcctggcgctgcggtgccccgacccgtcgtgcgcggcggccgtcgtccgggagctggtcgacgaggtggcgcgcgacgacgaccgggcccggtacgcgcggttctggctccgctcctacgtggaggagagcgggggccggatcaggtggtgcggcggcgccggctgcacccggtccgtggagctcctcggcggctgcgacgcggaggccgtggcctccgcggtcgacgtcgtctgcgggtgcaggcacgccttctgctggcgctgcggcgaggaggcgcaccggcccgtgtcgtgcggcacggtgcgcgcgtggctggccaagaacgcgtccgactcggagacggccaactgggtggtggccaacaccaagcgctgccccatgtgccgccgccccatcgagaagaaccacggctgcaaccacatgacgtgcggcgcgccctgccaccaccagttctgctggctctgcctcgacccctgggaccaccacaggggctgcacgcgctacgactcccgccgccgccgccgccatgggccggtcgacgaggtggaggacgaggaggagcaggcgcagcggaccctggccaaggcgtcgctggacaggtacctgtaccactacgagcggtgggagggcaacggcaagtcgctgcgcaaggcgctcgcggacgcggacgagctggagcggtcggagctccagcggatggccaggctgctcgacctcccggcgatggacctcggcttcgtgaccgaggcctaccgccagatcgccgacggccgccgcgtgctgcggtgggcgcacgcctacgactacttcctgtccctggacccggagcgcgacgcggccaagcgcggcctgttcgacgacctgcagagccaggccaaccgctggctcgagtgcctgcacggctgcgccgagctggagaggaagcacctcttcggcgctgccgacgccgacgccgaggacgagcccaccgtcgccgccgccgcgttcatggcgtacaaggagaggctcgccaacctcaccggagtcacgcgcaggttcatcgggaacctcgtcagagcgttcaagaccaacctgccggaagtggtggtgacgctgacgccgccggcatccgacttgcaacacatagtgaagagtggaccaacgacggagagacaaacaacggttggcattggaggcatcctttctacagaagcaactgtgacactacctgtttccaacgtgtcttctttacaagggacatcagcactgcgaccttcatcgtcgtctctagtagtctcacaggaaacggacattgcaaatgatagcgtgcaagaacgacacagccctacaagaaaccttgcccaggcccagcatccagttcgtcctggcggtcatggcggcttcctcagcaatccatacccgagtttctttggagaggctacctcaaccgcgggaccattgcaactctacatgccaaacatggtggtgtcaggtggcacgacatcgacgccctctctcgccttctctctgtctgcgcttggacagcctattacgagcacagctcttggcggctcctttggctcaaacactcgcactgcatggggcaattcagatatggctgctgcgtcgtcctctcagcctgaccgcatgggcatggatcaacaagcaggaaccggttctgccatgaatctgacaattgggctgcatcccaatgcccagcagccaccaccaaaatatgtcaaaatctgggagggtgacttatacgggcaaaggcaagggcagcctgtgtttattagtaaactcgaaagttggggtggaacagtgtccagaaaagttgcagaggattggccagaaactatgcagattgttcgcctcatagcccaggagcatatgaacaagaaatattctgaaagtcaatacgttggaaacacagactttctaatatttcgggctttaaatcagcatgggtttcttggacaactacaagagaggaaactgtgtggtgtgatacagttaccgtcgcaaactctactactttcaatgtatgacaaaacaagccgtatggttggcatgctcttccctaagaacatgctgatgttcaggccagaggccttaactcagccatcaccagtgcagcaggaagaacttatacaccaccaacaacaacaactacagcagcaacagagaaacatacatcgtcttcaacgacaactcatacagaagcagcagcagcaacatatgcagaagctactaccacaacgacttcaataccaagagcagctacatttacagcaacagatgacgcaacaaatacaacagcaacaacaatctctataccagcaacatcaacaaatgcagcatcaacagcaactgtggcaacaaatacaacaacagaagcatcagttgcaacacatggatccccaacaacaacagctgttgtctcagatggtgggtacagaattaggcagtgatgatgacacaagggaagattgggtcacaggggctgggccgcatgcctagggaatcagggagggttaatgagggcttacactcactcacttgagggttaagatgtttcctagtgtttgtcgttaaatcattaactgataacttcaaaaaaataaaccagtcatttgtatagttatacggatggggtaagagtttaaataacaccgttatgttatcgaatagctagtatattgtattgagctgggagctagatttttgcaaactccccatgtttcttc

SEQ ID NO: 109804 - DNA, 253 bp, Zea Mays
caggcagcacggcgggatgctgcccgccgctggggacaaggcttgcatcggcgtgcagtgcttccggacgtcgttcctcatcatcacggccgccacggtgggcggtgcgctcgtgtcgctagtgctcgtgtggaggaccagagacttctacaggggtgacatatacgctaagtttagggacggagtggtggagtcgtcggcggagcagcggcggagcgaggagggtagtggaggtagagtgaacggagatcaa

SEQ ID NO: 109805 - DNA, 1593 bp, Zea Mays
atggtgttcgcgttcgtggccggcagccgggtggcggcagcagaggcgctgacgacggcgcggttcgcccgccaggtgctctccgggcgatggttcacgctgctggcgtgcctgctgatcctgtcggcgtcgggcgccacgtacgcgttcggcatctactcccgggcgctcaagtcggcgctgggctacgaccagcgcgccgtggccacgctcgccttcttcaaggacctgggcagcaacgtgggcgtcccagcggggctgctcagcgaggtggccccgccgtgggcggtgctcgccgccggggccgccatgaacctcgcgggctacctcatggtctacctctccctcgccggccgcgtcgccgccccggccccgccgccgctctggctcatgtgcgcctacgtctgcgtcggcgccaactcgcaggccttcgccggcaccgccgctctggtgacgtgcgtccggaacttccccgaggcccgcggcgccgtgctcggcctgctcaagggctacgtcggcctcagcagcgccatcctcgcgcagatctacctcgccctctacggcggcggcgccgacgcccgctcgctcgtcctgctcatcgcctggctccccgctgccgtctccgtcgtgttcctcggcaccgtccgcgtcatgccgccgccgaatggccggaccaggaggagcacgagccgcggcggagtaggcgacgtgttcctctgcttgctctacatctctgtcgcgctcgccgcgtacatcctcgtcatgatcatcgtacagaggcaggccagcttctcgcgcgccgcctacgccgcgtcggcagccgggctcctcgtccttctcttcctgcccctcgccgttgtcgtcaggcaggagtaccggatcaaacatgagctcgagggctccccgagtgtcgacgcacccttgcccgtgatggtgacggtcgttgagaaatccatcgccatgccattggtagagccggcgatcactactagcgatacgccaccgtcttcctcttgcttagtaggaataagatccttcttgcggcacgcgttcagccctccggcgcacggcgaggactactccatcccgcaggcgctggtgagcgtggacatgctggttctgttcctggctatcgcctgcggcgctggcggcacgctgacggcgatcgacaacatggggcagatcgggcagtcgctggactacccgcccaagagcgtggacgccttcgtctccctcatcagcgtctggaactacgccggccgcgtcaccgccgggtacggctccgaggcgctcctgtcgcgctacaggttcccgcggccgctggcgctcacgctcgtcctcctcgcgtcctgcgccggccacctgctcatcgccctgggcgtcccgcgcgcgctctatgcggcgtcggtcctcatcggcttctgcttcggcgcgcagtggccgctgctgtacgccgtcatctccgagctgttcgggctcaggcgctaccccacgctttacaacttgggcgccgtcgccagccccgtcggcgcctacgtgctcaacgtgcgcgtcgcgggccggctctacgacgccgaggccgccaggtgttag

SEQ ID NO: 109806 - DNA, 771 bp, Zea Mays
gcaacggagctggagacgatccgtgatcagctcaacatccccctggtactcgctgtcggccctctccacaagctttcttccgagagcacggggagtagcctactgaaccaggactacggctgcattgagtggctggagacgcagccgtctggatctgtgctgtacgtcagcttcgggagcctggcatccatggactccagggagttcttggaggtggcttcgggtttggcgaacagtggccttccttttctatgggtggttcggccagacgtagtagtggtagtgcagggtttggacggtccagattttccaaacggcttcgaggctgcagtggagggcagaggaaaggtggtccgatgggcgccgcagcagcaggtgctggcgcaccgggcggtgggtgggttttggactcactgcggatggaattcgacgctggagagcatcagcgagggcgttccgatgatatgcaggccctgcttcgcggatcagatgatgaacgcgaggtacgtggaggaagcctggggtgtagggtttgcgctggaaggcgagctggaaagaggcaagattgttagggctatcaggaagctaatgaaggagagggagggtgatgcgatgagggaaagagccatggagctcaagaacagaatggaagacggcttcaagattggtgggtcttctcacaatgccatagacaagatggtcagctactttctttctatgtgagccttcttttcgggaatatgctgtgttacttcgaagaagttcttagcc

SEQ ID NO: 109807 - DNA, 2196 bp, Zea Mays
cagagccacacagcgagcgcgagcgagaggcgcgctgttgcggaaatgccgctcccggcgttcctggcggcggcggcgaggctcgccgtcctgctggccgccgccgtgactgcggccaacgcggtctccttcgcgcgctaccggcgccgccacctccgccgcatccccaaccccatcgacgagtccgccgaccccgtcgccgacttccgcgccctccgccccgcctcggccgaggacgccgcagaagatgacagcttcttctttgggctagcgaccgcgccggcacatgtggaggacaggttggaagacgcttggcttcagtttgcggtggagcactcctgcgacgacaaggaggccatgcgcgaccctacgacagcagatgcggtgatggcgtccgctgcaggggacggaggtgctcagttggcttctcgtaggtcgtccagaggggatgatgatagggatggtgatggagagttgaggaagcctcttaagatcgccatggaggcgatgctcagggggtttgaaatgtttgctgagggtggtgagtcaggttctgctgctgctgctggtgacagttgcagccacaacgttgcggcttggcacaatgtcccttgcccgcaagaaaggcttaagttttggtctgatcctgatactgagttgaaacttgctaaggaaactgggatcagtgttttccgcatggggattgattggacgagggtaatgccgaaggaaccaatcgaagacctcgagagctcagtcaattttgcggcgctcgagcggtatagatggatcgtccaaagggttcgtgactatggaatgaaagtgatgcttacgctgtttcaccactcgcttccaccttgggccggagaatatggcgggtggaggatggaaaaaacggtcaagtactttctggactttgtgaggcttgttgttgatcgtgtatcagatttggtggactactgggtggttttcaatgaacctcatgtgtttgtgatgctgacctattgtgccggtgcttggcctggtggtgaccctaatgcaatcgaggtagcgacgtctgctttgccgactggtgtatacaaccaagcattgcattggatggctattgcacatgcggaagcctacgattacatacattcaaaaggcgaaagtaaaaggaagccggtcgttggtgtcgctcatcatgtatcatttacacgaccctatggtctgtttgatgttgccgctgtcacactggctaattcattgacccttttcccttacatcgatagcatatgtgacaaattggattttattggcatcaactactacgggcaggaggtgatatcaggccctggcctaaagctcgtggacaatgatgagtacagcgaatctggtcggggtgtttatcctgacgggctgtttcgtattctgattcggtttaacgaacgatacaagagcttgaatatacctttcgtagttactgaaaatggagtttctgatgagactgatctgatccggaaaccatatattctggagcacctgttagccatttatgctgcaatccttatgggtgtgcctgtgcttggttatctattctggacaacgtcagataattgggaatgggcagatggctatggtcctaagtttgggcttgtggctgttgatcgtgctaacaacatagcacggaaacctaggccatcatactatttgttctctaagattgttacaactgggaaaatcacaagacatgacaggttggctgcttggagggagctgcaacaggcagcgtttcagaagaaaacacgcccgttttttagggcagtagataaacatggccggatgtatgcagggggtctggatcggcctatccagagatcattcatattgcgggattggcgatttggtcattatgaaatggaaggcttgcaggatcctttcagccgatttataacatccattatttcaacaattttgtggaagaagaagatcagttacattgaggatgaggatatttcttattctctttcttgttgatgcttcttactctaggtgttatgtctaagagaatttgaggtcccatttttttttactttcactgtatatggcctgtataaaattgtttgcccttatttttatatgtaagtagcatgattcgtcctctagacaaagtaaatataaagttctagaaagtaaaagtttctctttatggataaa

SEQ ID NO: 109808 - DNA, 1422 bp, Zea Mays
agaagcacacaagctagcaattgaaaaaaaaaacaggcaaggaaaatggctccgaccgccgccaaggacagtggctccgccgatcgctggcgcgaggtgcaggcgttcgaggacagcaagctgggtgtgaagggcctggtcgactccggcgtcaagtccatcccggccatgttccaccacccgccggagtccctcaaggatgtcatttctccaccagctctgccctcctccgacgatgcgccggccatcccagtggtggacctgtccgtggcgcggcgcgaggatctggtggcccaggtgaagcacgcggccgggacggtgggcttcttctgggtggtgaaccacggcgtgccggaggagctgatggccagcatgctcagcggggtgcgccagttcaacgagggctctctggaggccaagcaggcgctctactcacgggaccccgctcgcaacgtgcgcttcgcttccaacttcgacctcttcgagtccgcggcggccgactggcgcgacacgctctactgcaagattgcgccggatccggcgccgcgggagctcgtgccggagcctctccggaacgtgatgatggaatacggcgaggaactgacgaagctggcgcggtccatgttcgagctgctgtcggagtccctcggcatgcccagcgaccacctgcacaagatggagtgcatgcagcagctccacatcgtgtgccagtactacccgccatgcccggagccgcacctcaccatcggcgtcaggaagcactcggacaccggtttcttcaccatcctcctgcaggacggcatgggcggcctgcaggtgctagtcgatcgcggaggcggccgccagacgtgggtggacgtcactccccgacctggggcactcatggtcaacatgggcagctttcttcagcttgtgacgaatgaccggtacaagagcgtggatcaccgggtgccggctaacaagagcagtgacacggcgagggtctcggtagctgccttcttcaaccccgacgagaagagaaccgagaggctgtatggccccattccagaccccagcaagcctccgctgtacaggagcgtcacgttcccggacttcatcgccaagttcaacagcatcggactggacggtcgcgtgctcgaccacttccggttggaggacgacggccctactcgtcttgctgctcctgcacaccacgtctagtcttgttttcgttcgatcgaacaaacagttctcgtcgtcgtctcttttatttttcctgcaatctgaatttcgagttctccaaataaataagggtatccattcccttcatccgcagagcgcgcggatgccttcactagcagctctagttttgctatgtatatagctgtgtgtgtggtacctttgtgactcatatattatgcaataaagtatgctttctcctcg

SEQ ID NO: 109809 - DNA, 1599 bp, Zea Mays
atgcagacgacgaacttctgcagcgaggtcctggcgcaggagtcgcgtctccatcgtcccggcccgtcgtctctgctctccaccaccaacgacgacggcgagacgccgctgctcgtcgccgtgaagagcggccgtgtctctctggcccttcatctgctcgaccagcactactcgaggcataatctgctggtggagcatcttcttaagcaagacactggcaaatgcaacgttctgcaccacgcgatccgcaacggctacgtggacctggcgctggaactgatccaccggcagccggcgctctcggagtcctgcaacgcgcgcgacgagtcacccatgttcatcgcggttctcaaaggtttcaggagcatctacatggagctgctgcgcaacgagaggtcggaatacggcggggccaggggatacaacgctctgcacgctgctgtcaagtatggaaaccaagatttcgttgaacagcttgtggagcagcatcccgagaaggccaaagagctggcgagacaagcggacactcagcacgacactccagtgcagctcgccgcgcatttcaacagggatacgattctaacgctgatgctgagaggtgatcggtccttggggtatcgggtgcacacggaacactccacgcctcttctctacatcgccgcaaaccgaggccacgtagcttttgctcgagcgcttctggagcactgtccagatgcgccctacaagaacgaccggagcaggacatgtctccacgaagctgtagaacaggaccggacggagttcgtcaggttcatcctcgacgacaactccaagcttcggaaactcgtcaacatggtagatgacgtcggtgacactgctctgcatctcgcggttcagaagagcaatccgaggatggtccgtgctttgctgcgtcaccctgacatcgacctcactgtcatcaacaacagggttaacacggcgatctggaacatgtacaatgatggggacgaagtcaagactataaactggaacaaaatctacttgctcatacggaacgcagatcgtagagctaaaaatgacatctacaatttccgagaggagatcaggaacaaagtcaactatgcaacaagaaaagatgccaagtctctgattcaaacatatacgaccaacacgtccttagtggctatcctcttagcgacaattaccttcgctgcagctttcacattgccaggagggtacagcagtgatgctggaagcgaggggctccccatcatggctaggaaggtcgccttccaagcgttcttgatcttcgacacgtcggcgatgtgcgcctccctcgccgtcgccttcatatgcgtcatagtgaggtggatggactttgagttcttgctgcactacaggtccgtcacgacgaagttcatgtggttcgcatacatggcaaccaccctagcgtttgcgactggtttgtacacagtcctggaagatcgtcttccttggctggccattgcgatctgcgtcctgtctgtgttgctgcccatccttacgatgatggtcggtggatggcccatattgaagctcagaattcaatacggtaattctgatttccttgacatggtctag

SEQ ID NO: 109810 - DNA, 315 bp, Zea Mays
atggtcgccttcgccctggtggccttgcttctggcacacccgttctcgctcctcatcctcctgggcctcctctccattgttatggagaaacaattaaaatttataatatggcccccaaacagccctgttgatccttccattgatgctggtgatggcgaatccagactcctccatctccgcatacacacaggatcagatctcaaggtcaagggcgacattggaacaaaacaacagaggaggcagaaacaaaaacttgctgagaaggaaatgagcccgaacacaactatggcggcgtcttcgcatagggttgcgtag

SEQ ID NO: 109811 - DNA, 300 bp, Zea Mays
atggacgccggcggtgctgttggtggcaattcagagcagctcttggttgaagcacatgggaacacacggacacttattttgaataggccaaagcagctgaatgctctctcttatgcaatgattaagaggctcctgaggtgtttcactgcttacgtgaaagatgatggagttaaattattgattataaagccaccaagcaaccaggaccgccacagaattaaaccctttccccggccagttggttgtcgaccctattctcagcctagctccatccaccacaattggaaaaactcaacttga

SEQ ID NO: 109812 - DNA, 2681 bp, Zea Mays
atggccggctctggagagtcgtcggcgatggtaggagatggcgttcgtcttgatccagagacagagggagtagttgatggtaactcactggtcacaccacctcctgctctactgggtcctgtgatcgacgagatgagcataggggaagaaggagaacaaagggttcgacctcctatgtccaatattagctccagggagatggatacgcctcaaatactgcattcacatgaaaaaaacattgatccaactatagtgccaacggtagggatgactttcaaggatgttgatgatgcatataaattctataaaaggtatgcatatgaagttggatttccattgaagaaatacagagagaagacattcagtaagtggataaattgttcacgtgaagctgcaaaaattgaactggtaaacttggagcataaccatgagttcataactgacgaagcagagaaacaacatttacgttgcaacaaaagtagggatgctgagttcataaattttgttgatgcaatgcatgatagccgagtgccgcaacattgcatagttgattttatatcagaaatgcatgatgggccggagaacgtaccggtaactgctcaagatctgaaaaacatgagggcagcaaggagaagagaaaactgcgcaaatgatgtagccaaacttttggctttctttacataatgcaagaaactggatccacaatttttttgtgatttccagctagacaatgatgggaaaatagtgagtatttttttgtcacacgcaagtatgcagggggaatatgcagattatggtgatgttgtgacatttgatacaacacacaagacaaatatatatgataaaccactgtgcatgtttgttggagctaacagccatctgcagtgtacagtgtttggatttgttttgttgggagatgaaacagtacagacttttgaataggctttcaattcattcaaaacatgtatgggatgcgagggtccgagagttatgcttacagatcaagatcctgcaatgccaattgctctaagaactgtatttccaaaaacagttcacagactgtgtttatggcatgtccagaacagatttatgccattcctaaatgagatatatgcaaggtttgttgttaaggattttaaaacaacatttcagtctattatacatcatccattaactcctcatgagtttgaatgtgcctgggaaatgatgctagaggagttcaatcttcatgaagatatgactctacgcaaattatatgaaatgagaaaagaatggatacctgtattttttaaaaacgacttctgtggggtaatggtatctacacaacgaagtgagagcatgaacagattagtgaagcaatcacatgtagatgtgaacaccccactgcatgagttcgctaaacaaatgatgaaaatgttgcacaacaggaaaatgaaagaatcaaagaaggcattggtgagcaagggaccaaggacaacagatacaatgtataggttcgaagtgagagtctctagagcatacaccagagctgttatgaatagatttgaggactcaatgaaatacgccactgcatacaaaatattaaaggacgcagacggttgtgataaagattggatcgtacaacatacaaaaaggtctaataaaattgtgtggggacaacatcaattcaagataacagcggacatagaagctggggagtatacatgcgagtgcaaacagtgggaacatacaggtctattgtgtgttcatcttttaagagccttcatgcatcttcaagttgaaaagataccttcaaagtatatattgcaaaggtacactgtctcatcaagaaaagatgtaccgtttgaaagaattgataagagcttcaggagaaaggatggagttactaaatcatacagacagaaaatgttgttaacgaaaacaatgaaagtagttcgccagacgtgtatgtcaaaagcaaggtacgacaaggcgatggatgtgttgtatgagctcgatggcgttctttgccgattagagccagatattggatgtaatgagtcaacagatgttagtaatgatgaggaagacaaggaaggagaattgaataaaaataatgctggcgatgggatggaagatgacaatacaattacatgccataaaatggatgagcataacaccatgactggatgtgaacatgcgttaacattaataacaactggtaaccaggaggacaacatgagaattccacctgaggttggtgatacaagttctccgtgtcacgtagcacatgaacaaatggaacatattgctgcatcctcagaagctaaaaaggggttgaattttaatgtggatgttataaatctgagtatgccggatcgtgcaagaccaaaaggacggacaataaaaaattcagaagataggattatgagactaggtgcgaaaggagaaaaaaagaagaataggagatgccaattgtgtggtatagcagatggacataacagcagaacgtgtctgtctgtggaagagaacagggcaaggctagcaaaactggctaatcgaaagagaggacgaccagccggatcaagactaaataataaaacaactgctccacagtggaatgaaacatcgactgctaaaaacatcgtattgatgaagaagtggaaaatgttgaagtcgatgagcatattaaattgggcgaa

SEQ ID NO: 109813 - DNA, 100 bp, Zea Mays
caaagtccttgacaaagtttgcatagaggttcgtcgtcagcggttcagccctgagtgtactgtctctctatacaggtgtcattacacaacacatatctcc

SEQ ID NO: 109814 - DNA, 872 bp, Zea Mays
aacaatatcttgtaagacatcccctaaaatagagtatggcttccggagcctctaaaactggaggaggcctgtacgtccgctaaacctctttgtggacctcgtgccgtctcccccggtgtcctttggtgaagtggagcaggggcagaaggtgactacgacgacgaagaggtgaagatggccatgcgcgtgctgcatcaatctcctcggagcccggcagcaagaccacaacgacggctaggtggagtagctggcgaatgcggtgatgtggacgaccccgacgtagaccacgcgcatggagtcgacgctctcaacggcgaccttagatgtggcgccgcgtcgcgtcgcgggcatgagcagccagctcaccggcggtgatctaggccacccgcttcactctttgaggacgacgcaggacacatgtttgatgaaatgccgagccaacgtccagtaaaatgatcgttcttgttttatttgttcatttttaaggaattgctaattcaggtctgttacttgataatgacgtgttgaagccaaacctttgtttaattagtagtagttgtttagtaaaataatttattctgttaattaagttggtatattaaagaggatgagatatagaggatgaattttagggacgctgctggagacgatgaagatatagagaatggaatcttttaaagtgtgctgtaaaggacagagaatattattttagaggatgaaatttaggggttattgctggagacagccttagcaagagcatcctgtatattttgagttttgtgtttatagtggactagccgatccaagtggatgcttttagttggttcattttaatttaattaataaatagcataaccatatcccaatttatc

SEQ ID NO: 109815 - DNA, 1051 bp, Zea Mays
cacagtcgatcactcgttctcatcccttctctgatcgtttacgtggcatgctcatctcctcacgccgacgtccaggttcacaactgtcccattcgttatctcctctgcctagatattctctgattccagccatcgtacgcgccaccaggttcttccatcgccacagcacctctacgttgtctctgtgtctcggtcgagtccgtgctcctctgctcggcgtcttccctactcgccggtggagcttctttggcgcgtgcctcccctgcgcatccatctccttcctcagcccgtctctctccctgtccccagtcagcgcgctcgaattcctccatgcgcacgcgccggatcccagctcgcgaagctctctgctcggtcgtctcccttctcccgaagcttttccccatggtagctagcccctgctcctccgtgccgcggctcccagtttctccctggagctcgcccaagtcgccgtcgtcttcgagctccacctccatggcgtcgattgcccccgtcctgctcccctgcgcgctggtcggcgtcctcctctgccgcagagctcccatcgccgcgcgcgctaattttctctgctcgacagcgctcctctctgcgtcctgccgagctcgccctcggcttcttgtaccaagcaagcccggtagccagttccctctcccagccgaggtcctttcctttcagtagataagcacgccgttcctccctgcagctcctctgggcagccacgttcttccaccggccatcagttgccgctgaaccactgtcagattaattttcagtttcacttgcgtggctctctagagataagctcttcatcggctgtcactcccaatcttcggttcaccgattggctgtcgactttgttgatcctttccgtgtcaaaccagcaagcttcgccaccatcactcaactgctcgctcacgtgtgctcgtaaattttcttggtcgtgtctgctgagctgaccaatggtccagctcgccgttatcgccaagtcccacgcaactgtgctgtctctcgtcgtcattcattcctatttttt

SEQ ID NO: 109816 - DNA, 1552 bp, Zea Mays
cacagtcgatcactcgttctcatcccttctctgatcgtttacgtggcatgctcatctcctcacgccgacgtccaggttcacaactgtcccattcgttatctcctctgcctagatattctctgattccagccatcgtacgcgccaccaggttcttccatcgccacagcacctctacgttgtctctgtgtctcggtcgagtccgtgctcctctgctcggcgtcttccctactcgccggtggagcttctttggcgcgtgcctcccctgcgcatccatctccttcctcagcccgtctctctccctgtccccagtcagcgcgctcgaattcctccatgcgcacgcgccggatcccagctcgcgaagctctctgctcggtcgtctcccttctcccgaagcttttccccatggtagctagcccctgctcctccgtgccgcggctcccagtttctccctggagctcgcccaagtcgccgtcgtcttcgagctccacctccatggcgtcgattgcccccgtcctgctcccctgcgcgctggtcggcgtcctcctctgccgcagagctcccatcgccgcgcgcgctaattttctctgctcgacagcgctcctctctgcgtcctgccgagctcgccctcggcttcttgtaccaagcaagcccggtagccagttccctctcccagccgaggtcctttcctttcagtagataagcacgccgttcctccctgcagctcctctgggcagccacgttcttccaccggccatcagttaccgctgaaccactgtcagattaattttcagtttcacttgcgtggctctctagagataagctcttcatcggctgtcactcccaatcttcggttcaccgattggctgtcgactttgttgatcctttccgtgtcaaaccagcaagcttcgccaccatcactcaactgctcgctcacgtgtgctcgtaaattttcttggtcgtgtctgctgagctgaccaatggtccagctcgccgttatcgccaagtcccacgcaactgtgctgtttctcgtcgtcattcattcctattttttcaccgccatatgtcgcctcgccttgatgcgtgtcgtcatctttaatcccagtaactcttccgatacgcgtctcgtcgtgtttcgcctcctcttggtcagccccatctaggtcatgggggcggaagatctcaacactacttcatatggctgttttagatgctgtttacggggtagagagagttgttgtgatagatggttttcgccctctcgtcatgttcgcaatcctcgtcgatcgtcgctggtttgagagaaatcaccggaaggtatggagaagaaagtgaagccgcaccacaacgtcagatgttcaacgacaagctcgagccaggatttatcagcatactcgcaagtattgagtcacgtttgatgctggtaagctagatttatttgtttagtaattttagtgttttgccggtaggcgctatcggcattttatgcgaggaattttagttgtggaatgaagtcagtgctatgcattcatgtgcattatgcaaatcatttagg

SEQ ID NO: 109817 - DNA, 216 bp, Zea Mays
gcgagcggcgtcacgaaaggcgtgagatgcgcgcagcgatgatcgcgcgtgacatcctccgatccggcgcagtttgggcggcccgagtgatgacctacatttgtgcttgtgtcatcgacgacgtcctccggccactacttccttcgattcatgttttcttttcgattattgtgttttatgcctaccacatgtattatttacactaaaaactgtacg

SEQ ID NO: 109818 - DNA, 1734 bp, Zea Mays
atggatgaattcgagatgctactgcaggcggccatcaaaggcagagcccaagaactggagcagctggtgcaagacaagccggaggtgctataccaaacaactgaagcagggaacacctgcctccacatcgccgctctctgcggccacggggatttctgcagcaaggtcctcgccctccgcctgacgcaggagccgagtctcccgtcgtctctgctctccaccgccaacgtcgacggggagacgccgctgctcgtcgccgtgaagagcggccgcgtctccctggctcttgacctgctcgagcagcactcgaggcacgagctgctggacgagcaccttctgaagcgagacaggcacggatgcaacgtcctgcaccacgccatccgcaacggctacgagggcctcgcgctgcgactgatcggccggcagcctgcgctctcggagtcccgcaacgggcgcggcgagtcgcccatgttcatcgcggttctcaaaggtttcaggagcgtctacatggcgctgctgagcaacgagaggtcgcaatacagcggggccaatggctccaacgccttgcacgctgctgtcaagtacggagaccaagatttcgtagaacaacttgtggacaagcatcccgagaaggccaaagtgctggcgagacaagcggacagtaaaagggacactccaatgcatctcactgcgcatttcaacagggataggattctaacgctgatgctgagatgtgatcggtccttggggtacgagctgcacgaggaacactccacgcctcttctttccgtcgccgcagaccgaggccacgtagcttttgctcgagcgcttctggagcactgtccagatgcgccctaccacgacgagcagggcaggacatgtctccacgaagctgtagacaaggaccgggcggagtttgttgagttcatccttgacgacaactccaagctccggaaacttgtcaacatgctagatagcgttgatgacagtgctctgcatctcgcggttcagaagaacaacccgaggatggtccgtgctttgctggatcaccctgacatcgacatcaccgttgtcaaccagcgtaattgcacagcgatctggaatctgtaccatgatggggactacgtcaagactataaactggaacaaaatctgctgcctcatactgaatgcagatcgtagagctgaaactgacatctacaatttccaagaggagatcaggaacaaagtaatcgatacaacaaggaaagatgccaagtctctgatccaaacatacacaagcaacacgtccttagtggctatcctcatagcgacgattaccttcgctgcggctttcacattgccaggagggtacagcagtgatgctggaagcgaggggctcccaatcatggctaggaaggtcgcgttccaggcgttcttgatcttcgacacctcggcgatgtgcgcctccctcgtcgttgccttcatatgcgtcatagcaaggtggatggactttgagttcttgctgcactacaggtccgtcacgacgaagctcatgtggttcgcgtacatggcaaccacccttgcatttgcgactggtctgtacacggttctggaagatcgccttccttggctggccattgcgatctgcgttctgtccgtgctgctgcccgttcttacgatgctggtcggcaaatggcccatattgaagctcagaattcgatacggcaggtctgatttccttgacatggtctag

SEQ ID NO: 109819 - DNA, 2196 bp, Zea Mays
atgtcatcactcctgttgcgagtgctgctcatccagcttgcagcagtggagtgcctctccgccgcgattccaggctgcctaacgcaatgtggaggcgtagagataccctatccattcggcgtcggcaccaactgctcccgcaaagggttccggatcaagtgcatcaacggcagcgcgggcgaggagattccagtgctgctacctactacgcgctaccagaacatccgggtgctgaacctgtccgtgtcgccgttgccggaggctcgagtgcttcttccggtggcatggcagtgcttcaacgccaccgggggcgtcactgggatctactcgggagatgtggacttcaacccagagggcgtataccgcatctccaacacacagaacgagctcttcgtcctcggctgcgacacctatgcgttcaccaaaggcgtgagggtgcacaacgttaacgcacgcttcccttacagatacttcacggggtgtatcaccgtcagtgtagacgacaaggacccgcgcgacggtgcctgcgcgggcctcggctgctgccgcgtcgacatcccgccaggcatcacggacaccagcatgaccttctcgtctacctggacgcgtgccaaccagaccttctgcccctgcgactacgccttcatcgtggagaagggcaactacaccttcaaggcatccgaccttgtgtcgcacacacccgacaaccgtctgcctttggactggtggaccatgccactgcgtctcgactgggccatccgcgacaacaacggcgactccatgacttccatctcctgcgcccaggcacccaacgaacctgactatggctgccgcagcaagcatagcgagtgcactaattcaaccaatggccctggctacttctgcaagtgtgcccatggctacgacggaaacccctatgtccagagtgatggtgaatgcacgaatatcaacgagtgccaagatccaaagtcacataattgttcaagtggcagcaaatgcattgacacagacggaggctattattgtcaatgcaatttcttccgaagagggcagcaatgtgatcccttaattcctatggctgccgttgcactgttaacaacatttgctgccgtcgtccttggatgtgtcgcaattgttttgcttcagactctaaacaacaggaaaagattcaacagaaatggaggtaaactactgaatgcccagggcataaccacctacaccaaaagggagctgaagaagataactaatggctacagcaaacgccttggaggagggcactttggcaatgtttacgagggcaccatcgtcgacggcagaaaggtcgccgtcaaatgtcctttgcggacaagggtgtcgtcgcaccgctgccattggaagaatttgattcgacctcgccgtgtaccgctaccgcaacagagggtggaggaagatgggtcgttcatgaacgagatcaggttccagttcgaagtcagtcgtcacaagaacttggtccagctcctgggatgctgcctagagaccgacattccgatcctagtcttcgagtttgtcgccaatggaagcctggaggacatacttcatagtgccaagaaaccatgtaccctctcgctgccggagcggctggacatcgccattggctccgcggaagctatcgcctacatgcactcccttgacaatcaaaagcgtgtccatggagacatcaagccttccaacatcctccttgacgatgacctcaatccaaaagtctctgactttggttcctccaagctcctggcaatccatagctactacgttagggcagtggctgcagatataggctacatggacccattatatatgaagaccgagcacttcacattggagtgcgatgtctacagcttcggcgtggtgcttctggagctcatcacgaggagaagggccagctggtatgaacaagatcaccaagggaacaagatcctccccatcgagttcgtcaagtgcttcaaggaccacggtagcggatgtgcgatgtatgatagcagacttgatttctcagctggcgaggatgctcaatctcgatgcaacaagcgttgcctcgacatgattggcatgttggccgtccgatgcctcaaggaagacaagagggagaggccaaccatggcagaggttgtcgaggagcttaagcgagtgaaggtactactgctgggtacacatatataa

SEQ ID NO: 109820 - DNA, 86 bp, Zea Mays
ttatcatgatattatatgttcttgttgcaacgcacgagcacacacctagtcacaacaagatgggcgaaacgaacggcgtccgccat

SEQ ID NO: 109821 - DNA, 1391 bp, Zea Mays
gacagtatatataaaccactgggcctcaactagttgagcataaaatcacccacacacccagcccagcagccagcaccgatcgagtcatccttaattaccgtaataatatgaaggccgccatgattgttgttgaagtagtactggcgctactgctgtcctatggggcgggacatgccgactgcgcaacgacgaccatcccccagaacagcaacagcacggccgacatgctttccctgctcgacttcagaaagacaatcagcagtgatccaggaggtttcctcacatcctggaacactaataacagtagcgccgccgactactgcggctggaatggcgttacatgcagcagaaagcacccagggcgggtcattgaactcaacctcagcagccaaagcttgcaaggccgaatctcttcatctctcggtaacctaaccttccttcgaatactggacctgtcctccaacatgctagctgggccaataccgcctaatatcggttccctctttcaccttaaaattctctaccttgattctaacaacttcactggagccatcccgtccagcctgggcaacatctccaagctagaacagctcgtgctccaggataatcagctcataggcaccatacctcaagatcttggcaatttatcaaatgtgaatagattgttgctagcacataatatgctatcaggtagcatcccgacaatcattctgaaccaacgtaaccttatgattctggacctgggtgcgaattatctacgtatgatgttgccatctaatattggccatacccttcctcaaatcggcgcgctttccctgtacaataacatgttctacggtccaatcccagcatcgctaggaaacgcttcaattctcgtgatattagacttgacagctaacagtttcactggacatgtacctagttctttgggaaatctaacctacctgtacttcctgcaactagaacagaacaacctcgaagcaaatgataatgagggatgggaattcatagatgcattgggcaaatgtatgtacttgcaacacctcttattatctagcaatcagctacaaggagccataccttagtaaccaagttcccggatcattgggatcgagaaatggaaacgtggtacacggtacacactactaaaattaggatttaacactacggaaacgagattgttcccatgttcctggagcggaacgaacgtttccgtaatgagtgttagaactatattagggtttatgggatctcccttgtacatttaccatttcacccctctgtttgtaatgggccagacccaactcagtctattaatattcaggcacaccctagtgtagggttagggtttctattattccaacatgatatagagcctggtttctccctcc

SEQ ID NO: 109822 - DNA, 720 bp, Zea Mays
atggcggcggctggcttcaacagttcaagttcaacacgttggttccctgctggcgttattccatcaagtgtcgcctctgcctctgtatcaaatgcagcagcaccacaagctattatcaactcagatgatgtagcttgggctcattgtttttgcccagatgcaaacaagaagcattggctgaagtgcaagtactgtgacaagctatgcaaagctgggattacaagaattaagtggcaccttgctgtccttgtggtgaagcaaaagccaacaaaaggttctagtagccttagctgtagaacagtggtacgtggtggcactattgacagattttataaaccttctactattgaagaatttgttcaaatgatgcataaaggaattaaccttagcaacaaggttcaaacaacattgtcaactcagaaaagagaagagagaagggataaggcttgtgagtacatatgtcagtttttctatgaagctagtattgcacacaacacagtcacccttcctagctttgcacttatgcttgaggccattgggcaatttggtaaaggtttgagagggcctagtccttatgagatgagtggaccattcttgcagaaaaggaaacaaaaggtattggatggtttcaagaaccacaaggaatcatgggagcaaacaggatgtacaatcatgacagatgcatggacagataggaagggtaggggagtgattttttag

SEQ ID NO: 109823 - DNA, 647 bp, Zea Mays
gacttacgtcgtcgctcaggcgaagccaaataatacccgtctgaattcgattgggtctgtcgatagctagctaaatttgtttcgagatttggctactaacaaacacggcgcatgatggttctattctgcggatgatcgatgcaggcgtggagcacgtgggcgggaacatgctcatgctcgatcaagtcacagtggcgacgccatctttatgaagattcgatgtcacatcactacaggaatccggctctttgtcgagtgctcggcgcttcgcaaagatccgtactcggcaaaatcctaccctcggtaacagccacgtttatcgagagcatcggcacaggaagacactcggcaaagaccactttgcccgagtgctaaacactcggcgaatcgagacgctcgtcaaagggccgtcagcaaccgtctatagccgacgaccgttaactttgccgagcgccggcctttggcactcgacacgccaaagaagcttctttgccgagtgtctctagactgacactcggtaaactatgttttgacgagtgtctaccttggacactcgacaaagtatatttttatttatttttcttttctcaatcaaacattttctactatgttcttacactatgtagacttacatatttcattttggc

SEQ ID NO: 109824 - DNA, 267 bp, Zea Mays
atgacgtcaacaatgcaaaggcagcatatggcggaggctgtgctggacggctgcggcgcgttcgatatggccgccgttcgactacatggagaagaagaaccctcaggtgagccggcagtacaaccaggccatgtcccagatctcggcgctggcctgcgacaagttgctccagctactctcccagcggtgcaccggcttcgacggcgacgcgccatccgcaccgtcgttgacatggtctgcggcaacgcggcaccgtcctgggcatga

SEQ ID NO: 109825 - DNA, 1785 bp, Zea Mays
gataaatatgaagctttcactaaagttgggtataataattggaaagatgcagttgaaaggttgaaatcacatgttggtggtgttaacagtatccacaacaatgctaggttacattttgatgattttaacaaccaaagacaaagcatatcaactatcatgtctagtgccagtcgtgaggctgaagacctttataaaattcgtttgacttcttcattggcttgttccagatttcttttgatgcaaggtttggcttttcgtggtcatgatgaatcatctagttcgctaaataagggaaattttctagaattgatttattggatgaaagataaaattaaataagtgagagatgcttttgagcgtgctccaagaaattgcattatgatatcaccacatattcaaaaagatcttgcaaagtgttgcgctcaacagatcacagagaacatcctaggagaaataggagatagaaacttctctattcttattgatgaatcacgtgatgtttctgttaaagaacaaatggcggtgatattaagatatgtgaataatcaaggccatgtgatggaacggtttcttgcgctcaagcatgtcaaggatactacatcagaagccttgaaggaagctatttttggccttcttgatcaccatggattatctatatccaagatcagggggcaaggatatgatggagcatcgaatatgcgaggtgaatttaatggcttacaaagaaagatatttgatattaatccacatgcctattatgttcattgttttgcacatcaacttcaacttgtggtggtttctattgctagtagtgcttgttgccaatcagttcatgacttctttgagtacatccacttaattgtcaccaccacaagctcatcttgcaagagaagggatgctctaaaagaaaaacaccaccagaatattttagaaaaactagaaaggggtgaaattttatctggtagaggtgtgaatcaagaaactaaccttgctagacctggtgacacaagatggggttcacattatttaacattgcttcgattagagacaatgtgggactcagtattgcatgttcttaccattgtgcatgaagatggccgtgtaccaacacaggcagcggggttgattgaaaaaatggagagcttcaaatttgttttcattttaaaattgatgttgaaaatgcttgcaatcacaaatgagctctctcaaaccttgcaaaggaagaatgccaacattgttcatgctatggagttgcttgatgttgtgaaaacccgaatggctacaatgaggacagatagtggttgggagtcattctttcaaagcgtgaaagaattctgtgctcaaaagggtattcctgtggtagatatggatgaagaagtgcctattagaggccgttcaaggcgagatggcttcacaatcacaaaccttcactactaccgcaccgagatattctttgttgttcttgataaaatcaacactgagttatgccatcgctttaatgaagtttctagcgagttgcttgtttgcttttcttgcctcgatccaaagaacttattttgcggttttgatatagagaaacttgttcgacttggtactctatatgataaggatttttcagttattgaatgtgcaatgttaagagagcaacttgagacatacattgtccacgtgcgaaggcatgctgcttttgattggatttttgttggtgattttggtgccgcactgcagattaagagagaaatttcggtctattctttggtacacacagcacaaataatgatctaa

SEQ ID NO: 109826 - DNA, 1372 bp, Zea Mays
actactagcaaaaccagcaacaacaacacacaatgccatcacgaatgtggaacctcaacaaagccctggtcacctcactactctgcatctcggcgttgtcgtcgtcgccatggccatgcacggcagccggtcagctgggcggcaagcccctggtcaccgccgtcaccaaggacgcgtccacctccctctacacggcgccgctcaaggacggccacccgctcgtcctcgacctcactagcccggtcatctcgctggccacgtgcgccagctcctccaagaacaacaacggcacgctcaccgccacgctatccgccaacgccaccgacggccagaacccgctgttcccggtctccttctcggcggtggccacgtgcgcgccgtcgtccaagctgcccgccggcgccggcgccgtcggcgtcgcggggctcgcgccctcctccagcagccagcagtcgctcccggcgcaggtggcgcgcacgcagaaggtcgccgacaaggtcgcgctgtgcctgcccagcgacggcaggtccacgtcgggcgacagcgtcggcgtggccatcttcggcggcggcccgctgttcttcgtcccgccggaccgcggcgacttcaccacgatgctggccggcacggcgccgctccacgccggagccggagccggtgcccccgggtactacgtctcctccaccggcatcgccgtggagcaggcccgcgtgggcggcccccgcggggcgctcgtcgtggcgctgagctccacggtcccgtacacggcgctccggcccgacgtgtacgctccgttcgtcaaggcgttcgacgcggcggcggccgggcccaacttcccctggatgtccagggtcgccgcggtggcgccgttcgaccggtgctacgactccaccaagctcccgcagagtctgctcggctacgccgtgccgcagatcgacgtgatgctggagggcgggcagaacttcacggtgctcggcggcaactccatggtgcaggtgaacgccaacacggcctgcctcggcttcgtccaggcgcctgggcaagcgccggcggccgtcatcggtgggttccagctggagaaccacctgctgctgctcgacgtggacaagaagcagctcggattcaccactttcctcaacgcaatcgggctttcctgcagcagcttcaatttcactcttgctagctagtgtgctgctgcatgtatacttaactgtaacaacttgtactgccgtgtattacaaataaataaataaagtgggaataaattgattggagtgttccagcttccaacagattgtgccggccagctgttatcgtaatcgatctggttgccactttgaccgtcctatgactcggatctaacgaatctaaa

SEQ ID NO: 109827 - DNA, 2086 bp, Zea Mays
gctcctaacccttctcccctccgacggtctaaaccctgccgccgaaatgctcctccgccctttcctccgccgcggcgccgccgccgccgccgccgcggtatcctctaacggggctcgcgccatagcactccccgacccgcctgccgctctcgcctcccttttactcgcctcccgatcctacgcgaaggccaagggcgggggcaagccggcgtcgtccacgtcaaaccgcggcaaggtccgcgccaaggacccgcgcggggtggcgtcggccgatgatgccgcgggagccgaattctccgccggaggtgggggcgacgacattgacaccgagttcgagctgcccaccgacccgctgccccctacatatgatccagctctcgacgtcggccccggcggccgcccgctcttcgctttcactgacacgttcgggtccttcgcccaccgtgacgcgaacatctatgtcgacttcactttggatgaatggaatgccatgttaccagaagggctgccagcagggatgatgaaagagtttcaggagacaagacggtgtgctgtgatggtgaggaaaagcttcctagatctccgggataacttccgtaggattgttgatccagctgttacaacaaacctcaaagataccagaaaacaaattgtcttggatggcccacggagttgtggtaaaagcattgcacttgcgatgcttgtccattgggcgcgtactgaaggatggctggtattttatgttccacaagggaaggattggactcatggaggattcttttatagaaacacatacagtgattttttcgatacaccagtacaggctgccaatatcttgcagaattttttgaagtacaatgaaacacgtttacaacagttaccatgccaaatttttgagcgtattcccctgggagaaggtgctggtgttggaatgatgaaaggggttgacacaatggaaatgcctgaagggtccacattatatgatctcattcaaactgggataactcaaacacatgcttcagttggtgttatggttcgcttaaggaaggagctgtcccttgttaaagacgtgcctgtactatttgccattgatcagtacaatagctggttcacattcagtgacttccaggaacctgtaactgtccgatcctgtcgatcgatccatgcaaaagagcttacaatggtcaatgcttatagatcaatgctgcacaatgatatgatggtgggggctttttcacactcaacagcagttggcaaactacggcaggagctgccagatgttccttctgatgctcgtttgatctttccacgttacaccttagatgaagctgagactgcatgtcactattatatgaggcaaaagatcattcggcgcgagaatttttcagaagagaaatggaaaaagatatactacttatcaaatggaaatggtgcagagatgagatggcttgctgccttcgtttgaggtagatatactgtccctgaagtttctgatacctggattgtactcagttttggtggtggtgtagaaaggttgccacctctgtttcagcattccgttacacaccacagttcattgttgtgtacttgtagtccgtctcttgacatctctagaagaaagtttggcgtcaacatcatttgtgctgagtagaacttgaggagataaggcataagtatgtggctcagttacatgattatatccttaggcttctttcagttctcgctcagatgctagatacaaaataatgtagcattgttattggagaagttttcacatgttttggctccgccgagcacgatgagtatgatgagttgatgccaatctactcagcatgcttgctactatgttgctgaattgagctccgttgagtattttttttaaattactgtacgaatcgaacaattatttgagttgggaacaatattcttctttgcggaactcaaaggttacgaggcatatcctcagtttgaatagtttagcttacccttgtttcctcagtttgaatagtttagcttacccttgtttctcggagagatgcaacatattgatttagctacattgtctattccggtgtactcctatgcc

SEQ ID NO: 109828 - DNA, 2065 bp, Zea Mays
gctcctaacccttctcccctccgacggtctaaaccctgccgccgaaatgctcctccgccctttcctccgccgcggcgccgccgccgccgccgccgcggtatcctctaacggggctcgcgccatagcactccccgacccgcctgccgctctcgcctcccttttactcgcctcccgatcctacgcgaaggccaagggcgggggcaagccggcgtcgtccacgtcaaaccgcggcaaggtccgcgccaaggacccgcgcggggtggcgtcggccgatgatgccgcgggagccgaattctccgccggaggtgggggcgacgacattgacaccgagttcgagctgcccaccgacccgctgccccctacatatgatccagctctcgacgtcggccccggcggccgcccgctcttcgctttcactgacacgttcgggtccttcgcccaccgtgacgcgaacatctatgtcgacttcactttggatgaatggaatgccatgttaccagaagggctgccagcagggatgatgaaagagtttcaggagacaagacggtgtgctgtgatggtgaggaaaagcttcctagatctccgggataacttccgtaggattgttgatccagctgttacaacaaacctcaaagataccagaaaacaaattgtcttggatggcccacggagttgtggtaaaagcattgcacttgcgatgcttgtccattgggcgcgtactgaaggatggctggtattttatgttccacaagggaaggattggactcatggaggattcttttatagaaacacatacagtgattttttcgatacaccagtacaggctgccaatatcttgcagaattttttgaagtacaatgaaacacgtttacaacagttaccatgccaaatttttgagcgtattcccctgggagaaggtgctggtgttggaatgatgaaaggggttgacacaatggaaatgcctgaagggtccacattatatgatctcattcaaactgggataactcaaacacatgcttcagttggtgttatggttcgcttaaggaaggagctgtcccttgttaaagacgtgcctgtactatttgccattgatcagtacaatagctggttcacattcagtgacttccaggaacctgtaactgtccgatcctgtcgatcgatccatgcaaaagagcttacaatggtcaatgcttatagatcaatgctgcacaatgatatgatggtgggggctttttcacactcaacagcagttggcaaactacggcaggagctgccagatgttccttctgatgctcgtttgatctttccacgttacaccttagatgaagctgagactgcatgtcactattatatgaggcaaaagatcattcggcgcgagaatttttcagaagagaaatggaaaaagatatactacttatcaaatggaaatggtgcagagatgagatggcttgctgccttcgtttgagtttctgatacctggattgtactcagttttggtggtggtgtagaaaggttgccacctctgtttcagcattccgttacacaccacagttcattgttgtgtacttgtagtccgtctcttgacatctctagaagaaagtttggcgtcaacatcatttgtgctgagtagaacttgaggagataaggcataagtatgtggctcagttacatgattatatccttaggcttctttcagttctcgctcagatgctagatacaaaataatgtagcattgttattggagaagttttcacatgttttggctccgccgagcacgatgagtatgatgagttgatgccaatctactcagcatgcttgctactatgttgctgaattgagctccgttgagtattttttttaaattactgtacgaatcgaacaattatttgagttgggaacaatattcttctttgcggaactcaaaggttacgaggcatatcctcagtttgaatagtttagcttacccttgtttcctcagtttgaatagtttagcttacccttgtttctcggagagatgcaacatattgatttagctacattgtctattccggtgtactcctatgcc

SEQ ID NO: 109829 - DNA, 692 bp, Zea Mays
gctcctaacccttctcccctccgacggtctaaaccctgccgccgaaatgctcctccgccctttcctccgccgcggcgccgccgccgccgccgccgcggtatcctctaacggggctcgcgccatagcactccccgacccgcctgccgctctcgcctcccttttactcgcctcccgatcctacgcgaaggccaagggcgggggcaagccggcgtcgtccacgtcaaaccgcggcaaggtccgcgccaaggacccgcgcggggtggcgtcggccgatgatgccgcgggagccgaattctccgccggaggtgggggcgacgacattgacaccgagttcgagctgcccaccgacccgctgccccctacatatgatccagctctcgacgtcggccccggcggccgcccgctcttcgctttcactgacacgttcgggtccttcgcccaccgtgacgcgaacatctatgtcgacttcactttggatgaatggaatgccatgttaccagaagggctgccagcagggatgatgaaagagtttcaggagacaagacggtgtgctgtgatggtgaggaaaagcttcctagatctccgggataacttccgtaggattgttgatccagctgttacaacaaacctcaaaggtgtgtaatgtgttgatttgcctgtgcataatggattctgggatgctcgctgttatt

SEQ ID NO: 109830 - DNA, 3563 bp, Zea Mays
ttttattaaatttgttttgaatttcgggctatgatgtgaatttcgggccctgatgtaaatttcgggcaaaaaactgaatttcgggccaaaaattgaatttcgggctctaatgtgaatttcgggcttttataatttcgggccgtccgaaatgagtctgacatgtttaagcaattacgggtcgggtcgtaggctaggtccgtgggctgggccagcccagcccgaaattcaaatgagctgagccggcccgaaattcaaacaatacgagtcttttcgggcttgggccgggccggatggtccgaatgtacacctatagccatggtttgtactggcgagcaaaaggtaaaaaaaacaagaataatccttttaggatcaaaagtatttttttgaaaagattaaattgcagaaaaaaacggtccggtaccccttgcctgtctctcccagtcgtttcccgggggcgctagattcagatccatgccgcacgcttctccattcctgtaagctcctgcgcctcctcctcgttgcttcactccaaatccaccgaggccaccgcccgggcccgggggaacccctagcgccgccgccggctcgggcgccctctcgcgcgcgcgtgcgtcgctccgacagcagctgcagccatggcgcagccgctcgtcgtgaagaaggacgacgacctcgacgaggaagagtactactcgccattcctgggcatagagaagggcgccgtgctgcaggaggcccgcgtcttccacgaccctcagcttgacgctcgtcgatgctgccaggttatcaccaagctcctgtacctgctcaaccagggtgacacctttaccaaggttgaggctacagaggtcttctttgcaaccaccaagctgttccagtctaaagatgtgggccttaggaggatggtgtacctcatgatcaaggaactctcaccttccgccgatgaggtcatcatagtaacaagctctttgatgaaggacatgaatagcaaaaccgatatgtaccgtgcaaacgctattagagttctttgtcgtattatcgactcaactcttctcacccaaatcgagaggtatttgaagcaagccattgttgacaagaatcctgttgttgccagtgcagcccttgttagtggcatctacttgcttcaaacaagtccggaagttgtaaaaagatggagcaatgaagttcaagaggctgtgcagtcaagagctgctcttgtgcagtttcatgcccttgctctccttcaccaaattagacaaaatgatcggctggctgtcagtaaacttgtcactagcttgaccaggggttcagttcgctctcctttggcccagtgcctacttattcgctacactagccaggtgattagagagtctggtgtgaaccaaggtggagatcgtcctttctttgatttccttgagtcctgtctccggaacaaagctgaaatggtcatacttgaggctgcaagagcaattactgaactgaatggtgtcacaagccgagagcttacacctgcaattactgtgctgcagttgtttttaagttcatccaaacctgttctcagatttgctgctgttcgcacgcttaacaaggttgcatcaactcatcctttggctgtcacaaattgtaacatagacatggagagcttaatctctgatcagaacaggagcattgcaacccttgcgattacaacactgttgaagacaggcaacgaatcaagtgttgatcgtttaatgaaacagatgaccaactttatgtcagacatagctgatgagtttaagattgttgttgttgaagcaataagatctctgtgcttgaagttccctctgaaatatcgctcattgatgaacttcttgagtaatattctacgggaagagggtggattcgagtataagaaagccatagttgattcaattattatactcattagagatattcctgatgcaaaggaaagcggtttatttcacttatgcgaattcatagaagattgtgaattcacctatttgtccactcagatacttcactttttgggaaatgaaggcccaaaaacatcagatcccagtaaatacatacgctatatatacaatagggtgatacttgaaaatgctacagttcgagctagtgcagtcagcacattggcaaagtttggtgccttggttgactcactcaagcctcgcatatttgtgctcctgagacgctgcctgtttgatggtgatgacgaggtgcgcgacagagcaaccctttacctcaaattgttaggtggggaagctacagttggtgagacagagaaggatgtgaatgaatttctcttcggctcacttgatgttccattagtgaacatggagacgagtctgcggaattatgaaccttcggatgtaccttttgatatttcatctgttccgaaggagacaaaatcccaaccccttgcggagaaaaagtctacaggcaagaaatcagcaggtccggcatctgctgtcagtgaccctgtttctacagttgatgcttcgtatgagaagcttctttcgtccattcccgaattcgctgattttggaaagctttttaagtcatctgcacctgtagaattgactgaagctgagactgaatactcagttaatgttgtgaagcatatttttgatggacatgttgtgctccaatacaactgtaccaatacaattcctgaacaattgcttgaacaggttattgtttttgttgatgcttctgaggctgatgaatttttagaagttgcttcgaagcctttagaatcattaccatatgattctcctgggcagacctttgtcgcttttgagaagccagaaggtgtcattgctactggcaagttctcaaatatcctgaaattcattgttaaggaggttgatccatccacgggtgaaactgaagatgatggtgttgaggatgagtaccagcttgaagatcttgaaatagtttctgctgattatatgttgaaggtgggagtatctaacttccgaaatgcctgggaaaacatggatccagagactgagcgagttgatgagtatgggcttggagtaagggagagcttggctgaggctgtaagtgctgttataagcatccttggcatgcagccttgtgaggggactgacgtggtcccaagcaattcaaggtcgcacacttgtctgctctctggtgtgtttattggcaacgtgaaagtcttggtgagactttcatttggaatcagtgcaccgaaggaggtggccatgaagctggcagttagatctgatgatccagagatcagtgacaagatccacgaaattgtcgctaatggctaaaaacaatagtagaatcgttttttttactctttttttgttttgacttgcatgctacgggaagcttgaggggattcaattaattctagtatatgtaagtctggtttccagttgaatccatcatttgtcgcaccatcattcttcctttgacagtgcatcagtttttttttggttgatttggatctgtacaattttccttatgtactgatgcttataatagtatacgcaataatattcaggtacagttttgatggtaaaatgaag

SEQ ID NO: 109831 - DNA, 1210 bp, Zea Mays
ttttattaaatttgttttgaatttcgggctatgatgtgaatttcgggccctgatgtaaatttcgggcaaaaaactgaatttcgggccaaaaattgaatttcgggctctaatgtgaatttcgggcttttataatttcgggccgtccgaaatgagtctgacatgtttaagcaattacgggtcgggtcgtaggctaggtccgtgggctgggccagcccagcccgaaattcaaatgagctgagccggcccgaaattcaaacaatacgagtcttttcgggcttgggccgggccggatggtccgaatgtacacctatagccatggtttgtactggcgagcaaaaggtaaaaaaaacaagaataatccttttaggatcaaaagtatttttttgaaaagattaaattgcagaaaaaaacggtccggtaccccttgcctgtctctcccagtcgtttcccgggggcgctagattcagatccatgccgcacgcttctccattcctgtaagctcctgcgcctcctcctcgttgcttcactccaaatccaccgaggccaccgcccgggcccgggggaacccctagcgccgccgccggctcgggcgccctctcgcgcgcgcgtgcgtcgctccgacagcagctgcagccatggcgcagccgctcgtcgtgaagaaggacgacgacctcgacgaggaagagtactactcgccattcctgggcatagagaagggcgccgtgctgcaggaggcccgcgtcttccacgaccctcagcttgacgctcgtcgatgctgccaggttatcaccaagctcctgtacctgctcaaccagggtgacacctttaccaaggttgaggctacagaggtcttctttgcaaccaccaagctgttccagtctaaagatgtgggccttaggaggatggtgtacctcatgatcaaggaactctcaccttccgccgatgaggtcatcatagtaacaagctctttgatgaaggacatgaatagcaaaaccgatatgtaccgtgcaaacgctattagagttctttgtcgtattatcgactcaactcttctcacccaaatcgagaggtatttgaagcaagccattgttgacaagaatcctgttgttgccagtgcagcccttgttagtggcatctacttgcttcaagtatgtcctgtgctccacttggatatattgttactagtttgtggcagctttagttctttttt

SEQ ID NO: 109832 - DNA, 102 bp, Zea Mays
ccttcaaagttgctgtctgattggtactctgttctgttttgcaataacttatgtatatctgtgtgcttcagtagaactttgcttacaccggtctgtgcccaa

SEQ ID NO: 109833 - DNA, 1748 bp, Zea Mays
ctccccttcgttggttcgtttgattgattggggagcaacaactcccaccacccgcaaccgcagcaatctcccctcgccaactccgtctcggccgcaacccattcgccattgccgaggaggaggaagcccggtcgtctattctggatctcggatggcgtcggccaagtcgtcgcggtcgcggcccgcgggccactcgggggtgttcccggtgggcagcgccgccgcggtggggagcgggggcggcggtggcgacggcggggtgcagctcgccgacaagctcaagatcttcaaaaccgacaacttcgatcccgacgcctacgtgcagtccaagtgccagaccatgaacgagaaggaaataagacatttgtgttcttatctccaagacctaaagaaggcttcagctgaagaaatgcgtagaagtgtttacgcaaattatgctgcattcatcaggatttctttgaggacattgcaccactacttagcttgcaattgggtggttcatcaatggatgggatcacacaaattttcaattcatatgtaaacttgcttataagtgctttacctggttctatggatgatgaagctaacttagatggtttaggtaataagattgttagaatggcagagactgaagagcagcagttagctttattagctaatgcatctttactagctgaggagttgctacctagagcagctatgaagttatcgtcaataaaccagtctatggatgatttgcataaaagaggaacagataaacaaaaccgtgtgcctgagcaacgtgagtggaaaagaaaactacaacgaatggtggacaggttgagagataatttttgcaggcagcatgctcttgaacttatatttacagatgaaggtgatactcatctcagtgcagaaatgtatatcagtatggacaatactgttgaagaaccagaatgggttccgtctccaattttccaggaactgtatgtaaagttaaacaggatggcaagcattgccgcagaaatgtttgttggtagagaaagatttgctactttactgatgatgcgcctcactgagacagtcatactgtggctctcagaagaccaggccttttgggaagagattgaacaaggagcaaagcctttaggccccctaggtctgcaacagttctacctggacatgcaatttgtcatcatatttgggcaaggtcgttttctctctagacatgtacatcaagtcattttggatgtcattgatagagcaatggctgcattttctgctactggaatgaaccctgatagtgtccttccgggcgacgattggttcatggatgtctcccaagaagttgtcagcatgatcagtggaaggggtagagttgctaatggtgacagggaagtaaacagcccaacggcctcagtttcagcgcactccatttcttcgttcaaatcccatggcagctcctagtttgcaagtcggtattctttgtaggcaggtcattgtataataatcattagtatattctttcaacctattcctccactcatttgttttttcttttctttttcagaacttttgtgatagtatagtatagatggataattgtttgacctaggaaaataaatcttttttagtaattttgttttagggtgtgtttggttgaggagtggttccattccattttttggttgttcggttttcaataaaaataatagcggagtggctcttgtatctttatatgaaaatttactataaatagttggaacgct

SEQ ID NO: 109834 - DNA, 2790 bp, Zea Mays
ctccccttcgttggttcgtttgattgattggggagcaacaactcccaccacccgcaaccgcagcaatctcccctcgccaactccgtctcggccgcaacccattcgccattgccgaggaggaggaagcccggtcgtctattctggatctcggatggcgtcggccaagtcgtcgcggtcgcggcccgcgggccactcgggggtgttcccggtgggcagcgccgccgcggtggggagcgggggcggcggtggcgacggcggggtgcagctcgccgacaagctcaagatcttcaaaaccgacaacttcgatcccgacgcctacgtgcagtccaagtgccagaccatgaacgagaaggaaataagacatttgtgttcttatctccaagacctaaagaaggcttcagctgaagaaatgcgtagaagtgtttacgcaaattatgctgcattcatcagaacatctaaggagatatcagaccttgaaggggaactgttgtcaattagaaatctgcttaatacacaggcagctttaattcacggtctatctgaaggagttcagatagattcattaacttcaggccctgaaggttctgcagaagacgacatatccaaggttgaagatcaggagccttcagaaattcagaaatggtctgcagattttcctgacatgcttgacgttttgctagctgagcgaagagtggatgaagcactggatgcactggatgaagcagaacgggttgctgttgatgcaaaacgaaaacagactctaactgcagctgaagtttcggctttgaaaagatctatctctgataatcggcagaggctggcagatcagcttgctgaagctgcttgtcagtcttctactcgtggtattgagcttcgagctgcagcttctgccctcaaaagacttggtgatggcccccgagctcacagcctcttactgagtgcacataatcaaaggcttcaatgcaatatgcaaactatacatccatctagtacttcatatggtggggcatacactgcggcacttgcccaacaggttttttcagtcatagctcaggcactaagtgactctgtggatgtttttggtaatgagtcatgttatgcatctgaactggtaacgtgggctaccaagcaggttatgtcctttgcgctcctggtgaagaggcatgtgttgtcctcttgtgcagctgctggaggcttgagggcagctgcagaatgtgttcagatatcacttggccattgttttttgctggaagctcgtggtctgtctgtttcctctgttctcctcaaacaattcaagcccagtttagtgcaagcattagatgctaacttgaggagaattgaggagagtactgctgcactagcagcagctgataactggatactcacatatcccctaactggtattcgtccattaactagatcgtctgctgctaatttggcacttcagccaaagctctctagtagcgcacaccgtttcaattcaatggttcaggatttctttgaggacattgcaccactacttagcttgcaattgggtggttcatcaatggatgggatcacacaaattttcaattcatatgtaaacttgcttataagtgctttacctggttctatggatgatgaagctaacttagatggtttaggtaataagattgttagaatggcagagactgaagagcagcagttagctttattagctaatgcatctttactagctgaggagttgctacctagagcagctatgaagttatcgtcaataaaccagtctatggatgatttgcataaaagaggaacagataaacaaaaccgtgtgcctgagcaacgtgagtggaaaagaaaactacaacgaatggtggacaggttgagagataatttttgcaggcagcatgctcttgaacttatatttacagatgaaggtgatactcatctcagtgcagaaatgtatatcagtatggacaatactgttgaagaaccagaatgggttccgtctccaattttccaggaactgtatgtaaagttaaacaggatggcaagcattgccgcagaaatgtttgttggtagagaaagatttgctactttactgatgatgcgcctcactgagacagtcatactgtggctctcagaagaccaggccttttgggaagagattgaacaaggagcaaagcctttaggccccctaggtctgcaacagttctacctggacatgcaatttgtcatcatatttgggcaaggtcgttttctctctagacatgtacatcaagtcattttggatgtcattgatagagcaatggctgcattttctgctactggaatgaaccctgatagtgtccttccgggcgacgattggttcatggatgtctcccaagaagttgtcagcatgatcagtggaaggggtagagttgctaatggtgacagggaagtaaacagcccaacggcctcagtttcagcgcactccatttcttcgttcaaatcccatggcagctcctagtttgcaagtcggtattctttgtaggcaggtcattgtataataatcattagtatattctttcaacctattcctccactcatttgttttttcttttctttttcagaacttttgtgatagtatagtatagatggataattgtttgacctaggaaaataaatcttttttagtaattttgttttagggtgtgtttggttgaggagtggttccattccattttttggttgttcggttttcaataaaaataatagcggagtggctcttgtatctttatatgaaaatttactataaatagttggaacgct

SEQ ID NO: 109835 - DNA, 1197 bp, Zea Mays
actgaacaatgtttctgcatgtatcttaccgcctcaatatggctggccaaatatagaacatccattacttcctttttttaatctgaagcaaatatgactatttgcttttacttatctatcccttgtgaaagttcttagtttaacatgaaatatcagttaatatatttctgctttggtgcttactttatcaatcaactaatgctctagaacatctaaatgataaatattgtttgcttttctgcagcgtattgtgtagttgctgttgaatcagttgggcgacaaatccccatagctttcctggacagagttaaggaagacttcaccaaaaagtatggaggcgggaaagcagctactgctgcagcgaacagcttgaacagggagtttggatcaaagcttaaagagcacatgcagtactgtgtggaccaccctgaggaggttagcaagcttgccaaggtgaaggcccaagtctccgaagtcaaaggagttatgatggaaaacattgagaaggttcttgaccgtggcgagaagattgaactgcttgtcgacaaaactgaaaatctgcgttctcaggcacaagatttcaggcagcagggcaccaaggtgcggcggaagatgtggctccaaaacatgaagatcaagctgatcgtgctgggcatcatcatcgcgctcatcctcatcatcatcctgtcggtgtgccatggcttcaagtgcggcagcaagtgaggagggggacttacggatggccgtgccctgccctgccctgccctggcacctgcgagaaggaggagactacatgtggagttttttttttgcttctttagtcgtcgtgttaagtcgtcctgcgccgataattcttggtggtcaccagataaagagtcattcctggtgtcggtgttgattgctgttggttggtcgggaaatgactgggtgaaccgaggggcgaagtgggaggggggttgtgtcgtgtaattttggatgccactattgtgcatgtatagccccgtgtgctgtgctaccctgatccgtgttgctactcctatgtcagtagatgttacgtactacgtttgctccccaggttgcaggcgactctgttcgaaaatgctcgttttctagctcttatttcggactgctgcagctgtcagctgtaatccacatagatacaaaacattatagaaacagtaaaagctaataaaagct

SEQ ID NO: 109836 - DNA, 1463 bp, Zea Mays
taccacgacacgccgaggaccaagtccgcaaaacacaccgagggagggccgtgtccccactccccagtccacacacacaccgaattccatttatttcatcctctcttttttttttccattccacgcccctcccaacactcccagacccatttccctttccttcccctccggctccgcctcctcgaccactccgacaacccccagcgcctcctctccggcgagctccacctctccaccggcggcggcgagaagcgggggggctaactaagtctgtaggctgcggcggaggtgatcccggagccggagccgagtctagggcgatggggcagcagtcgctgatctacgcgttcgtggcgcgtggcaccgtggtgctggccgagtacaccgagttcaccggcaacttcaccaccatcgccgcccagtgcctgcagaagctccccgccagcaacaacaagttcacctacaactgcgacggccacaccttcaactacctcgtcgaggacggattcacgtattgtgtagttgctgttgaatcagttgggcgacaaatccccatagctttcctggacagagttaaggaagacttcaccaaaaagtatggaggcgggaaagcagctactgctgcagcgaacagcttgaacagggagtttggatcaaagcttaaagagcacatgcagtactgtgtggaccaccctgaggaggttagcaagcttgccaaggtgaaggcccaagtctccgaagtcaaaggagttatgatggaaaacattgagaaggttcttgaccgtggcgagaagattgaactgcttgtcgacaaaactgaaaatctgcgttctcaggcacaagatttcaggcagcagggcaccaaggtgcggcggaagatgtggctccaaaacatgaagatcaagctgatcgtgctgggcatcatcatcgcgctcatcctcatcatcatcctgtcggtgtgccatggcttcaagtgcggcagcaagtgaggagggggacttacggatggccgtgccctgccctgccctgccctggcacctgcgagaaggaggagactacatgtggagttttttttttgcttctttagtcgtcgtgttaagtcgtcctgcgccgataattcttggtggtcaccagataaagagtcattcctggtgtcggtgttgattgctgttggttggtcgggaaatgactgggtgaaccgaggggcgaagtgggaggggggttgtgtcgtgtaattttggatgccactattgtgcatgtatagccccgtgtgctgtgctaccctgatccgtgttgctactcctatgtcagtagatgttacgtactacgtttgctccccaggttgcaggcgactctgttcgaaaatgctcgttttctagctcttatttcggactgctgcagctgtcagctgtaatccacatagatacaaaacattatagaaacagtaaaagctaataaaagct

SEQ ID NO: 109837 - DNA, 1456 bp, Zea Mays
taccacgacacgccgaggaccaagtccgcaaaacacaccgagggagggccgtgtccccactccccagtccacacacacaccgaattccatttatttcatcctctcttttttttttccattccacgcccctcccaacactcccagacccatttccctttccttcccctccggctccgcctcctcgaccactccgacaacccccagcgcctcctctccggcgagctccacctctccaccggcggcggcgagaagcgggggggctaactaagtctgtaggctgcggcggaggtgatcccggagccggagccgagtctagggcgatggggcagcagtcgctgatctacgcgttcgtggcgcgtggcaccgtggtgctggccgagtacaccgagttcaccggcaacttcaccaccatcgccgcccagtgcctgcagaagctccccgccagcaacaacaagttcacctacaactgcgacggccacaccttcaactacctcgtcgaggacggattcacgtattgtgtagttgctgttgaatcagttgggcgacaaatccccatagctttcctggacagagttaaggaagacttcaccaaaaagtatggaggcgggaaagcagctactgctgcagcgaacagcttgaacagggagtttggatcaaagcttaaagagcacatgcagtactgtgtggaccaccctgaggaggttagcaagcttgccaaggtgaaggcccaagtctccgaagtcaaaggagttatgatggaaaacattgagaaggttcttgaccgtggcgagaagattgaactgcttgtcgacaaaactgaaaatctgcgttctcagatttcaggcagcagggcaccaaggtgcggcggaagatgtggctccaaaacatgaagatcaagctgatcgtgctgggcatcatcatcgcgctcatcctcatcatcatcctgtcggtgtgccatggcttcaagtgcggcagcaagtgaggagggggacttacggatggccgtgccctgccctgccctgccctggcacctgcgagaaggaggagactacatgtggagttttttttttgcttctttagtcgtcgtgttaagtcgtcctgcgccgataattcttggtggtcaccagataaagagtcattcctggtgtcggtgttgattgctgttggttggtcgggaaatgactgggtgaaccgaggggcgaagtgggaggggggttgtgtcgtgtaattttggatgccactattgtgcatgtatagccccgtgtgctgtgctaccctgatccgtgttgctactcctatgtcagtagatgttacgtactacgtttgctccccaggttgcaggcgactctgttcgaaaatgctcgttttctagctcttatttcggactgctgcagctgtcagctgtaatccacatagatacaaaacattatagaaacagtaaaagctaataaaagct

SEQ ID NO: 109838 - DNA, 1571 bp, Zea Mays
taccacgacacgccgaggaccaagtccgcaaaacacaccgagggagggccgtgtccccactccccagtccacacacacaccgaattccatttatttcatcctctcttttttttttccattccacgcccctcccaacactcccagacccatttccctttccttcccctccggctccgcctcctcgaccactccgacaacccccagcgcctcctctccggcgagctccacctctccaccggcggcggcgagaagcgggggggctaactaagtctgtaggctgcggcggaggtgatcccggagccggagccgagtctagggcgatggggcagcagtcgctgatctacgcgttcgtggcgcgtggcaccgtggtgctggccgagtacaccgagttcaccggcaacttcaccaccatcgccgcccagtgcctgcagaagctccccgccagcaacaacaagttcacctacaactgcgacggccacaccttcaactacctcgtcgaggacggattcacgtattgtgtagttgctgttgaatcagttgggcgacaaatccccatagctttcctggacagagttaaggaagacttcaccaaaaagtatggaggcgggaaagcagctactgctgcagcgaacagcttgaacagggagtttggatcaaagcttaaagagcacatgcagtactgtgtggaccaccctgaggaggttagcaagcttgccaaggtgaaggcccaagtctccgaagtcaaaggagttatgatggaaaacattgagaaggtagtatatctaatcacctgaaaaaagtacacatatcatcattataatgaaaaagacagcgcacctcgaacattattcctgattccttattactattttgatgatcaggttcttgaccgtggcgagaagattgaactgcttgtcgacaaaactgaaaatctgcgttctcaggcacaagatttcaggcagcagggcaccaaggtgcggcggaagatgtggctccaaaacatgaagatcaagctgatcgtgctgggcatcatcatcgcgctcatcctcatcatcatcctgtcggtgtgccatggcttcaagtgcggcagcaagtgaggagggggacttacggatggccgtgccctgccctgccctgccctggcacctgcgagaaggaggagactacatgtggagttttttttttgcttctttagtcgtcgtgttaagtcgtcctgcgccgataattcttggtggtcaccagataaagagtcattcctggtgtcggtgttgattgctgttggttggtcgggaaatgactgggtgaaccgaggggcgaagtgggaggggggttgtgtcgtgtaattttggatgccactattgtgcatgtatagccccgtgtgctgtgctaccctgatccgtgttgctactcctatgtcagtagatgttacgtactacgtttgctccccaggttgcaggcgactctgttcgaaaatgctcgttttctagctcttatttcggactgctgcagctgtcagctgtaatccacatagatacaaaacattatagaaacagtaaaagctaataaaagct

SEQ ID NO: 109839 - DNA, 1785 bp, Zea Mays
gaaaagactgtttgcatatcagtcgttgccggtcccaccgagactggcataaaatccttacaagactgactatagggaaacaaattaatacatggatcaagttattattaaaaacaaaaaaaaaacatattatctttaattaggtataaccttactgttactactaataaagatgacaatgagtaaccacgactcaattagctaaactaacagaaacttagttcagatatggtaaattgtttggtaacctacaacatttcctaccgatcgaagtaaccagggggggcttgccccataataccacgacacgccgaggaccaagtccgcaaaacacaccgagggagggccgtgtccccactccccagtccacacacacaccgaattccatttatttcatcctctcttttttttttccattccacgcccctcccaacactcccagacccatttccctttccttcccctccggctccgcctcctcgaccactccgacaacccccagcgcctcctctccggcgagctccacctctccaccggcggcggcgagaagcgggggggctaactaagtctgtaggctgcggcggaggtgatcccggagccggagccgagtctagggcgatggggcagcagtcgctgatctacgcgttcgtggcgcgtggcaccgtggtgctggccgagtacaccgagttcaccggcaacttcaccaccatcgccgcccagtgcctgcagaagctccccgccagcaacaacaagttcacctacaactgcgacggccacaccttcaactacctcgtcgaggacggattcacgtattgtgtagttgctgttgaatcagttgggcgacaaatccccatagctttcctggacagagttaaggaagacttcaccaaaaagtatggaggcgggaaagcagctactgctgcagcgaacagcttgaacagggagtttggatcaaagcttaaagagcacatgcagtactgtgtggaccaccctgaggaggttagcaagcttgccaaggtgaaggcccaagtctccgaagtcaaaggagttatgatggaaaacattgagaaggttcttgaccgtggcgagaagattgaactgcttgtcgacaaaactgaaaatctgcgttctcaggtaacgggttgctgattcctttttagcaatttaattttgcatgtgtgtagatccaagaaagaaaagatgaatcgcttcatctatagaatatataactttatggtagcatctaggaaaattggccataaaaattagcatatgtctttcgccctgagacgaaaacatgtatatggcttcttgacccttaagcagcccccctttggaacgcaggagtgatagaggagtcatacaagaatcagttcattttgataggaaaagcgcagcatagagggcctaagtgtgtaatgaatttgacttgatatgttgtagaagtttgatatctgtgctattcaatccaccttaagtgccagtgaccttgtttgttggaatgtcactattacgtagtaggattgcatcatttgttaaataattttcactagtgcaagtatcaggtgttgctttatcagttgaaagtggaaacataatgattcattaaatcaactggtcaaaacgctgtcttgaatgttaacagatcctgtagtctgaagtaacaattttttttttgtcagaattagcaagacatcaagtatgtaggaatactctgctgtgcttctaaggtgaagcgtcttatgttagatgactatcatgctgttacatagcagaaaaacaaaa

SEQ ID NO: 109840 - DNA, 337 bp, Zea Mays
ttttatgaaccatacagcaaattagcaatctccagtccaggccagccactctcagtcagtgtaatggacatgtccataggctacaacatcagctcaatacatgcagcatcttctccatcaaggacagctcagtgtcagctacacaggtcacaggtgtgacgggggaaaaaatcagactgtcagatttagatacagaactaatcctgctcggtctcaaaacctacaatctacaagtggaaaaggtctcgcgaatgccgacggacgaactgcactgcactcggagtacaggtttccctccatgatctcattgacatcaccatgcctaagactaaataag

SEQ ID NO: 109841 - DNA, 1629 bp, Zea Mays
cacgctggacgcatcctcctgacctccacgctcgggtcgggcgcgtgaacccctcgccgccgtcgcagccgcagttccatcgccggagggtgagagggacgaggaagaggagggcaagatgaagacgaccaaggggggcaaggcgatgaaccccaccgacgccttccgcaaggagcagcggaagaaggagctcaagcggaacaaaaaggaaaggaagaaggtgcgggaagttggtattttgaaaaaggatccagacgctatacgagagcagattgagaaattggagaagatgaaggctgatggtgctctcgacaaggctaggaagcataagaaaagacagcttgaggatacatacaatcttattgttaagaaacgaaaggaatatgaacagaaaatgaaagagaagggtgagcaaccgattatgtttagtcatcttgcaccaccaaagaggcggcctacagcagatgaagatgatagagctaatcctaagcccgaggactctgtttactatcatccaaccttaaatccatctggagcaccaccacctagtttgccacctttacctccaaggcctccaatgcaatctgatatgctagctcctggagtcatgagatttccaccacctccgccaccaccagattcaaggccatcgcttatggcggctggagttaacaggccccctccacctcctccaggatttccaccgtctcaaatgccaatgccaccgtatggtgtgctccctggtccgccgccgatgcttaggcctccatttttgccaggacctcctatgcaactagatgagtttgctgcctttgccccaaggcctcagttacctcagcagccatcatacgtgaagtcggctgccccaacagttgtgaagagaccattagcacagcacactcctgagctgacggctatggttcctgcatcagtccgtgtcaagagagaatctgctctccccaagccaaaaccaaaggtgcagcagcagccacaactatcaacagtatccatttcaaagccctcggtgaccctcataagaagcgacgctcggcctccttcagcggcacccaagccgccaagcatcgacgactcttacatggcgttcttggaagatatgaaggagctaggggcacttgatgggtaactcaagtagagcaaatgcctgattgcacttagcagcttaattcatggaaacctgggcatggaaccttttttttttgcagcgtgagaatcaatagtctctggtcaatcaatcggagaaaatcatgcattagtttaattaaacactgggaaaacaattgtaatctatctttttcatactaaaggctctgtggcccaactgtacaagctggagatatttgaaacttgaatatggctctagcaaaggacatctcccagctgcatgtttcatggctgatttgcagataataccagtcgtggggaagactactggtgtgccttatttttgtctagagcgtttgcaattgaaagccatggcgaaaatgctgggcccatttgctttgaaaaccatgccggaattgctgacttggggtcccatgtaaacttgtgatattcacaaatgtcggcatcgggttctataatcctgcgatataatcctgcgacagtact

SEQ ID NO: 109842 - DNA, 2179 bp, Zea Mays
attccacgctggacgcatcctcctgacctccacgctcgggtcgggcgcgtgaacccctcgccgccgtcgcagccgcagttccatcgccggagggtgagagggacgaggaagaggagggcaagatgaagacgaccaaggggggcaaggcgatgaaccccaccgacgccttccgcaaggagcagcggaagaaggagctcaagcggaacaaaaaggaaaggaagaaggtgcgggaagttggtattttgaaaaaggatccagacgctatacgagagcagattgagaaattggagaagatgaaggctgatggtgctctcgacaaggctaggaagcataagaaaagacagcttgaggatacatacaatcttattgttaagaaacgaaaggaatatgaacagaaaatgaaagagaagggtgagcaaccgattatgtttagtcatcttgcaccaccaaagaggcggcctacagcagatgaagatgatagagctaatcctaagcccgaggactctgtttactatcatccaaccttaaatccatctggagcaccaccacctggaaaacctccgatgtacaaatcatctataggaccaaggatcccactgccttccttatccagcactggggcctcatcttccatgtcagagtctgaagcaggtccatctaccctgccaccccctccaccaccaccaccattgccagacacctcagagtccattgatccatctgcccctcatttccctttgcctccactcccgccaccgcccccaccaccacctaaacctaacagtgacacagcattgccaggcttacctcctcctcctggtccacctctgagagaacctgtatccggtcatacagtacttcagccgccaccacctccatcgcagaggtctttaaatccgccagcagcgtctagtgcaaatgaaagcaaaacggattctgttcagttgcagccctcagttgtcctgcctccaccacccccgccgcctgggttgccaccaaaatctaatgacatggaggctgctggcacttcaaaggacactcctggacttaaagaagatactgcagcgagagtcttaccaccgctgcctccaccacctagtttgccacctttacctccaaggcctccaatgcaatctgatatgctagctcctggagtcatgagatttccaccacctccgccaccaccagattcaaggccatcgcttatggcggctggagttaacaggccccctccacctcctccaggatttccaccgtctcaaatgccaatgccaccgtatggtgtgctccctggtccgccgccgatgcttaggcctccatttttgccaggacctcctatgcaactagatgagtttgctgcctttgccccaaggcctcagttacctcagcagccatcatacgtgaagtcggctgccccaacagttgtgaagagaccattagcacagcacactcctgagctgacggctatggttcctgcatcagtccgtgtcaagagagaatctgctctccccaagccaaaaccaaaggtgcagcagcagccacaactatcaacagtatccatttcaaagccctcggtgaccctcataagaagcgacgctcggcctccttcagcggcacccaagccgccaagcatcgacgactcttacatggcgttcttggaagatatgaaggagctaggggcacttgatgggtaactcaagtagagcaaatgcctgattgcacttagcagcttaattcatggaaacctgggcatggaaccttttttttttgcagcgtgagaatcaatagtctctggtcaatcaatcggagaaaatcatgcattagtttaattaaacactgggaaaacaattgtaatctatctttttcatactaaaggctctgtggcccaactgtacaagctggagatatttgaaacttgaatatggctctagcaaaggacatctcccagctgcatgtttcatggctgatttgcagataataccagtcgtggggaagactactggtgtgccttatttttgtctagagcgtttgcaattgaaagccatggcgaaaatgctgggcccatttgctttgaaaaccatgccggaattgctgacttggggtcccatgtaaacttgtgatattcacaaatgtcggcatcgggttctataatcctgcgatataatcctgcgacagtact

SEQ ID NO: 109843 - DNA, 2315 bp, Zea Mays
attccacgctggacgcatcctcctgacctccacgctcgggtcgggcgcgtgaacccctcgccgccgtcgcagccgcagttccatcgccggagggtgagagggacgaggaagaggagggcaagatgaagacgaccaaggggggcaaggcgatgaaccccaccgacgccttccgcaaggagcagcggaagaaggagctcaagcggaacaaaaaggaaaggaagaaggtgcgggaagttggtattttgaaaaaggatccagacgctatacgagagcagattgagaaattggagaagatgaaggctgatggtgctctcgacaaggctaggaagcataagaaaagacagcttgaggatacatacaatcttattgttaagaaacgaaaggaatatgaacagaaaatgaaagagaagggtgagcaaccgattatgtttagtcatcttgcaccaccaaagaggcggcctacagcagatgaagatgatagagctaatcctaagcccgaggactctgtttactatcatccaaccttaaatccatctggagcaccaccacctggaaaacctccgatgtacaaatcatctataggaccaaggatcccactgccttccttatccagcactggggcctcatcttccatgtcagagtctgaagcaggtccatctaccctgccaccccctccaccaccaccaccattgccagacacctcagagtccattgatccatctgcccctcatttccctttgcctccactcccgccaccgcccccaccaccacctaaacctaacagtgacacagcattgccaggcttacctcctcctcctggtccacctctgagagaacctgtatccggtcatacagtacttcagccgccaccacctccatcgcagaggtctttaaatccgccagcagcgtctagtgcaaatgaaagcaaaacggattctgttcaggtacctactttggatctcttctgcatatttactagtgcttctaatccatttgttaatgcatcaaaccctttttcctattgttcaaatttttggatactggcctttgtgacttggtctgatgtaaccttgtttgcagttgcagccctcagttgtcctgcctccaccacccccgccgcctgggttgccaccaaaatctaatgacatggaggctgctggcacttcaaaggacactcctggacttaaagaagatactgcagcgagagtcttaccaccgctgcctccaccacctagtttgccacctttacctccaaggcctccaatgcaatctgatatgctagctcctggagtcatgagatttccaccacctccgccaccaccagattcaaggccatcgcttatggcggctggagttaacaggccccctccacctcctccaggatttccaccgtctcaaatgccaatgccaccgtatggtgtgctccctggtccgccgccgatgcttaggcctccatttttgccaggacctcctatgcaactagatgagtttgctgcctttgccccaaggcctcagttacctcagcagccatcatacgtgaagtcggctgccccaacagttgtgaagagaccattagcacagcacactcctgagctgacggctatggttcctgcatcagtccgtgtcaagagagaatctgctctccccaagccaaaaccaaaggtgcagcagcagccacaactatcaacagtatccatttcaaagccctcggtgaccctcataagaagcgacgctcggcctccttcagcggcacccaagccgccaagcatcgacgactcttacatggcgttcttggaagatatgaaggagctaggggcacttgatgggtaactcaagtagagcaaatgcctgattgcacttagcagcttaattcatggaaacctgggcatggaaccttttttttttgcagcgtgagaatcaatagtctctggtcaatcaatcggagaaaatcatgcattagtttaattaaacactgggaaaacaattgtaatctatctttttcatactaaaggctctgtggcccaactgtacaagctggagatatttgaaacttgaatatggctctagcaaaggacatctcccagctgcatgtttcatggctgatttgcagataataccagtcgtggggaagactactggtgtgccttatttttgtctagagcgtttgcaattgaaagccatggcgaaaatgctgggcccatttgctttgaaaaccatgccggaattgctgacttggggtcccatgtaaacttgtgatattcacaaatgtcggcatcgggttctataatcctgcgatataatcctgcgacagtact

SEQ ID NO: 109844 - DNA, 455 bp, Zea Mays
attccacgctggacgcatcctcctgacctccacgctcgggtcgggcgcgtgaacccctcgccgccgtcgcagccgcagttccatcgccggagggtgagagggacgaggaagaggagggcaagatgaagacgaccaaggggggcaaggcgatgaaccccaccgacgccttccgcaaggagcagcggaagaaggagctcaagcggaacaaaaaggaaaggaagaaggtgcgggaagttggtattttgaaaaaggatccagacgctatacgagagcagattgagaaattggagaagatgaaggctgatggtgctctcgacaaggctaggaagcataagaaaagacagcttgaggatacatacaatcttattgttaagaaacgaaaggtattttggtttcagaagtccagactccatccatactctagactctgcatttttttaatatttgatgtcttt

SEQ ID NO: 109845 - DNA, 1696 bp, Zea Mays
atttgcctccaccgcagccctggcctctgcttccgcccatgccttggcctgtgcttctgctcttgccttagcctctgcctcggccttcgccttctccaccgctctcttcttcagctcatcgatcagtatctggaggcacggggaaggctcgccggagccagcgcgcctggccgccatgaggcactcggcgacgtcggccggcgtgaggttctcctcccgtagtacctccccgacggcggcgaacaggtcgtcgtggtcgtcgatgtccaggtagttcttggcgagcgtctggaacgcctcgaacctgcagtaggacatctcgatgtgcatgtccatcctgccgcgccggatcagcgccgggtccagcctctcgacgtggttggtggtgaagacgacgatccgctcgcccgtgcacgccgaccagagcccgtcgatgaagttgagcaggccggacagggtcaccgagtcgcgcggcctgtcgtcggcgtcgccgccgccgttggcccggcgccgcggcctgccggcgcggtcgccggtgacgtcgagcgtgcagtcgatgtcctcgatgacgatgatggacttgctggtggtgtcgatgaggagcttgcggaggtcgctgttggtgtgcaccacggtgagctccacgtcgtagatgtcgtagtcgaggtagttggccatggcggcgaccatggtggacttgcccgtgcccggcgggccgtacagcaggtacccgcgcttccacggcttgccggcgcgccggtagaactccctgctgttccggaacgtgtcgaggtcgtggatgatgtccctcttcttggcccggtccatggccagcgtgtcgaacgtcgtcgggtggtcgaagtcgatgtagctccacgacttgtactcgtagctgctgcttggacggacggacggacggcagcaaagcaattagatcgacggcggtcaggtcaggtgaactgtaatggatggaacagacaagtagcgtagtgatagatctgttactaggagtcgcgtgacttgctgttggtgtagagcctccggcggcggttgctgaagaggatctcgcggccctggcggcggacgtggggcaggtactcgtcgacgacgagcgcgcggtggctcaggtggaaggtgagccgctggaagcgccggtcgcccttgcgctggccctgcacgtccctggcgaccacggaggaccaccagagcgggacgccgcggaactcgtcggccacgtcctggccgtcgcgcatgctgacgacgaggccgttgccctcccgggcgccctcggcgcggagctcgcgcgcgtcctgctcgcgcgcggcgccgctcaggtacgccttcacctcctcgtaggtgctgtcgttgtcggagacggggccgtagcgcgagtagcgcacctcgccgccgggctccgagatgtcgatggtcacgtaggggtccacgacgttgagcaggcggcgggagcgccggcggaggaacaggttgaagtaggtccggaacagccgccgcggcgcgtaggtggccaccagcgacaccaccggcgccaggatcagccacgccgagccgaagttggtggtgaacagggccgcgaacgggcccaggttggccagcgcccaccgccgccactgcgccaccgctcttttgcccggctccgccatctcacaaagctatacgggcggcggttgatgtggtg

SEQ ID NO: 109846 - DNA, 2229 bp, Zea Mays
cttaggaaaatctcccaacgggcgttgccgtccacacaaccacgctggccggtgcccaccatatcctctcctctcccagtccccattcgctaaccaaaacctttcccaactccccgcaccccggcgcgcaccatgagccgcgccacgccacgccactcctcctcgccctcgcaccatgcccccactccccgcgccagcctcctccatcccctccgccccgccgcggggcgccgccaccgacgccgcccgctcctccgtcaacctcctccgctccctcgcgcgcgcgcggcgcgcggacctgtcccaccgcgcgctgctcctcttccgcacgctgcacgcctccccgtccccgccgccgccgcgctactccctgccggccgcgctctccgcggccgccttcctcgccgcgctcccggagggccgccagctccacgcgctcgccgccaagctcgccctcgcgcccgcgcacaccgtcgtcgccaactccctcgtccacttctacgcctcctgcggccgcccgggcgccgcgctcgccgtcttccgccgcgtcccggaccggtcgctcgtgtcgtggaacaccgccgttgacgcgctcgcgggtaacggggaccacctcgccgcgctcgacctgttccgggagatgcagcgcgacaggcccgacctcgcgcccgacgcctacaccgtgcagagcgtgctcggcgcctgcgcggccaccggcgcgctctcgctcgggctctacgcgcacgcgctgctgctccgggagctcggcggcgcctcggcggtgtcgcgcgacgtgctcatcaacaactcgctcgttgacctctacggaaagtgcggcgcggtggagctcgcgcgccaggtgttcgaccggatgtccgagcgggacctcgcgtcctggaacgccatggtactcgcgctcgccaaccacggccgcgtccaggactcgctcgatctgttcgatcggatgacgagggtggagggcctggtgccaaatgccatcacgttcgtcgcggtgctcagtgcctgcaaccacggtggactggtcgacgaagggaggaggtactttgctgccatggtcagtgagcacgggatcaggccgaggatcgagcactacgggtgcatggtggacatccttgcacgggcggggttcatcgaggaggccctcgatgttgtggccgggatgaactgccgtcctgattccatcatctggaggagcctccttgacgcgtgctgcaagaggaatgctgggctggagctcagtgaggctatggccaagctggcgcttgatgtccctgacgacgctgtgagtggcgtctacgtccttctctcgagggtttacgcgtccgcgcagcggtggaacgatgtgggcatgatccggcaattgatgagccaagagggtttcaagaaggagccagggttcagctccattgaaatggatggatcagtgcaccagtttgtcgcgggtgacacttcgcatcctcagtcggaagagatatacgtgaagctggatgagatccaacagaggctcacatctgctggatacaagccggacttgtcggaggcacctatggtcgccgacattgaccgcaccaaaggcgccaccctgcgtttgcacagcgaacggctagccatatcatttggcctactcaatgcaacacctggggcacccattcggatcctgaagaaccttagagtgtgcaaagactgccacaccatcagcaagctcatatcgaagctatacaatgttgaaatcattgtgagggatcggattcggtttcatcacttcaaggatggatcatgttcttgtaaagattactggtgatccttgaacttgagccatgatgacctgcaatttggagagatcctgctcatgttctattagaagcgcctctgctggcatccaagagggagcttaatgcattttaagtgctgatggttacagcgaccttcaactttaagccgggagaaaagtggctggtggttgtttagcaagttgtgaattatagatggttgtccaccatgtgactgattatagaagctcatttgagcgttttttttcttgatctaacacagtaactcatacacaatgtattcatgtggaataattctttacctacattgcaatttgaattcttggcaatccaagaatcgccatcacctgtaccagggattcaagaatttttccaacaacaggttttacttgttgccccaacattttttttttttttt

SEQ ID NO: 109847 - DNA, 3050 bp, Zea Mays
tgcgagagtcgccagcctaccgccctacccccgactgccgaccccgcctgcccgcggcaccgcgaagacgagctgccatcctagcagatgggaacgacggaggacaaggcgtccaacctggacgccgtgctcaaggaggccgtcgatctggaaaacatagcgatccaggaggtgttcgagagcctccgatgcagcccgcagggtctctccacggagcaggccgagcagcgcctcgccatcttcgggcccaacaagctggaagagaagcaggagagcaaattcctcaaatttttgggcttcatgtggaacccgctgtcctgggtcatggaggcggccgccatcatggccatcgcgctcgccaatgggggaaacaagccgcccgactggcaggacttcgtggggattatcactctactcatcatcaactccactattagcttcattgaggagaacaatgccggcaatgccgcggccgccctcatggcgcgcctcgcccccaaggccaaggttctcaggaacggccggtgggccgaggaggaatcggctatccttgtgccaggagacatcatcagtgtgaagcttggggacatcattccagctgacgctcgtctgcttgaaggggatccactgaaaattgaccagtctgcactcaccggcgagtcgcttccggtcaccaaaggccctggcgatggagtgtactctggctccacttgcaaacagggcgagatcgaggccgttgtcattgccaccggtgtgcacacattcttcggcaaggcagcacatcttgtcgattcaacaaaccaagttggtcatttccagaaggttctcaccgccataggaaacttttgcatctgttcaattgctgtgggaatgctcgtggagatcattgttatgtaccctatccaacacagggcttaccgatcagggattgacaatctgttggtgcttctgatcggaggaattccgattgccatgcccactgtcctttctgtgactatggcaatcggggctcatcgcttggctcaacagggagcaattactaagagaatgacagcaattgaagaattggctggcatggacattctgtgcagcgacaagactgggacattaaccttgaacaagttgactgtagacaaaagtcttgtagaggttttccaaagaggggttgaccaagatactgtaattctgatggctgccagagcttctcgtacggaaaatcaggatgccatagatgccacaatagttggtatgctggctgatccaaaggaggctcgtgctggtgtccaagagatccattttctgccatttaatccaaccgacaaaagaactgctttaacctaccttgatggcgagggaagaatgcatcgtgttagtaagggagcaccagagcagatccttcatcttgcccacaacaagacggatattgaaacaagggtcagagctgtgattgacaattttgctgaacgtggtctgcgagcacttggtgtagcttaccaggaagtgccagatggtaggaaagagagtcctggaggaccatgggagttcatgggcctcttgccactttttgatccccctcgcaaagatagcgcagacactatcagtaaggcactcgatcttggtgtcaatgtcaagatgattacaggcgatcagcttgctattgggaaggaaactgcacgtcgtttgggaatgggtactaatatgtacccttcatctgctttactcgaacagaataaggatgagtcaattgcttctttgccaattgatgaattgattgagactgctgatggctttgctggagtctttccagaacacaagtatgagatcgtgaagcgcttgcaagcaagaaaacatatttgcggtatgaccggggatggtgtaaacgacgctccagctctgaagaaggccgatattggtattgcagtggcagactccaccgacgcagctcgtagtgcttctgacatcgtcctaaccgaagtaggccttagtgtgattatcagtgccgtgctgacgagccgtgcgatttttcaaagaatgaagaactacacgatctacgctgtatcaatcaccatccgtatcgtgcttggtttcatgcttcttgcgctgatttggaagtttgacttcccaccatttatggtcctgatcatcgccatcctcaatgatggaaccattatgactatctccaaggacagagtgaagccatctccgcagcctgacagttggaagctagctgagatttttgcgactggagtagttctcggtacttacttggccatgatgactgtcatcttcttctgggctgcgtacaagaccgacttcttcccgcgactgttccatgtcgaaagccttgcccacgacgatttccagatgcttgcctctgcggtataccttcaagtcagcacgatcagtcaggcccttatcttcgtgacgcggtctcgcagctggtcctttgtggagcgtcctgggttcttgctggtgtctgctttcttggtggcgcagctgatcgctactctgattgctgtgtatgccaactgggcgtttgctgcgatcaagggcatcggatggggctgggccggcgtcatctggctgtacaacatcgtctgctacctcccgctggacatcatcaagttcctcatccggtacgcgctgagcgggagagcgtggaacctcgtccttgagcagaggatcgcattcacaagcaagaagaacttcggtgccgaggaacgggaacgcagatgggcgcatgctcagaggtctctccacgggctggagctccagccgccggaggcagcgtccatgttcgagaacaagacgagcttcagtgaagtgaaccagctcgctgaagaggccagaaggagagcggagatggcgaggtccgactgttgtttgtcgagcatctccactgaacgcggcgaccagactttgcactgccctgtctgattaataggggaagatgaggatggagtcggtggtgaaggagaaggcggagtatagaggcggcttctttttactgtatatattatatatactaggcagcaatatagaaacttata

SEQ ID NO: 109848 - DNA, 2553 bp, Zea Mays
atgcacgatctcgtgcatgatttggcaagattactaacggctggtgaaattctggatgcttccaatattgggactatggatgcgaggcatgttgcccgcgagcctgcaactaggtcattatttcatgggtacatgcatgctaagtcaaactttcgtagcttcatacgtaccaattcaaatatatacacataccggcgacggcgagagccagaaggtagcggacagcaatacaaatatgcattgctcactaattgtcacaagcccctagaggtattgacggattcgcccaatatgataagggcactgcattttcgggattgtcatggctcgaaaggactaaaagattatgcatttttgcctgcaaagttgtccctaaaagttctggatttaagtgggtgcaacatagcctacctgccagcttctatcggtgaattggctgtattgaggtatctcaatgctccagagattaaaaatgaaatgctcccagactctctgagcaaactgtcaaaattaatatacctcaacctaagtgggtccaatatttcagcactgcctgattcaattggtgatatcgaaggtctaatgcatcttgatatatcaaattgtgtgcttttgtgtgagctcccagaatcatttgtggacctaaaaaatctggtatatctagatttatcacattgccagatcaaaattacagcaagagtttttagtggtctcaccaatatccagcatttgaatttatcaaaaagtcttattcatggaggtgacgggttggaggggctgcaggaagccgttggtggtctcaccgaacttcggtatttaaatctatcagggtgctttgaaaatctgaggccagatgaggtattaagttttgttgaccgtatttgtaggcttacaaatctggtgcacttggatttgtctttcaatttgggtcttgtcagtgtgcctgaaagtattggcagcctcaggaagctgcacaccctggatctcttgtgctgccgaaacctagtgacgcttccaaaatgtatgttcaacatggatagcatgaagatgttaaatgttacctgctgtcctcatctagatcagtctacgctcccccgatacaggtattttaccttgccgtactttgaggtccatgctgatgatggcgaatctaccagcaatattggtttgcttcggtatgtgaatcctactcatgagttgtacataagtgggcttgataacacaatatctgcagaagaggttgacagtataaacctaagccaaaaacaggggatccagtcgttgagtctttcatggactagagatgctcagagatctgtggaggacatggaagtcctgggaaagctagtgccacctgatactttaaaatgctttgagctaagaggttatgatagtatgagctttccaacatgggttatgggcatcacgctctatcttcctcgccttaccaaggttgtattgtgggagctgcgtaaatgcaatagtctaccaccactgggccagttaccaacactacaaaagctagttataggaggaatggacagcactttgacagttgatgagggtttctgctgcgccggcccgggagcctttcctctattacaggaacttcaactatgccaaatggagaacctggaagtgtggaacacaacatactcctgtggccagagcaatgaggatgtgcaggaattcatgttcccaaaccttagggaactgttaattcgtgattgccccaagttgagactgaaaccatgcccacctaaaactgtgggatggaagatagagaacagcgacaatgtactgtcgtcatgggatgaggagggagagatcgaccttgcagcattgttcccatcaaggaaagagtttaagaaactttgggaagggaaaacaaaagtgccagcagcttgtagcgcacaatttgaaaaatgcagaaaacctggagcttcctacaatgcttgtcctgaacgcgtggaggtgaaatcgagcaagctgcctttgggaaaatggaggctgttccggcacctccttcccacctatgatttaaggatctcgtgctgcacttatgcgacaagcggctcgtcacaagagatcatccaaggcctcgccttcatcgaatcattatgcctagaagacgatgctcagtctgagcttccgaattggttgggtgagctcacttctcttgaaacgttggagatatcgaagtacccagggctagaggcaccactggatggcatgaagcaactcgcccacctccggaagctgtcgctgataaattgtagaagcatgtcagcactaccgcaatggttgggagaactcatctctctcaaagaactgatcatctcagagtggccaaacctgagcgattttccggagagtatgcagctcctcacctccctcaagatgctacgtttggagcggtgtcccagaattactgcccttccaggatggctgggcgacctcgcttctctcaaaatactagtcatcagcaattgcaagggcatcgtgtctctgccagacagcatacagaagatcaccaggcttgtacgagtataa

SEQ ID NO: 109849 - DNA, 1953 bp, Zea Mays
atggataacatgctaggcgacttgtacaagccagatgacggcgacgacttctacagcaaaaaataccgcgacgagctagagaatgtgtcattccaactattagaagaaattacagatggtttctctgagagtcgagagctcggccgaggatcctttggagtggtttacaggggattgactaaaaatggtgattacgttgctgtgaagaagcttcatgctaatgtcactgatcttaaccataagcagtttcaaaatgagttatataaccttgcaaaacttaagcatgaaaacattgtacggatttatggctattgctatgaaattaagaaaacatttatggagcacgatagaagaaaaattcttgtcgaagagccgcgtatagcgctctgccttgagtatttacacaatggaagccttcaagatcatatttcggatgagttttctggtcttgactgggacacacgctacaggattatggaaggggtctgtcgtggtttatatcatatccataggaatctaaagaaacctctttatcatttggacctaaaacctgccaacatattactaagtaaaaccatgcaaccaaagcttgcagattttgggttatctaggatctttcggaatgaagaactaacacgaacgactaaaagtcctctaggaactcttgggtaccagccaccagaatacattgaaagaggtgaagtctcagaaaaattcgacatattcagcttaggtgtcgtaatgatacacctggtttcgggacgtggaggcttcgaaagatatgcatgcatgcatagtgaagaatttatcaatcaggtaaaaacaaactggaggaaaagatttaagcaattacagaggaattccttacgtaaagtcaaagtgtactgccacgaggtagagacatgcactcggatagcactgaattgtgtggagaaagacacacagaaaaggcctgatatagatatggtcatcaataatctaaaggaccgtaagacccatagattcaagagtacttggacaagtagttttcggcaggatggaagaatgtatggaagctatatgccatattcaaacagatatttaaacaaattgatgtcaggctctatttgcaccgaaacaaaattttatcgaagagaaaaattaccgaatgttggagaagaattcattatagggagaaaagaagagaaacagaaaatagtggcatctttactacagagcatgacacaacacatcactatccttcctatctatggcattggaggaattggcaagacaaccattgcaaagttgatttactatgatacaaatttcaatagttactctcgagtatgggtctatgtttcaccgaaatttgacttgaagaaagttggaaacactgtaatttcacaactctctagtgaggagagccaaattaatgaaacacaaatgatacatagttgcctgatgaaattactttctggtaaaaaggttctgattgttttagatgacttgtgggaggatagtttatttcaactgaataatttgaaggatatgctaagttatggtgatagcatcaatgtaatagttatagtaaccacacgcagtaaacatgttgcagagaatgttagcactaatgttgagccacacaagatagaacccttgacagatagcatgtgctgggatataatgaaacaaagaagcaactttgaagctaaaaatcacaaagaacatttggcacatataggaatggagatcgctgtaaagtgtggaggtgtggctttggcagctcaatcccttgggttcatgttgaagcccatggaattatgtgatgaatggattgaagtcagagacagtgacatctggaataaatctatttcgaaggatgccaattcaccaaaccatatatgtgagaagtatattttgcagctcataggattgtctttcattcaagatacaatgtcaccaaagtcatga

SEQ ID NO: 109850 - DNA, 1875 bp, Zea Mays
atgtgtgacatttgggaggaattccgggcggcgctttgcatatccggtggaaaccgccgcccgcccccaaccctccctcccccgaatctcgccggcggcggtgacgaagatggcggtggtgtcgaaagtggcggcggccaggaggagggggacatcatcagtgcgctacccgacgacgtcctcctcttcatcctcagccgcctcccgtccgccgccgccgcgcggaccagcgtcctctccaaccgctggcgcctcctctgggcgcagctcccggtgctgtggttcccgctccccgccgaaccggcccgcgcgctgccctcgcccgctaccgccgcgcggaccagggaccgctcccaccgttggcgccgccgcctcttggcgcatctcccagcgctgcggttcccgctccccgtcggaccggcccgcgcgctgccctcgcttgcctccgctcgcgccgcactcacccaacactcggcaccctcgctctggatcctgaggatagacgctaacgacgcggacccggtggacgcggccgcggtactccgcctcgccgcgccccgcctcaccaacgcgctctttctccgcaacgtggtacccgaggatcggaagaaggccgtagtgatggaagtcattgagctgccctgcttcgacagggctgcacatcttttcctcgacttaggttaccttcgcctcgcatttccaccgtcgggcgtgttcacgaagctcactgtgctagttctgagccacgtccggttccaaggcgccttggacatcggcgacaccttgtcgtcggcccgctgcccttcgctgcgactactccatctcttcgacgcccaaggggtgtccaaccttggcatctgttcggagtctctcgtcagtatggttctgcataacctgaaagggttacagcagctcagggttgtgtcgccaatgctgagagatctgcatatgtttaattgcttcttcaagaggcaaccggtggccagcatcactgctccagtggctgacatcactgctccgattctggaaaagttcgggtggcttgatgaatatgatccgaggtgggtccagctgggtgaattgtcccagctacaggtactggcgatctccttctttgcaggtgcatggtatggattggttgaacatcagtacaaccggggcagtgtgaagttgttgcaacgctttagggagatccgcgatcttcacatcacgatcttctatccaattaagatcgtttacttccactactgcacggaaggcctgacctcgctgctggctaagaaattacacctgatccttctaacatgtggacatgctattggctcttgtgtgttccatctccttaagatttctactaggataagaagtctgtttctggatatacgtgaatccattaaggaacgagctgcttgttcaccagactgtgcttgtcaccagcagcatgactgggaaagcgaggagctcgtgctgaactctctccaggaactgaacgtttgcggacttagagcaaaccgtgacttcatgtttgtgaaacgactgctgggctggatgggagcgctcaaatcagttaccataatcttcgatcctaaagccactgtccacgaggagctctgcgaggagctactgggcctctctggaccagagacttgcgtgaagatttacctgtatcgcgatggggcaaaggtgatgtatacaccggtaggctagggcagttttaagggcggagagttctctttcgctgttgctgagtagtctcatatggctgtagcagtgtataactgtgaatccatgtgcttgcttctgttctcgaagacatacaccttgtttaggttgttacaattgttaaggatttgtctggtgcagctgtagattcat

SEQ ID NO: 109851 - DNA, 579 bp, Zea Mays
atggcgctccacctccagcaatggtgctcgtcgccctggaggacgttgggcgtggacggcaatggtgctcgacaccggttccagcaggctagccgccctggagaagaactctccgctcttgctgccgtccacgcatggagtgacaggtcaagcaagtgggggcgaggtgaagagggcggtgaatgggagctgtggggtgaatccgtgattggattcatgtgtggctgggctttggtcgatggtctgctgcattttcttgccttcaatcttcagaaacaagagaatggtctgctgcatttgggctttgggctttggtcgatgatctggatgaatggtctgctgcattttcttgccattttcttgcattttcttgccccaatcaaagacttccatattgtggccattcatccagatcacaattcgttcatccttgttcagcactggaaccagaaacttgtatcatataacatggatactcaggaactgcatggtctctgcactcttgaaaatggctatgtggttattaccccttacataccctgtttcttggagtcatcggttcttgcgaccaaacactga

SEQ ID NO: 109852 - DNA, 2594 bp, Zea Mays
tcagagtgcaattttggacgtgatggctctattctatgcaggtattggtgttcttttggtccagatgattataggaagggtggtaatgtacggcctagcaggcccatcgcggaaaagagaaaaacacctgctggccgccctaatacaaagaggggatgtgtgtgccattttattgtgaagcgcttgattgttgaaccatctgtggctcttgtgatatataaccacaataagcatgtagataagaaaggcatgccatgccatggttctatggacaagatggctgtagggacaaaggcaatgtttgcaccatacatatctgatgagttgcgtcttcaagttatgtctttgctctatgttggcattccagtggagaccataatgcagaggcatactgaaatggttgaaaagcaaggaggtccatcaaacagggacgatcttcttactcatagatatgttaggagactggaaaggaaaatacgtcgttctgtttatgagcttgatgatgatgacgctattagtattggcttatgggttgaaaataaccaggattgtgtgttcttctatgaagatttttcggatacagacacctttgtcttgggcatccagacagattggcagctacagcaaatgattcagtttggcagccatagtttaatggcttctgattcaaagtttggaacaaacaagctaaagcatccttgttttcgatcagcacaaaaatgcaattcctgttgcgtggattataacccccaattttgcacatggtgaaatatataaatgggtgggtgctctttatgatcgagcgcatacaaaagatcctacttggcaattgggtggcttcattattgatggtcccttgactgacgttcgcacaataagagaagtattccattgccctgtgctgatcagtttatggcgtatccggcatgcttggcataaaaatttggttaacaaatgttcagacattgagaagcgatcgacaatggccaaacgtcttggagatgcaatttctattatatgcagaggaactggtgatgttgaattatttgaagcctttctgcaagattttgttgagtgtgctgggtttcttgactacttcaaagctgtatggcttccaagacttggggcatggataactgtcttaaaggccacggcattggctagtgcacaggtagcttcagcaatagagagttaccatcacctgctaaaacttcggctgctgaatgaggcagatgaaagtgtctactggcgtgctgattggttggtcgataagttgggtacaaaggtccattcttactactggctggatgaattctcaggaaagaacagtttttcgcgttactggaggagtgagtggagtagtggcccaaacccatggtgccagggaatgcagattccagattccgatgtcgtcattgaaggcaattatgccagtgtggtcagccagaagaacaaggagaagtcccatgtcgtactgaatccaggttctgagtttgcgttgtgcgattgtagctggtcaatgaaggggaacctttgcaaacatgtaataaagtcggcaaaggtctgccgtgacaggggattggcactgccatcgttggccatgttccactattaccaggcattggcaaatcttgttcattgtccacccagtgatactttgattagtgaccatgcaatggctctggcagtttctgttaaaacacagctagatgcagtgttgtgcgctgttaatggaagttcttcaattaggccaggtttccaggatccacagtcaacgagtaagacaagagaagctgaaattgaggaagccaactctgagaatggtgtgtgcacaagtcaaccccagcctggtgctggtgatgatgaggatcaggccattcggactggcaagagaagaaagttaggggacgcttctggtgacactgaagatggttccatatatcaggacagtctggctcgcaagaaatgcaagtcaggggaagcttccggtgacgatgaagaggcctccacagaagagggcagtcgggcttgtgaaagtaggaagccaggagaagcttctactaacaatgaagaggtttccataggccagggcagtagagatcatgagaaaagaaagtcgggagaacctcctggcaatgaaggaacttcagcaacgcaagctacggaaccttctgagactgaaaccagccaagcaaccaatggactggttaggtccctcctcccctcttcggaatgcacctagaacgccttgcgggtcttgtaaattcctagttggattagtcaactgatgaattaaacagcagctgagcttaaaaaaaactagtagctgcgtctgttaagtgtgaacggaagcataaatcagttcatttatcattatgaatgggggggggggggggggtcgtgtgcattatgcaggacaacaattgcaagtcccagtttaactgtttggcacgatgttcaaaatctaatgatcccatgttcttttttttggtaaatgaagcaataccatatcatatggttacctaaacctaccgaattaaggtactgttttgctgtatatagcattcacacttctctagaatagcttgttatgc

SEQ ID NO: 109853 - DNA, 2498 bp, Zea Mays
ctctcgtctaccctctccccaccactccaggccgcgcgcaccacctgttcggccaaatatcccacgccgctacataaacccgcgcgccatttcccgcctgcctccccaagctacccagctacctacctaccttccccctgcgccgtcactagcgaaccggcaccatgctccgggcgctcaacccgtccccgtcccagctccgcgcgcgtccggcgtgccgcgccgcgccgcgccggcgcccgcgcggggcctgggcgcgcccccgtgccgcggcggtcccgcagcagccgccggtgcgccggccctccggagaccggctgcgcgcgccgtcacggggcgccgccgccgccgaccagctgccggcgcctgatgttggcgcggcggcgcccggggcgcggggcgagctggaggcgttcctggagattgtgcccgcgaggatgcggcgcgggctggcgcggcaccaggagctgcgggacctcgtcgaggtcatcatggacctcggccgccgcccgatcgcgcggttcccgtccggggactgggccatctccgaccagcccgtcaccgccgatgacctccgccaggccgtcgccaaggtaggtgacttctctgaggacaaccgatctgggatcaatcactcgttgcaccggatcagcgctatccggaaccggaaagctcaaatcataggcctcacttgccgtgttggtcgagctatatctggcagtgcagagatgatccgggaccttgtggtgagtggtggttcaatattggtgattggacctcctggagttgggaaaaccactctgatcagggaaatagctagaattttggcagatgaaggtaagaaacgtgtgatcatagtggacacatctaatgaaataggaggtgatggggatgtacctcactctggcattggacgtgctaggagaatgcaagttcccaaagttactatgcagcacaacgtaatgatcgaagcagttgaaaatcacatgccggaagtaattgttatcgatgagattggtacagaacttgaggcaatggcagctaccactattgctcagagaggtgttcaactagttggaactgctcatggtgtgacaatcgagagcataattaaaaatccttgtttgcaaatgctcgttggagggattgagagtgtgactcttggtgatgaggaagcaaaaaagcggaaggtgcagaaaaccattctcgagagaaaaggacccccaacatttttatgcgctgttgagatgatatcgaaaactgaatgtcgagttcatcacaggttagatgccacagtggatgctattcttgcagggaagcctcctaagtttgaagctcgcaagatgcataataagtctaccgagtttgaaatgccgttggtgatacctgatagagagtatgaaatagaatcactgccactctatcaggaagttatggtcacgaggtcattatcatcagatggcaacttcagcgatgattttgctgcatccaggcaaacaaaaagcaagagtatgccatcagaagataattttggtgataattttgtttatacaaggaaagcaaaagggaataaacctgtgcatggaaagtctctagtccaagtatacacataccagatttcagaagctgatattttacaagtagcaacaatgatgggatttgatgatgaactagatgtaacagatgacattggagcagctgatgtgattcttgcatcgagttctgaaatgaagcagaatccttggattcataatgttgccaaataccacaagcttcccatatttgttgtcaagactaatacgatggctcaaatagttaaggctatcagaatgattgttggaagggacaacacatcatcaagtaagcagcctgaggttatggagggagagatagagattgaggatgatgctccgaaacgtaagccatctttggaggaaattgatgccttggaggaggctcgtcttgcaatcgagtacatcgttattccaggtggggagccagttgagctcctcccaagatgttcagaaatagttgctcggcagctggagctcgtagagagctaccagctacttgctgaaacctttggaagtgactccaattctaggttacagattctccccatgaaaataaccaagaggggttctagtaaagacaatggagcatcaaagcccactaaacaaaccggatcagatttgatcgtcagtgagaatggtggtggctcaagtttttctcggctgccatttctgccaaagtgatcgtctagatcttctgatcaccactgtcgaaaatgtacatcattcctctctcttgttgttcattgtacaacattgtgcagtgttgtaaatagtgtgtcgaatgttgaagaagcgaaagagcaaaagctaactgcaattgccttccattcttttgctggaataaaatccgttcatttctggtgtcagccaggtcagctcacatgctcatgtggaaaaaaattgcacgcggccgtgccgcacgag

SEQ ID NO: 109854 - DNA, 95 bp, Zea Mays
cttgaattgatctgggccatccatcacgtatcaacgatcaaaacactgtcttcttcccacccgctgccagaccaagtcgagtggcggcgcggccg

SEQ ID NO: 109855 - DNA, 3162 bp, Zea Mays
gcaaaaccccaagcctccttcctacgatggcctctcgtgggcgcggtggtggcggagggaaaggccctagcggtgggcggggcggtgaaggcagggggcgggggatccgtggcgggggaggttaccatcacggcgacgatggaggcggcgaacgcggaggcagaggcgacccgggccgagggcgcggggtcggcggtcgtggccgcggtcccggaggccgaggtgtcgacgaccaccagcagcagccgccgccgctcgggaacacagagggcggaggccagggccgcggcggcatggcggtagcggtaccgccagcccgccccgccgcgccctgtcctctagcgccggacgccgctgccccggcatttcccgcagcagcggcctcgtcttctgcgcaagcgcctcgagcccccaccgaggcggctggagctgccttggcggatggcatggggaagttggccgtggcggacgaccggcccgctgctcctcccgtgcccgcaggtaaacccgtcgcgcaaggtcccgcgcaccagccccaggaggctccgccactctcgaggaagaggatcgtgccgccgccccgccccggtttaggcacgtctgggagaaagctggcggttcgcgcgaaccacttctttgtcgaggtgtccgtgaacgacatcttccattacgacgttttaatcaatcctgaaccaaaagcaagaaaaaccaacaggatgctgctctcagagcttgtcaagatacatggcgcgacatctctcgcccacaagacacctgcatatgatggaagcaagagcctgtacactgcaggcgagctgccgttcaaatcaatggagtttgttgtcaagttggggaaggcgggccgagaagttgactacaaggtgacaatccgatacgcggcacggcctaacgtgtaccaacttaagcaattgatcaattctcagctaaggaacacgccatttgacgcaatccaagcactggatgttgtcttgagagagtcgccttctctcaactatgtaactctttctcgatccttcttctccaagaagttcggtgatgacgacattggcggtgggctagagtgctggagaggatattaccagagcttgcgtccaactcaaatgggcctctcattgaacattgatacatgctcgacttcattttaccaacctatcgatgtggtaaaatttgttgccgattgtctccagctgacaaaccctggccaaccttttttggacagggatcgtttaaagcttaagagagccctgcgcggagttcttgttgagactgaacaccagcagggaaagagaagcatctacaggataactgggattacttctgttccattggctcaactgagcttttcttgtaacgaaggccctcagctgactgttgttgagtactttgcacaacggtacaatgtccagctgcgctacactgcttggccctgcctgcagtcgggcaatgattctaagccgatatatttaccaatggaggtgtgcaaaatcattgaagggcagaagtaccctaggaagctcagcgacacacaggtggccaacatactgaaggcaacctgtaaacgtcctcaggatagggaggagaacattattaagatggttcgccacaacaactattctgctgataagatggcacaggtgtttgggatcactgtggccaaccagatggctaatgtgcaagcccgtgttctgcctccacctatgctgaaataccacgaatctggaaaggagaaaaccgttgcaccaagcttggggcaatggaatatgattaacaagaaaatggtcaatggtggaaccattcacagctggacttgtctgagcttttcgcggatcccgcttcgtttggtagacgaaatatgccatgaattggttcaaaagtgcaattccattggcatgagtttcaatccaaggccggtgacagaagttcagaaagactcacacaacaacatagaagctgctttaagggatgttcacaggagggctccgaatctgcagctgcttattgtgattcttccagatgttactggttattatggggaaattaagaggatgtgcgagactgaccttggtatagtatctcagtgcatcaatccgaagaagaatagaaacaagcagtattttgaaaatcttgcccttaaaatcaatgtgaaggctggagggcgcaatacagtgcttgagagagcctctgtgcctaatgggataccttttgtctcagatgtgccaacaatcatttttggtgctgatgttacccatcctacagcaggagaagaatcctcggcttctgttggagctgtggttgcatccatggactggccacaggtcacaacatataaagctctggtctcggcacaagcacacagggaagagattatacaaaatctcggcggaatgataagggagttgctgatttcgttctataagaggactggcaaaaagcccaaaaggattatattttacagggatggaataagtgaaggacaattcaaccatgttttgctccttgaaatggacgcgataaggaaggcttgtgcctctctggaagatgggtatctacccccagtgacatttgtcgtaatacagaaaaggcaccacacaaggctcttccctggagttcatggaaggagagatgttactgacagaagtgggaacattcttcctggaactgtggttgataccgagatttgtcatccgcgggagtttgatttctacctttgtagccatgctggaattcagggaaccagcaggccaatacactatcatgtcctctacgatgaaaaccgtttctcggctgatgggctgcagatactcacaaacagcctgtgctacacatacgcacgatgcacgcgcgctgtctcagttgttccaccagcctactacgctcacctggcagcattccgcgggaggtactacgacgaacaaggtagcagccccgcccccgatggaacctcagttgtcggtggcgatgccgctgcagccggtgatgatccacctgcgtgccgcaggctcccccagatcaaggagaatgtgaaggaagtgatgttcttctgctagttgctcagcgcgagctgcatgtcttgattcaggctgcctcaatatacaagaggccttttttttgtgataaactggtatcgatggttgtcctgac

SEQ ID NO: 109856 - DNA, 1787 bp, Zea Mays
tagcctttatctctgggggctatatttatttgaagtaaggtcaaatggtatggaataaccctagcctatacatttgcttgttcccaagaaacctttgcttgttcctgaccagggaccaatgttatctatggatggataaatacttgagcaaacttggcatggtttagccctgaaggcaaagcaatgtagctaggaacaactctgggttggcatacatatagtagtcaaaaggttattccagtgagactggaggaatgatgaaatcttttcaatggaaagcaagaatgcagagagcatcaggaatcttcttctgaagatagtgtttcccttagcttttcccctggctggtgcttttatctgtgacctcataacaaacagggcaagcagccacagtagccatacgggctcatctgatagttcattccaattggaacaatcgtccggttcaatctgtggagaagaggaagaagagatggaaccaaaaccaactcgcggcgcacagcaaaagttagcgagaacagagagtgcctgcagcgctgccggtagactcctgatgagtgagcttgcaaggcaggcttccaacgccgaagaaatcatggtggtcgaggccgccaccgagggtccacgagaagccgcagccaagaaacaggtccaggacgaccagggaataatggaggcggacgagatcgcaagcctgaagctcacggtgtcggccctcgaagacagggctaccgccatcgaggcgcagttccacgagtactgcgacgtgaaggagcaggagtcggcgtaccagaagatgcagatcatgtgcctgggcatgaagctggagctgctggagtcccacaaccagcggctggaagccgcggcagcggagatccgcgcggccgctggagagttcgcggccatgagaggcaggctcgacaggctgcaaggcaagctgaagaaggtgtcgaagagaagcgagcgaggttcggacgctgtcgtcggcgagaaaatcgcggcccttgacgcgaagcaagcccagatggcgagacggtgcgaggagttcgagcgggccatgggtgagatgaagcagctcacgttgcagcttgtggagcagaagggagcgaacaatgagaacgtggaggtggcggtggagaggagcctgcggaacctgtcgagcggcagggacctggtggacgggctggaggcgctgcgggaccggtgggcggccggcatggaggagatgatctacctgggctggatcacggcctggctgcagcacgacctgatgctggtcgacgacgacgacggctacggcggcgcggtgctcggtcctggcagcaccacctacggtggcggccacggcgacgacgacgaagatgttcgagacggcgtggcgccggaggaggaggaagaggagggtgagaagaagaaaaagaagaaggagaagaagaagggggacacgatggtggcgtcggtgccgccgagcaaccaggtggagctatgcaaggccgagtccgtgtcgtcgtcgtccgggtccgggtcggccccgcgccgcagcgtggagatggagccgccgtcggcaccgtgcatggggttcgcggcggcggcggccggcgggcgcgggagggactgcggcggcgggtggagcatcgggcggccgaggctgctccggaagctgcgcgggtgggccgccggaggagggacgaaggccggcggcagcaagaccacgcggtgcaggatcgcgggcccatgctgtcagaaagaataagtttaacttattacgatagatttgctcgtgagaa

SEQ ID NO: 109857 - DNA, 1497 bp, Zea Mays
tgcatgcatgcgtgcacagagacacccacatctctcgttcaccatgcctgcttcaccctacagctacacactactggtcgggcttttcctcgtctccctgctgctgcacagccccaggccgtgctcttgtgcgaattaccacactctcgcggcgggccaggcgctcgctgtcggcgacaccctcgtctccaggaacggcaagttcgcgctcggcttcttcccgtccggcaccaccaccacacccgccgccactggaggagaacaagcaacacccaagattgcgatgggacgattattagatcattcacgtatagtcacctacgccacgcgacaagaaacttctctgacaggctaggaggcggcggatttggttctgtgtacaagggaacgattctagggagggacgacgatggttccgcggtcactactatagcggtgaaaagactactagatggtgctcgtcagggagagaagcaattcagggctgaggtgagttcgataggcctgatccagcatatcaacctggtgaaactggtcggtttctgctgcgagagcgataaaaggttgctagtgtacgagcacatggtcaatggttctctcgacgtccatctgttcaatagtaatggcggcggtggtggtggaaaggatggtgtcgtcgtcctagactggagcacgaggtaccagatcgccgtcggggtcgcgagagggctggcgtacctgcacgagggctgccgcgagcgcatcatccactgcgacatcaagccggagaacatactcctcgacgcgtcgctcgtcccaaagatcgcggatttcgggatggcggcgatcgtgcccagggatttcagccgcgtcctcactacgttcagaggaaccataggctaccttgccccggagtggatcggtggagaagccatcaccgaaaaagtggacgcctacagcttcggaatggtgctgctggagatcgtgtcagggaggaggaactcgcctaaggtatacaccaccaacagctgccacgtttcttatttcccgttgcaggccatcacgacgatgctccacgacggagatgtgaatagcttggtagatccacagctgcacggcgagttcaacttggaagaggctttaaggctatgcaaagttgcattttggtgtattcaggataacgaacttgaccggccgacaatgggtgaagtggttcaggctctcgagggcctacatgatgttggtatgccccctatgccaagacaacttgcaactatagcaagaaacgagttgtgatacaaattattagaagcatttcttttcttttctttttttcctttgttccctccacgatttatagcgatgacaagaagctatatatgcaattaaacgtagcatatataaggtgcaggagttttatactttatgtttatctcttcatgtttgtagcaatggtacgcaatgcaataattgtaccaacgcatcatgctatacgaatattttttttggtgaatggtg

SEQ ID NO: 109858 - DNA, 2904 bp, Zea Mays
tatatcatcccctcggacccctccccttctcataacggcagggcatgcatgcatgcgtgcacagagacacccacatctctcgttcaccatgcctgcttcaccctacagctacacactactggtcgggcttttcctcgtctccctgctgctgcacagccccaggccgtgctcttgtgcgaattaccacactctcgcggcgggccaggcgctcgctgtcggcgacaccctcgtctccaggaacggcaagttcgcgctcggcttcttcccgtccggcaccaccaccacacccgccgccagtaagtcctcctcctcctctgacaacaacagcaacaccaccgccgtctccaactggtacctaggcatctggttcaacaagatcccagtcttcactccggtctggattgctaaccgggatgacccgttcaccgacccagacgcagaccccaataataagctcctccccaaacggactctgcaaatctctagagacgggaaccttgtagtagtccaggaggacaacaacgctcctcaaagaactgaaaccctagtcgtttggtccaccaccaccaccagcagcaacaccaccagcaccaacaccaacaacaccagcaccaacaccaccaacaccgtcgccgagctcacccacaatggcaacctggtggtgcgcgacgcctcggcctcggacgcgtccaaggtccggtggcagagcttcgactacccaacagacgtgtacctcccgggatccaagctgggcaggaacaaggtgacggggttgaaccgcgtcttcgtgtcgaggaagaacagggcgaacccggcccgcggctcctactgcgtcggggtggactcacggttctcccaggggatcatactcagccagtgctcctcttccgtcgtgtactgggcgtcgggcacattctcactgtcggacgtggatcccagcgacagcggcttcatcagctacaaccagatcgacaacgcccaggagcagtactacatctacaccatacccaacgacaccctctccgtgtacaccgccgtggagacctctggccagatcaaggggcgcgtgtgggtggagagcagccacgcctggcgagacttctacacccagcccatgaatccctgcagcgtccacgctgcctgtggacctttcactgtctgcaccaccaccggcggcggcgacaacaacgcgaacatgtcctgcgattgcatggagggattctctatcaggtcgcccagtgaatgggacctcgacgatcgagcgggagggtgcacgaggaacaaccaactcgattgcgccacggacaggttcttgcccgtgcctggcgttcagttggcctacgaccccgtgcccatgaaagcaactgacgctgatggatgtggccaggcttgtgccactgattgctcttgcactgcttactcatatgctagcactactggtggtggtggtggtgggtgctctatctggcgtggagaattgcttaacaccgcaacagcaagtaccaccggcgacactctctaccttcgcctctctgccaaggatctgcagacgctgagagagaaccaaagatcaggccgcccatctaaggcgacagttgttactgctgcaagcattgcggccggtggttttgtgataattgcgctcatcgtactactcgtttgcagctggaggagaacaagcaacacccaagattgcgatgggacgattattagatcattcacgtatagtcacctacgccacgcgacaagaaacttctctgacaggctaggaggcggcggatttggttctgtgtacaagggaacgattctagggagggacgacgatggttccgcggtcactactatagcggtgaaaagactactagatggtgctcgtcagggagagaagcaattcagggctgaggtgagttcgataggcctgatccagcatatcaacctggtgaaactggtcggtttctgctgcgagagcgataaaaggttgctagtgtacgagcacatggtcaatggttctctcgacgtccatctgttcaatagtaatggcggcggtggtggtggaaaggatggtgtcgtcgtcctagactggagcacgaggtaccagatcgccgtcggggtcgcgagagggctggcgtacctgcacgagggctgccgcgagcgcatcatccactgcgacatcaagccggagaacatactcctcgacgcgtcgctcgtcccaaagatcgcggatttcgggatggcggcgatcgtgcccagggatttcagccgcgtcctcactacgttcagaggaaccataggctaccttgccccggagtggatcggtggagaagccatcaccgaaaaagtggacgcctacagcttcggaatggtgctgctggagatcgtgtcagggaggaggaactcgcctaaggtatacaccaccaacagctgccacgtttcttatttcccgttgcaggccatcacgacgatgctccacgacggagatgtgaatagcttggtagatccacagctgcacggcgagttcaacttggaagaggctttaaggctatgcaaagttgcattttggtgtattcaggataacgaacttgaccggccgacaatgggtgaagtggttcaggctctcgagggcctacatgatgttggtatgccccctatgccaagacaacttgcaactatagcaagaaacgagttgtgatacaaattattagaagcatttcttttcttttctttttttcctttgttccctccacgatttatagcgatgacaagaagctatatatgcaattaaacgtagcatatataaggtgcaggagttttatactttatgtttatctcttcatgtttgtagcaatggtacgcaatgcaataattgtaccaacgcatcatgctatacgaatattttttttggtg

SEQ ID NO: 109859 - DNA, 793 bp, Zea Mays
aatgcagtgcatatgcccctgggattggccaaagtaaacacagtagcatccctcacaattaccagcagccgcgtctggcagtctgatcatccttcttggacgtccttgtacatctacaatgagtatctgcattttgttcgagccccaaactagcaaatgcaggaagccattaacaaaggcgcatcgattacttatagataagtagacctgattctgccattcttcttcttctttcacagtttggctataggtccatatcccagttttagacgagtaagcatgcgtcgacatgggctccatgtactcgcgattctttttgaaccggaccaagtggaagtgggaggatacagtcggatcaaaagccaaatatgtgtagttcattggtacatgggagctgcagtcgggctcgggcacggctcgccattgcttcgtggttgggttgcacacgacatagcccaaactgttgtagtgcggcagctccataaggtgctggaataggatcaggccattgcaggaatccagtaagacgaggcgatggatcccaggctgttccgtcaggtaggagatgaagcctgcagggtcggcaacgtccagaggcacggatcctactgtcagtggcaggtccaggaagctgaagctgtggcggtccttctctggattcatgtagatgagtccctgcatgggttggcggagcttcttacggtggtcgggaccggcaatgaggtcgacgagaggagcccgaccccaacgacccccgctactccgcctccgctagcaagcgggaggttgttgc

SEQ ID NO: 109860 - DNA, 411 bp, Zea Mays
atgcccctgctaggattgcttgtcgccatctccctcaacgttgttgccaccacctcgcccaagcacggtggggagttcgggcatgggcgtggggtgctggctcggactggcgctgtacaccatgagctctgtcctcgtcttcgccacgtggatggtggtcggtgcggtgccatgccaggacctggcgtccgtggccaccggcgcgccgccgaagcaggcgcagtgggcggcgctcatgtccgcgctccaggagcgaatcgtgcaaggaaagggggagccgggcacgcgggcaaccatggatggaagccggcgcggccgggggaccggggcgtggctgccatggattggtcgcggcagccatggatggaagctttgtgggcaagattcgcggcggatttggcagaccggtga

SEQ ID NO: 109861 - DNA, 1809 bp, Zea Mays
atgacctatttcgcagagggaagtctgctcctggggcatgtactagcactgttggaactgaaggtgagggtggaggctgatccccatggcgtccaacattgggatccatccaatgcagctggtctggcgtgtgagaaggaacaatttcatcctcgggaggatgagaatgatgggtgcccagccttgatgagctctttcatggacagtccaatagtccatgacatcgacttggtcagcatgcaggtttcgctggtgacgacgcatcgagagctgtctttcttagcattgaagacttatagagtatgccacactggtgtgatggtgggcatgggccaaaaggatgcatatgtgggcgacgaagctcagtccaaaagaggtattctgatactaaagtacccaattgagcatggcatagtcggcaactgggatggcatggagaagatctggcaccacatcttctacaatgagcttcgtgtggaacctgaggagcaccctataccgctgaccgaggctcctctgaaccccaaggaaaacagggagaagatgacccagattatgttcgagacattcaactgcccagcaatgtatgtggccatccaggccgttctttccctgtacgccagtggtcgaacaacgggtattgtgctcgactctggtgatggtgtgagccacaccgtccctatctacgaagggtacacgcttcctcatgctattcttcgattggaccttgctggtcatgaccttaccgacaacctgatgaagatccttactgagaggggttactccttcactatgactgtcgatcgagaaattgtcagcgacatcaaggaaaaacttgtctacgttgcccttgattatgaacaagagctggagactgccaggaccagctccagtgttgagaagagctacgagatgcccgatggccaggttatcacaatcggtgcataaaggtttatgtgccctgaggttctattccagccatccttcattggcatggaatctgctagcatccatgccacgtacaactccatcatgaagtgtgacatcgatatcagaaaggatctgtacggtaatgttgtcctcagtggtggctccactatgttccctggtattagtgaccgcatgagcaaggagattactgcacttgccccagcagcatgaaggtgaaggtggttgctctgccagagaggaagtacagtgtttggattggtggttccattctggcctccctcagtaccttccagcagatgtggatctccaaggaagggtatgacgaatctggtccgggcatcgtccacatgaagtgcttctgaatttcaggagcagtatatctgttgcttgcattttcagttagttgggatgcaagtttgtcctgtggtctctctagcattattcgttctttctggatattgaagagcagttggccatggagcattgtgcaaggtggtaaagtcgattgatgtattgcacaaagaaacatgtgcagtacttcagcagtatagatcgtgtgtcagtttagttttttccccaacaacagtgccatattaggatgttcctgatgtgcgcagttggtctgggttttacacaacggaagggtgtcagctgtcgcccgtgcagtttgcgtctttgtgagaataactggactgcacgttggggttctaagagggttcatgtaaagagggtgatgcttatgtgaaaaaggtttatctgactatagaaagaacggcaacagttatgaaaaggatattgaaatggatgacaatatgtttcttgaggttgatgataatatgtgttgttagtttttgtgta

SEQ ID NO: 109862 - DNA, 366 bp, Zea Mays
atgggcgcggggtgtgggctcggactggcgttgtacaccatgagctccatcctcgtcttcgccacgtggacggtggtcggcgcggtgccatgccaggacctggcgtccgtggccaccagcccccgtcgcgccgccgaagcaggcgcagtgggcgacgctcatgtccacgctccaggagcggatcgtgcaagggaagggggagccaggcgcgcgggcaaccatggatggaagccggtgcggtcgggggaccggggcgtggctgccatggattggtcgtggcagccatggatggaagctttgtgggcgagattcgcggcggatttggcagaccgacgattcgcggccatggatgtgatttgtgggtaa

SEQ ID NO: 109863 - DNA, 1377 bp, Zea Mays
aaaggaagcatataaatcatgcatataataacttatgtatagccaaaaacataaatcatacaacgtatccattaatttaactagcatccataaatatagactacatatatatataaatgcctcaacaggcttgcggaactaattagaccaaacactcatggacgaaatacttcacttgaccttattacagtctaactaagttgctagcagctcatacttgtattagaccacgcactaattgcttgtagtgcttatttgagaggcgccggtgagaaacaaggaacatagcaaccaaccttccacctgtgtatagctttggaactgctgaaaacactcacttccttgctgtccatgtcatatgctatgaatctacgttcacagtgtgaaaagaagaagaccacattgcgatccagatgcatgctggccacctcgctgtacaactccaatgcgacacttgtggggcaatttcctccaaagagctggagggagctcacagtgtccttcagcacccactcttgtgcatcgtaatcctgaagagcccagatggacagctcgtatttctcttcgttgaagtcgaataattgtttagtaatgcagtgcagatgcccctgggattggccaaagtaaacacagtagcatccctcacaattaccagcagccgcgtctggcagtctgatcatccttcttggacgtccttgtacatctacaatgagtatctgcattttgttggagccccaaactagcaaatgcaggaagccattaacaaaggcgcatcgattacttatagataagtagacctgattctgccattcttcttcttctttctcagtttggctataggtccatatcccagttttagacgagtaagcatgcaccgacatgggctccatgtattcgcgattctttttgaaccggaccaagtggaagtgggaggatacagtcggatcaaaagccaaatatgtgtagtttattggtacatgggagctgcagtcgggctcgggcacggctcgccattgcttcgtggtcgggttgcacacgacatagcccaaactgttgtagtgcggcagctccataaggtgctggaataggatcaggccattgcaggaatccagtaagacgaggcgatggatcccaggctgttccgtcaggtaggagatgaagcctgcagggtcgacaacgtccagaggcacggatcctactgtcagtggcaggtccaggaagctgaagctgtggcggtccttctctggattcatgtagatgagtccctgcatgggttggcggagcttcttacggtggtcgggaccggcaatgaggtcgacgagaggagccctaccccaacgacccccgctactccgctagcaagcgggaggttgttgc

SEQ ID NO: 109864 - DNA, 1833 bp, Zea Mays
gatccatggaccagtccgacgtaacccaaaatttaaacggcctgacccgtgtcgcggaggacgcccgaatgtacaccctataccgctggttcccgttcccaagatagagctgccccagacgctccagaatccatccaatacctttccatcgattcttggcatcgccctctctctaaaccccaactcctcgactcgagcaatccctaggtctccgcgcgaggcggtggcggctgtgaggggattttgattgatttggctcgagatggcggaggacaaggtgcggcggatcttcgtcggcgggttgtcctggaagaccacggagcgcacgctcgagcgcaccttcggtcagtacggcaatgtcatcgaggcacaggttgtagtgaaaagggaaacaggccgctcgaggggatttggatttgtcacattctcagaacctcgggctgtggatgctgccattcgtggaatgcataatgcggaactggatggccgtaatatttctgtgaacaaagctcatcctaggattgctgacgatgactatggctatggtggtggtggtggtggtggttactcgtctggtgctagaggtggatatcgtagtggcggtgatgtagttccagcagtgagtgatgaatgtttcaaatgcggccattctggacatgatgtagttccagcagtgagtgatgaatgtttcaaatgcggccgttctggacattgggctcgtgaatgcccttattcagatggcagtggtagaactggaagatattctcccgcttcaaggtatggtggtggcgctgggggacgtggtgaccgcgttggaggatcagatcgttttgctcgctatgatgatgaccgatatgatggtggccggtctgtagacagcagggatacttattatggtgctgggcgagatcgttatgctagggatcgccatctgccagcaacagaccaccattctggtgacaggtacagtggtgcagatcgttacacgtccagtggctttgccatagaaaggagctatgagagagatggaggcaggtccactggaacttactaccgtgatgacccgaggggcactggtggctatggcagaggtggttcacgtggcggcggcggcgggcctgctcgctttggtgggagttaccgagataggcctgctccgtatgaccgtcctagcaggggcggggcagctcgtgcttatgatgatcgttactgaagaatgtttccttgaagtagaacagagatgttggtgtattttagttttgcatcagtatttgcacttgccagcttgatccttcaattctatgctattcagcagcgcagtttgttttagtggtctctgaagacaatggttcagtatgtcagttactatcagtatgttggtaccataatctgtaggcagtgatcctggtccatttgacatgtttgtgtaattgcttggagtctgcactaaataatgaactaatcgcagcatgtgatctttgaatcagcctggtgttctgcttactgagatagctgtgccacattctgcattgtggatgaactttgcaccgataattctgagatgtgctgtgcggcaatgtgcagatcgatctgttcagctcttgatgctgttgggttttgttggtctaatatcaggaaggtttaattctgcttctagtctgggttgagtaagatggtgggaatctgagtctcagaaaaactgtggttcatgcagtcaggtgatggttatgatgttttcctgatgcagatgaatgcgttatgttactgatttactagcgatgtctggtgcagatccgcagataaatttggcttctttgctttgttctctggctt

SEQ ID NO: 109865 - DNA, 2397 bp, Zea Mays
gtcccgtcccgttctgcctccacacgccgccagaacgagaatccccctccccgtcccggcgtccccggctcccgagctccccctccagcctccccttccccggctcggccgcaccccgtccccggttcgttagagcgcgagcgcgcggcagccggccagccccaggcagccggcgccccgcggccaggttggctctcgctctcccctccggcacacctcgtccccggttgtccggctccggctccggatcagcagcgccccgagcacgagcgggaacgcgcgaacgccgggacgcggcagggtgcggcggggcggggcagctaggctctgaggcacggcagacggcttgcagtcaagatctctcaccagctgaattgccgattcacacatccagccatctcgacaacttgggtacacacgggacttcatcttaagagaatttagaacaaaaaagagagcatgtcagacctgcttcctgaagatgtacttgtcaacatcattggtcgtcttgcaccacgctaccttgccatatcccggtgcgtttgcaagacatggtgcaccaccattgatgcccataatctgctgcgtatggatctactcccacactcagtgtctggactctttattaacttcaatgagttaagcatgtcggaattcttatcccgcccctcaaaaggaccagcaatatctggtaaatttgactatttgcctagcgcgggccaagtcatagaccactgcaacgggctcatcttgttacacgaatgtgtagttaacccggccacacgacagtgggcgctgctgcccccacgcccaagcccaaatatgcctgagcacttttgtcacgggatgtaccttgtctttgaccccacattgtcatcacattatgaggtattcctgatccctcaggtctcatacaattccaacttagaccctgcaatagaggaattggaatggccaccttcgccttgcatcgtacaagtgttgtcatcaaggacaaagttgtgggaggagaggttgtttgttcgagaaggagaggctgcaggtaatgtcgctgacattcggttggattttcaagctgttcaggagaatgctgtctattggcggggagtactttatgtaaattaccaatccaaatttattatgaggatatcattgtcaaatgataaataccaagtaatcaagccacctgtagattttgaatggtttgaatttgaaaatgaatccaggctatccaaaaacctttatttgggaaaatcagagaaaggggtgtactgtgctttgcgttatccgtcaaccgtttccttttcgatttacattctcgatgaatctgacggcaaaacggagtggataatgaagcctcactattatctcgggagtcaaggaattgacgggcctggaccctggactctacaagatatcaactataactgggacacccagtatgaagacagtatggaggaaaagttcgagtgggactccgacagcgataatgttgtcgagaacagaagcaacggtggatatccttgccttcctcgtatagaacttcttgggtttcacccctacaaggatgttgtcttcttgagcgacacgctgagacgaggattggcctatcacctagacagctcaaagatccaagacctgggtaacctccatccaacatattatggaactgaacaggggattcagccatttctactgacggctttcccatacacaccctggaggggatggtttccagaagacacataatggtacatacagagtaccgaacgtaagacataaagaaggcattagctgatctgaaaccgaagttctgaccgggcatggcgaaggtccctccttcacggtttcctgatgctgctgccgctctggatcgacagacttcagcttgagagtagtttagccagctgcttagcgccgtggacgtggggatggacacgtcgcattgcgcgcttagtggctggttttgtgcgttgtttggctaagtttttttttttttggttagaataaaagggagaagagaaaacactccagttgcgcagcaccaaaaccggttcaccactctcttgtcatttgttttgtttgttctcatcggggcgtgccaaaattttgctttctggcagctagcctagcggacccaatggtagattcatccttggggaggatggcagttagggaaaggttgtgctatgcgaccgtggagcgtggatgtggatgatgctggtaggcagaaaaaggtttcggagggcgattgggatcggttgcgagcgaccagattttgatgcgcaccccagcagcatctcagggcagcgtagtcggtctccgcccaaggcgatgcgatggtatttagggtcctaacgaattctgaacaagtatttgaatcataattcattacca

SEQ ID NO: 109866 - DNA, 829 bp, Zea Mays
gtcccgtcccgttctgcctccacacgccgccagaacgagaatccccctccccgtcccggcgtccccggctcccgagctccccctccagcctccccttccccggctcggccgcaccccgtccccggttcgttagagcgcgagcgcgcggcagccggccagccccaggcagccggcgccccgcggccaggttggctctcgctctcccctccggcacacctcgtccccggttgtccggctccggctccggatcagcagcgccccgagcacgagcgggaacgcgcgaacgccgggacgcggcagggtgcggcggggcggggcagctaggctctgaggcacggcagacggcttgcagtcaagatctctcaccagctgaattgccgattcacacatccagccatctcgacaacttgggtacacacgggacttcatcttaagagaatttagaacaaaaaagagagcatgtcagacctgcttcctgaagatgtacttgtcaacatcattggtcgtcttgcaccacgctaccttgccatatcccggtgcgtttgcaagacatggtgcaccaccattgatgcccataatctgctgcgtctcatacaattccaacttagaccctgcaatagaggaattggaatggccaccttcgccttgcatcgtacaagtgttgtcatcaaggacaaagttgtgggaggagaggttgtttgttcgagaaggagaggctgcaggtaatgtcgctgacattcggttggattttcaagctgttcaggagaatgctgtctattggcggggagtactttatgtaaattaccaatccaaatttattatgaggtag

SEQ ID NO: 109867 - DNA, 1535 bp, Zea Mays
gcttcaagtctccatctggtttggcagtacacaaatatttatgtatattttttttataaaatatgcagtgcaatggggaaagaagttgttgatatgtctactgatgaagaatcagattgcgtagttatgtgtccacctaacagaaatgctgatcatgaggaagctgtgagtggcagccatgatgaagattcttcaggaaggcaagagaacccttatgctgtgaactcacatatgaacacccgtggccaggaagatgtgtctgtaaacccagacctgctcaagctgattcatcagcaggagtcttctgtcagcaattcaccatcaaaacctgcaggagctagacagcaagggtctagccatactgtccctgagtcatgcactattgcacctgaaagaaggtcatctggagcaggaacttgtgctccaatttcttatcccaccagcagcggggaaaaactttcagatataagtagctcctcaccaagaagcatgacaaagagtccatcagtcacatgcaggaagcctctccaatctgacaatacttctcacagtcaagaagaggactcatattctgtcacttcttcaactgtaacttcagcgagagctggaaaaactaagaagacaacggttgctgttgcacctacatttgtctgtgataatcgtgctgagaagagaggagagttttacacaaaattagaagaaaagcgcaaggctttggaagaggagaaactccaagcagaggccagaaagcaggaagaggaagaagaagctctaagacaactgaggaagaacttggtcgtccgagcgaaacccgtgccgagcttctaccaagaacccccaccaaaggttgaacttaagaaggtgcctccaactcgtgccaagtcaccaaagctgacgcggaggaagagctgcagcgacacgcctcacacaccagagggaggaaacggcggcggcggcgcagtgtgctgccggctgcaccgccacagcatcgggaactccaaagacatcggcagcaaggcacaatgctctccaaagactggaccagctgctaagtccagggcgcccccaaatccagggaagacccgagggcttccatgaagaaagcgggacagcagacaagcgccgccgctgtacaaacctgacccgtgaagcatccattgccatgccgtttttcatcttaatccatataccctcacatcacccggaaagatggcctcatgccccggcaacagacagcgtgcctggtgctggattgtttttttttgggcgttgcccttgtaagaacctggctgcctgccagagaccgtgcgctgtgtccgtgtctgtaaatttgctgcaagttttgtatggggtgaccgagtcggtcctgtgtgagaaccaaacggccgggcatattgtcattgcgtggggggcagcattcgctgatactatgtaatgtacctgagtgagctgtaacctgttgtgggcatattggcaaagcgattctgattgatgtcgaaaaaaattgaccaggtcatgcatgattcttttctttt

SEQ ID NO: 109868 - DNA, 1908 bp, Zea Mays
cccgaggccccgagcccctgtgcctcctgcggtcgcggcacggacggcaccctcgggcctcaggtcccaccctcgcctccgcccgcggccccgggcggtaccctcaccgccgggcccacctcgccccctcgcctccgcccgcacaaacagccgaccgccccctggccgcgacccgcgcccagacacacacgagcgcagcgcacgcaggcagaggagggccgcgcgagctctgcgcggtggcctgtggtggggcgagggaagcgaggcgaggcggggcggcccggcagccgcctcctgactcagtcggtgggagctggaggtgcgagctgacggtccgggttaccgaccgggcagcacggcggccacagcggaggcaaacggcgggggcggcgaccccggggccgcggcgaggcggcgctgggacctgccggccggaaacattgcaatggggaaagaagttgttgatatgtctactgatgaagaatcagattgcgtagttatgtgtccacctaacagaaatgctgatcatgaggaagctgtgagtggcagccatgatgaagattcttcaggaaggcaagagaacccttatgctgtgaactcacatatgaacacccgtggccaggaagatgtgtctgtaaacccagacctgctcaagctgattcatcagcaggagtcttctgtcagcaattcaccatcaaaacctgcaggagctagacagcaagggtctagccatactgtccctgagtcatgcactattgcacctgaaagaaggtcatctggagcaggaacttgtgctccaatttcttatcccaccagcagcggggaaaaactttcagatataagtagctcctcaccaagaagcatgacaaagagtccatcagtcacatgcaggaagcctctccaatctgacaatacttctcacagtcaagaagaggactcatattctgtcacttcttcaactgtaacttcagcgagagctggaaaaactaagaagacaacggttgctgttgcacctacatttgtctgtgataatcgtgctgagaagagaggagagttttacacaaaattagaagaaaagcgcaaggctttggaagaggagaaactccaagcagaggccagaaagcaggaagaggaagaagaagctctaagacaactgaggaagaacttggtcgtccgagcgaaacccgtgccgagcttctaccaagaacccccaccaaaggttgaacttaagaaggtgcctccaactcgtgccaagtcaccaaagctgacgcggaggaagagctgcagcgacacgcctcacacaccagagggaggaaacggcggcggcggcgcagtgtgctgccggctgcaccgccacagcatcgggaactccaaagacatcggcagcaaggcacaatgctctccaaagactggaccagctgctaagtccagggcgcccccaaatccagggaagacccgagggcttccatgaagaaagcgggacagcagacaagcgccgccgctgtacaaacctgacccgtgaagcatccattgccatgccgtttttcatcttaatccatataccctcacatcacccggaaagatggcctcatgccccggcaacagacagcgtgcctggtgctggattgtttttttttgggcgttgcccttgtaagaacctggctgcctgccagagaccgtgcgctgtgtccgtgtctgtaaatttgctgcaagttttgtatggggtgaccgagtcggtcctgtgtgagaaccaaacggccgggcatattgtcattgcgtggggggcagcattcgctgatactatgtaatgtacctgagtgagctgtaacctgttgtgggcatattggcaaagcgattctgattgatgtcgaaaaaaattgaccaggtcatgcatgattcttttctttt

SEQ ID NO: 109869 - DNA, 660 bp, Zea Mays
gttgtgcgtcacccttcctactttatgcaaaaataagtgttctgaaggattcatgcataccaggatgaggcgcagggttgagtcgctgatccaggcgttggaccgggcgaagtctgatgctgagaagttgaagaagttggtacacggtggatctttcaaaagactgagcctgaagaacgagggggactcgcgtttctgaagggaattggcaaatgttgttgttttccatttggctaatgacttctgttgtgggaagcttacttccgttcagttttgggagcgaaggctcggaaccggttaaatccatgccattgaattttaatgtaaattcgcgttgcttttacatatttactagcctgaaatctctcggcgtatcagttccatgacacatcgcctttgcaaccggagagcctgctgcctgcatcttggtgcaagtagtttgtttttgccatgagatgtctgagtctgatcttttttggcattaataaatgtgttgttcttggatcacatgatgtagtagggagttgaggcttggttgaatcacatgaccactcacggtcacggtacagcatcggctgagttatgtcgagcagccgcattcatttttttataagcttgatggtgtattgttttataagcttcggctgagttacgctcgaa

SEQ ID NO: 109870 - DNA, 942 bp, Zea Mays
catctctggactagcatcggctcttattgtgttctatgtgcaaacccaagtcccaacatacaaaccccaaatatgtaaatcaatcagtctaaaatctttgttctaacaactccatcttgcactactactgatatgcagaggagcatacattatcatgtgtcaacacattacttatattattaatataaacaaaccgatagattatcatgtgtcaacacattacttatattattaatataaacaaaccgataccttcgttgttattgttgtctcttatgatttttattttcttttggaagcaatttctgtcatagtaactattagccttctatgaacttttgatattagttttacactaatttgttacttataattttgcaagttctcaattgccatggtttcttgtatcagtgttctgaaggattcatgcataccaggatgaggcgcagggttgagtcgctgatccaggcgttggaccgggcgaagtctgatgctgagaagttgaagaagttggtacacggtggatctttcaaaagactgagcctgaagaacgagggggactcgcgtttctgaagggaattggcaaatgttgttgttttccatttggctaatgacttctgttgtgggaagcttacttccgttcagttttgggagcgaaggctcggaaccggttaaatccatgccattgaattttaatgtaaattcgcgttgcttttacatatttactagcctgaaatctctcggcgtatcagttccatgacacatcgcctttgcaaccggagagcctgctgcctgcatcttggtgcaagtagtttgtttttgccatgagatgtctgagtctgatcttttttggcattaataaatgtgttgttcttggatcacatgatgtagtagggagttgaggcttggttgaatcacatgaccactcacggtcacggtaca

SEQ ID NO: 109871 - DNA, 1689 bp, Zea Mays
cgagagcagcagagcgccaccacgcagcacgcacggacgccatcgaggaaccctagaccagagcacatcacacggccggcgactggcgccccctcttcggtccccagcgcggcgacgccctcctgcttgagcaggtgtcctcttctgtctgcttgagcaggtgacttcctgggctttaggtactcgctttcgcttccaaccagcgcgtcctcagccagcgctggaggccgcccagccgcgcctgcgaccgcagaccgcgcgtcctcactcagccagcgctggagatctcctgtccgcccagccgcgcctgcgacagtgcgaccgccctcctgcccccagcactgcaagatgatactgctccagtccccatcgaggttcctgctccagatcctgcaagaccgtgttctcagtggcgagaagggcatggacattgactgtcacacggtagagttcgatgatgtccggtatcatatccagttttctatgaggaatccaaaggtaatggtgttgtcagttgctttgcctctgccacctcctgaagcgattctgtatgatgggctaccactaggtgccattgaagctataaaagcagcatatgggccagttgtgcagattcttgatcctccaaaggacgggtttgatctcacaatgaagataaatttgacaaaacttccgctagatgaagagcaaaggaatactatcttgacacaaattgcatctattagagaggttgtgttgggtgcaccactgaagctcctgctgaaacatttagcctcaaagacagttgcacctaatgttaacaaccttgttgctcttgttcaccgccctaatgaatcatttttccttgctccccaggcagataaagttactattgtgtatccaatgagattccaggactccattgatattgttttagcaacttccttcctgcaggaatttgtggaggcaagacgaacagctgcacttaataatgttccttcttgtatgtggtctccggtaccacctcttgagttaaaaggagtatctgctgatgcactaaatgcaaatgctggctttgttactttcgttgtttaccctcggcatgttgagggtaaaaagctagatagaacagtttggaatttgttgacatttcatgcttatgtaagctatcatgtaaagtgttctgaaggattcatgcataccaggatgaggcgcagggttgagtcgctgatccaggcgttggaccgggcgaagtctgatgctgagaagttgaagaagttggtacacggtggatctttcaaaagactgagcctgaagaacgagggggactcgcgtttctgaagggaattggcaaatgttgttgttttccatttggctaatgacttctgttgtgggaagcttacttccgttcagttttgggagcgaaggctcggaaccggttaaatccatgccattgaattttaatgtaaattcgcgttgcttttacatatttactagcctgaaatctctcggcgtatcagttccatgacacatcgcctttgcaaccggagagcctgctgcctgcatcttggtgcaagtagtttgtttttgccatgagatgtctgagtctgatcttttttggcattaataaatgtgttgttcttggatcacatgatgtagtagggagttgaggcttggttgaatcacatgaccactcacggtcacggtaca

SEQ ID NO: 109872 - DNA, 2165 bp, Zea Mays
gacgagagcagcagagcgccaccacgcagcacgcacggacgccatcgaggaaccctagaccagagcacatcacacggccggcgactggcgccccctcttcggtccccagcgcggcgacgccctcctgcttgagcaggtgtcctcttctgtctgcttgagcaggtgacttcctgggctttaggtactcgctttcgcttccaaccagcgcgtcctcagccagcgctggaggccgcccagccgcgcctgcgaccgcagaccgcgcgtcctcactcagccagcgctggagatctcctgtccgcccagccgcgcctgcgacagtgcgaccgccctcctgcccccaggtacgcagccggcccctctcctccctcctccctcttccctccgccagtccgcccacaggctagtgcgccgccgtgccacaggccactgcccagtgcccactgcgccgcgctgcacggccaagctccagtgcccacttgctgccgctgcatccacttgcccggccaagctccagtgcgccgccgcatccacttgttgccgctgccctcaacggcccagatccatccgctgcccttgctgcccctcacagtgaatcacctctgcggctgggagtgaggggtcccagccacttcccactgggccgcagaccgtcggcctctgcgctgcgtctcacgtctgtggccactccacaagaccagcagccaagccaaattctatgtcaagtctgaaaagacgttcaacgttcgtttaaacgtttaaatgttaaaaagttagttcataacgttttaacgttttaccgcttccggggaggaaagcactgcaagatgatactgctccagtccccatcgaggttcctgctccagatcctgcaagaccgtgttctcagtggcgagaagggcatggacattgactgtcacacggtagagttcgatgatgtccggtatcatatccagttttctatgaggaatccaaaggtaatggtgttgtcagttgctttgcctctgccacctcctgaagcgattctgtatgatgggctaccactaggtgccattgaagctataaaagcagcatatgggccagttgtgcagattcttgatcctccaaaggacgggtttgatctcacaatgaagataaatttgacaaaacttccgctagatgaagagcaaaggaatactatcttgacacaaattgcatctattagagaggttgtgttgggtgcaccactgaagctcctgctgaaacatttagcctcaaagacagttgcacctaatgttaacaaccttgttgctcttgttcaccgccctaatgaatcatttttccttgctccccaggcagataaagttactattgtgtatccaatgagattccaggactccattgatattgttttagcaacttccttcctgcaggaatttgtggaggcaagacgaacagctgcacttaataatgttccttcttgtatgtggtctccggtaccacctcttgagttaaaaggagtatctgctgatgcactaaatgcaaatgctggctttgttactttcgttgtttaccctcggcatgttgagggtaaaaagctagatagaacagtttggaatttgttgacatttcatgcttatgtaagctatcatgtaaagtgttctgaaggattcatgcataccaggatgaggcgcagggttgagtcgctgatccaggcgttggaccgggcgaagtctgatgctgagaagttgaagaagttggtacacggtggatctttcaaaagactgagcctgaagaacgagggggactcgcgtttctgaagggaattggcaaatgttgttgttttccatttggctaatgacttctgttgtgggaagcttacttccgttcagttttgggagcgaaggctcggaaccggttaaatccatgccattgaattttaatgtaaattcgcgttgcttttacatatttactagcctgaaatctctcggcgtatcagttccatgacacatcgcctttgcaaccggagagcctgctgcctgcatcttggtgcaagtagtttgtttttgccatgagatgtctgagtctgatcttttttggcattaataaatgtgttgttcttggatcacatgatgtagtagggagttgaggcttggttgaatcacatgaccactcacggtcacggtaca

SEQ ID NO: 109873 - DNA, 875 bp, Zea Mays
cgagagcagcagagcgccaccacgcagcacgcacggacgccatcgaggaaccctagaccagagcacatcacacggccggcgactggcgccccctcttcggtccccagcgcggcgacgccctcctgcttgagcaggtgtcctcttctgtctgcttgagcaggtgacttcctgggctttaggtactcgctttcgcttccaaccagcgcgtcctcagccagcgctggaggccgcccagccgcgcctgcgaccgcagaccgcgcgtcctcactcagccagcgctggagatctcctgtccgcccagccgcgcctgcgacagtgcgaccgccctcctgcccccagcactgcaagatgatactgctccagtccccatcgaggttcctgctccagatcctgcaagaccgtgttctcagtggcgagaagggcatggacattgactgtcacacggtagagttcgatgatgtccggtatcatatccaggtaagtaagttctatactgtcgcatagatttgtgtcaaaaggatggtatatgtataccaccatggcggcaatggcttgacacattttggcatcaatcctaatcagtgtcatattcttggggtagctaacttttggaagttggttttggtacaaattaaacagttgatcctaaggtggctatccactcgatggttaggtccaaaaatatatatacagtttgcagttttaatcctgcataatataactcaatatataacgatagtcagtactcagtagttaattgggtctattcttcccagtttggtatgtgccatttgatagcatgtcccttttaaccccaaattacctctttgttcacaagaacagtaacaagagcaatgaataaaatgctgtcagcc

SEQ ID NO: 109874 - DNA, 2215 bp, Zea Mays
cctgcgcccctttgctgtctcaaacctaccttaaacccttgttagtttctagaaccttccagacctccagttcccgacctcggcgccatggacctggacccagaggggatcttccgcgacgacagcgatgaagacgaagacagtgtccaggagagggaggcgaacaaggagatggttgtctaccttgtcgacgcctcgcccaaaatgttcacccctgccaccacccaggacaatgaaaagcaggagacacatttccataccattgttaactgcatcacagagtctctgaagacacaaattattggtagatcttatgatgaagtcgcaatatgtttctttaacactaaagagaagaagaatttacaggactcagccggtgtttatgtttataatgtcggagacagagagcaacttgatagacctactgcaaaactcatcaaggatttttctttgatagaagattcttttatgagcaccattggaagtcgatatggaataacagctggatctcgggagaataccctgtataatgctctttgggttgctcaggcgctgttgcgcaagggatctgtgaagaccgtgagtaaacgaattcttatattcaccaatgaagatgatccttttggtactattacaggagcagtgaaaactgatatgattaggacaacacttcaacgtgcaaaggatgcacaagatcttggcctgtctattgaacttcttccactgagcccgcctgatgaccagttcaacatgtccctgttttatgcagatttgattggtctggatggagatgagatgaccgaatatttgccatctgctggtgataagcacatatattagtatccagtgggacgagactgggaatagctaagccacatgaatacatgattttggagctgaagtttatcagtgatctgattgaatacgtaaggctaattctcgctgagataagaggcgttgagaggtctttcatatgcaatgatactggggctctacttcaggatgcacagacacgtttccagatgtacaatgacacaattgtcaaattttctgtacgtgaactctctgaggttaaaagggttgcaagccatcatcttcgccttataggtttcaagccattggattgcttgaaagattaccataacttaagaccatcgacatttatttatccgagtgatgagcgtatatttggaagcacctgtgttttcgttgctttacatagctcaatgttacgtcttggaaggtttgcacttgcattttatgggaatccaactcgaccacaactcatagcccttgttgctcaagaagaggttacttcgtctggtcgtcagtttgaaccgcctggcatgcacatgatctatcttccatactccgatgatattagatatcctgaagaagttcatgtgacttctgatgatgcaccgcgtgcaacagatgaacaaatcaagaaagcttcgaacatattcaaacgtattgatctgataaatttctctgcatgccaatttgctaacccagctttgcaaagacactatgggatcttggaggccttagctttaggcgaagatgagatgcctgatataaaggatgagaccctgcctgacgaagaaggcttgtctaagccaggggtagccaatgctattgaggaattcaagacttcagtctatggtgaaaattatgaccaagaggaggcagaagcggcagcagggaaagcttcccgtggtaatgcttcaaaaaagcggaaggaggtcactgatgcagctgcgcagataagtgctgcttatgattgggcagaacttgcagacaatggaaaactgaaggaaatgaccacggtggaattgagatcctacctgaccgcgcatgatctcccggtttctggtaagaaagatgtacttatcagcaggatcttgactcacctgggtaagtgaagccgggtatccgaactgttagtttcctgagacccgactgacatctgtagtgctgtctcgcggatccttgtggaccgtaatcctcccccgtgcaggctacgtgccgattttttgtatagcgacaggacagcaccagttgccaatgtaacctgtgttaagtttcgtcttgtggtatcatctgcttgtcattgtcaacatgaaacataatgtaattctggatacttagacccacaatatggagcataactgcataaggtatgttaaagcataggccctctttagcatggcta

SEQ ID NO: 109875 - DNA, 802 bp, Zea Mays
gagacaaggccaaaatcatcgctgcgccgccagtggacgcgttcgactccggccgccgcccctgctcctcctgcccacccgcaccggccattgccctcgcctgctctgccacccgcaccttccaccgcccccgcgtgctcctccgcaggtctggccgttgcacccacctgctccccaccaccgccgccccacccacttatccaccgttgccggtcgtcgccccacctgctcccccactgacaccggtcgaggtataatctcaccctgggtgaagcttcacccgactgctccgatcacaccgaaccaaacccatccgagcgcatatacccagcaaaaaagtggacacattttttacagcctaggttttccgctgcgccccctgttttcgaaatcctttccctagcgatcataactgacgccccgaatcgccgcgcggcgggggaggagattcatcacgttttctgctagggttttgtatttggactagacagagcggaaatctggtggtggtgattctgtaaccagaagatcagaaactacggaggagtggggttttgtgattggttaccgataggggttttgattcatcggcacccaaattgctgttgattttttcctgcagtttctctcaatgtatttatggtcatggtagtactggattatggatacatttttttcaagtgattcataatctgcatcactcctttttaaaaaagatcatcaatgaggagtgatgatatgatgattttttatttatctgttaacatcagtaacatcataatagttttttttcagcaaacaa

SEQ ID NO: 109876 - DNA, 392 bp, Zea Mays
atgtcggggcgcgacaagggcgggaagggcctgggcaagggcggcgcgctgcgccaccggaaggtgctccgcgataacatcccggggatcacgaatctgacgatccggcggctggcgcgcaggggcggcgtgaagcgcatctccgggctcatctacgaggagacccgcggcgtcctcaagatcttcctggagcaatgctgctggtttaggggttcttcgcgcgcgcatccggtcaggcctccaaggtcggtggccatggctcagtgtcgccatcacctcctcctcatggttattgctgctccgcggcaggcgagagccatggggaagcctttgctgtcctcatagatgtcgcattgcaccactacctgcgggtccagcaagccgaccaccag

SEQ ID NO: 109877 - DNA, 354 bp, Zea Mays
atgggggtcgcggcggggacggtcgatgctaggaagtttgcatgtgccaagaaggagaccatccatctcagtatcaccgagtcggaccatatttgcatgagggggacgagagagagcaccgaaggggagcgaggacttactggtggcgccggtgatgaggacgataacagggcggcgaccctcttgaacccagatggatggcgttcctgtgggtgtctcgggcgggtgccagcgcgtcgggacagggccggacgagagaagcgggaggacgcccgcgactgcgatgccgtggagggggaggggcgatgcttgcgcgagtcggtggctgtgatgggggcgagggatgcgtcttag

SEQ ID NO: 109878 - DNA, 154 bp, Zea Mays
tttctactttttttacagtgtttttatctatggattgccgctggagtcgtccaaacaaaccggcgttaacctgcttaatgattagagggtggagaaaaagacatgaatcagtctctcatgtaacaatggcaatatacatagtgggtattttttt

SEQ ID NO: 109879 - DNA, 725 bp, Zea Mays
agtgctcctcttctttccttccccttcccatctccgccgccgccgccccttactcctccagagttgcgcctcctcctcctcctctccagtggcgccgtcccccgcgccccttcctcctcgcagtcacggccgcgcggcacgtgctccgcctcgccgtcgccgttgccgttgccgtcgccgccgccaagtaaagagagacagggaggcgcagtagacgggggcgtggtgaggagggagtcaagcggaggaaggaagggggactgcggccggcggcggactaccatgtcgtctctgggaacttccaaggggatcctggagatcgcgaagttcggcgtctacgtctccgtgcccgtcgcgctcacctacctcgtcgccaccgactccaagaccctcaagaagctcatgggcctccgcccgtacgtggtttacccgcctgaaggcccacgccctccaccgccagaagaactgcgcgaaagggcacgggagattgcccggaagaggcagcagagctgaatgtatgctgtgggttctctaggggcgcctgtgtgtgtggctgtgtctatggaacaacacggacgacgaatcctcccatctcacgagaacagcctgggctggtctttagcatcctttcactgctgctgttgttacaataataataataatatactgagaagcgagaatcggctagatataatataatcccgtgtattttctccttgggagcc

SEQ ID NO: 109880 - DNA, 2515 bp, Zea Mays
tattctccaggctccagtccacccgatctattctacccaaattccccactccacgccgccgccgccgccgccgccatgggaagaaaagacacctcgtcctcctccgcggccaccggcggcgggaaaaaggagaaacctatgtcggtgtccgccatgctcgcctccatggacgctcccgcggccaaggccaagtcttccaaggccaaggccaaggccaagccttccaaggcgccggcgtcctcctacatgggcgacatcgacctgcccccctccgacgacgaggacgaggaggaggcccggctcgccgccgccgccaagcccaagccggcccgcgccgccgtcgtcgatctcagcgccggcgccgcgccgtcgcacaaggacgccaagaagaaggacaagcgcgaggccgtggcggccgcggccgccgaggccgccaggcaggaggcgctccgggacgaccgcgacgccttctccgtcgtgatcggcgcgcgcgtcccgggctcctccgccgacgacggcgccgtcgacgacaacgtcagggacgtcgtgctcgagaacttctccgtctccgcgcgcggcaaggagctgctcaagggcgcctccctccggatctcgcacggccgcaggtacggcctcgtcggccccaacggcatgggcaagtccaccctgctcaagctgctggcctggcgccaggtccccgtgccacggaacatcgacgtcctgctcgtcgagcaggagatcatcggcgatgaccgctcggcccttgaggcggtggtcgccgctgacgaggagctcactgccctccgagccgagcaggccaggcttgaggtctctaatgacgctgatgacaacgagcggctcttggaggtgtacgagaagctgaatctccgggactctgatgccgcccgtgcccgagcgtccaagattctcgcggggctggggttcgatcaggcgatgcaggccagatccacgaagtccttcagtggtggctggaggatgcggatttcgctcgcccgtgcgctcttcatgcagccaacgctgctgctccttgacgagccgactaaccacctggatctgcgagctgtgctgtggctggaggaatacttgtgctcgcagtggaagaagacattgatcgtcgtgtcccacgaccgcgactttctgaacacagtgtgcaatgagatcatacacttgcatgataaaagcctgcatgtctaccgtggaaactttgatgattttgaaagtgggtatgagcagaagaggaaggaaatgaaccgaaagtttgaggtgtatgagaagcagatgaaggcagccaggaagtctgggagcaaggccgcacaggataaggttaagggtcaggctctgtcaaaggctgctaaagaggccgccaagaacaaggggaaggggaagagtgctgcagatgatgacgatgaccagaaacatgtggctgtgccacagaagtggcgtgactacagcgtcgagttccatttcccagagccgacagagctcacaccacctctccttcagctcatcgaggtagggttcagctaccctggcaggccagacttcaagctctcaggtgttgatgttggcattgatatgggaacgcgcgtagccattgttgggcccaatggagctgggaagtctaccatacttaatttacttgccggtgatcttacccctactgaaggcgaggtaaggaggagccagaagctgaggattggacgatactcgcagcattttgttgacctactgacaatggaggaaaatgcagttcaatatttgttgaggcttcacccggaccaggagggaatgagcaaagcagaggctgtccgcgctaagctcgggaagtttgggttacctggacacaaccatctcacgccaatcgttaaactatccggcgggcagaaggcccgagttgtgttcacctctatatcaatgtctcagcctcacatactcctgctcgacgagccaacgaaccacttggacatgcaaagtatcgatgcattggcagacgcgctggatgagttcacaggaggtgtcgtcttggtcagccacgactcgcggttaatatcccgtgtctgcgatgatgagcaaaggagcgagatatgggttgtggaggacgggagtgtggataaatatgacggcacgtttgaggattacaaggatgaactcatggaagaaatcaagaaggaagttgaagagtaacgccgctccaaattagttgtgctttgctgttatttatagaacaagctgttttcttgaactgaaattgcatgtactgttagcgagttttcttactctggtttgcagagtattcatgtggttacaactctggagaacaatatggggcatgcctgttttatgttatacaaggggaacctgagaatatggtattatttgtttgtaccttttgttctgacatcatatatgtgactggacaggagcagtacttttcaatctgctctcatgtttgtagaagctgaacaacgagaaatgaagatatgacttgtatgcc

SEQ ID NO: 109881 - DNA, 1498 bp, Zea Mays
acctgcactgcagcacacgcgccgccgaagcgctctgcccacctcgctcccctccagtggccgccggcgcggctcagcggtccatcctcctgacgccacctgcaacggcgccaggcggtgatccattccaactcgcgctccgtcctggtatccaaacatgtggtctttgggaaggtggtcagtggaatagctttgcttaaaaagcttgaagcagttggtagtgaaactggaaatccttcttatcaagtgaaaattgtagactgtggtgaagtttccaacacaaattctccggatctgctaaagggagagaaagtaagctcaaagacagataacagcagttctgacagtgaaaagggtggccatcataccaagcgttccttgccgaaaggaatggtccaggtggaagctccaggaacaatcccattcaggttgatgtaaatttaacgaaaccagtaaatgtagatggcaacactggtggtgataatgcagaggctggcatgtctagaactggtgaaggaaggcaccttccaagcaatgattctgtgtccaccaatggtaaagatttaggtgtgggttctgcagacaatgggcaacctcaacgaatcaggaaaggacgtggttttactcagaagtatgggtatgcacgccgatacaggacgccatctcccgagcgtccccctgttcgaccccgctacgatggagggagagatgatagatggaacaatttcaataggtatgaaagaaatggtccttacagtagacgctcgccagtaaggagataccatggctcgccaagagccaatagcccatccaggtacccaagaagagaacgaatgaggagtaggtcacgcagcccagtgaggcgccatgaccgtggagggtatcaccgccccagcccaagacgtagccgcagccctgcagaaccgagacagaatgtgaatgataggcctcgatcaggtcatggcggaggcgatcctgaccacagccctcctgccaacaggtccagatcgaagagccgggaccccttgggacccagatctcctgatgctgccccagccaagagggagagctccagatacaaccgcaggcgcagcagcagctcaaggtccagcagccctgatggaaacaaaggcctggtttcgtactgagaagtaacggcacaacagtttgcaggctccatggaccatgtttcttgctagtttagcatcatgtactcttttgtaatggattctgaacttgaactgctttcgatgcaggtgtagatttatatgttctgttagatttgaatgtttcttatgccagatatttatagaactactgagtagagcaggggaaaggctcgagcctcgtgaactggcttgagcttgctaaggcttggagaggctcgcgagtttgtaagcctgaatcgagactacttttatgactcgctcaaacgccgagccctgagcgaacttgagtcgactcgggagtctgcctaataatattgtgctacgttgtt

SEQ ID NO: 109882 - DNA, 2267 bp, Zea Mays
acccgcacctgcactgcagcacacgcgccgccgaagcgctctgcccacctcgctcccctccagtggccgccggcgcggctcagcggtccatcctcctgacgccacctgcaacggcgccaggcggtgatccattccaactcgcggtcatctcaagtgggtgcggcaaccatgcccaaggttaagaatccccacgttttcatggacatatcaatcagtggaggcagcgccgagaggatcacatttgagctactcgcaaatgtagttccaaagacagcggagaacttcagagcactctgtactggtgaaagtggacttggggcatctacacagaaaccactctattataagggaacacatattcatcgcatagttaaagggtttgttgttcagggtggtgatttttcaagaggagatggaaaaggtggagagagcatttatggtggaaaatttccagatgaaaacttcagattactgcacaatcagcctggtgttctgtccatggcaaattccggcccagacaccaatgggtcacagttttttattacattcaaggctctacctcatcttgatggcaaacatgtggtctttgggaaggtggtcagtggaatagctttgcttaaaaagcttgaagcagttggtagtgaaactggaaatccttcttatcaagtgaaaattgtagactgtggtgaagtttccaacacaaattctccggatctgctaaagggagagaaagaaaaaaaactaagaacggcagatggtaactccactgctgaagggagagccaaattaaaaaaaacatccggtgatcataagcaaaggaagaagagaaaacactattcgtctgattcatatagctcagatacttcagactcattgtcctattcttcagatagtggctctgattcagaatcagattcatcaatggatactagctcatccagtgatcataggcgtaagagaagaaaaggatctaagaaggataagcgcaagcccacaaagagaaagggtaaacatacaaggagtaagagaaagagtagaggatccaaaaggcgatctagacggagccatgggagttcaagtgatgattcagtaagctcaaagacagataacagcagttctgacagtgaaaagggtggccatcataccaagcgttccttgccgaaagataaagagagtaccaaaatgacaatttcagaacaaggaagaacttttcaagaagcggacaaagacgaacaaacagttactaccatcaatcgatcacaatcacatgatggaagtaaaccctcaaacaaagatggcaacagggctgatgaaagatctggaaattacaattcagaagataggaatggtccaggtggaagctccaggaacaatcccattcaggttgatgtaaatttaacgaaaccagtaaatgtagatggcaacactggtggtgataatgcagaggctggcatgtctagaactggtgaaggaaggcaccttccaagcaatgattctgtgtccaccaatggtaaagatttaggtgtgggttctgcagacaatgggcaacctcaacgaatcaggaaaggacgtggttttactcagaagtatgggtatgcacgccgatacaggacgccatctcccgagcgtccccctgttcgaccccgctacgatggagggagagatgatagatggaacaatttcaataggtatgaaagaaatggtccttacagtagacgctcgccagtaaggagataccatggctcgccaagagccaatagcccatccaggtacccaagaagagaacgaatgaggagtaggtcacgcagcccagtgaggcgccatgaccgtggagggtatcaccgccccagcccaagacgtagccgcagccctgcagaaccgagacagaatgtgaatgataggcctcgatcaggtcatggcggaggcgatcctgaccacagccctcctgccaacaggtccagatcgaagagccgggaccccttgggacccagatctcctgatgctgccccagccaagagggagagctccagatacaaccgcaggcgcagcagcagctcaaggtccagcagccctgatggaaacaaaggcctggtttcgtactgagaagtaacggcacaacagtttgcaggctccatggaccatgtttcttgctagtttagcatcatgtactcttttgtaatggattctgaacttgaactgctttcgatgcaggtgtagatttatatgttctgttagatttgaatgtttcttatgccagatatttatag

SEQ ID NO: 109883 - DNA, 2173 bp, Zea Mays
atggctcgcttgagggatgttgctaaagattttctcgtttgtcacacctgcaggtcatctcaagtgggtgcggcaaccatgcccaaggttaagaatccccacgttttcatggacatatcaatcagtggaggcagcgccgagaggatcacatttgagctactcgcaaatgtagttccaaagacagcggagaacttcagagcactctgtactggtgaaagtggacttggggcatctacacagaaaccactctattataagggaacacatattcatcgcatagttaaagggtttgttgttcagggtggtgatttttcaagaggagatggaaaaggtggagagagcatttatggtggaaaatttccagatgaaaacttcagattactgcacaatcagcctggtgttctgtccatggcaaattccggcccagacaccaatgggtcacagttttttattacattcaaggctctacctcatcttgatggcaaacatgtggtctttgggaaggtggtcagtggaatagctttgcttaaaaagcttgaagcagttggtagtgaaactggaaatccttcttatcaagtgaaaattgtagactgtggtgaagtttccaacacaaattctccggatctgctaaagggagagaaagaaaaaaaactaagaacggcagatggtaactccactgctgaagggagagccaaattaaaaaaaacatccggtgatcataagcaaaggaagaagagaaaacactattcgtctgattcatatagctcagatacttcagactcattgtcctattcttcagatagtggctctgattcagaatcagattcatcaatggatactagctcatccagtgatcataggcgtaagagaagaaaaggatctaagaaggataagcgcaagcccacaaagagaaagggtaaacatacaaggagtaagagaaagagtagaggatccaaaaggcgatctagacggagccatgggagttcaagtgatgattcagtaagctcaaagacagataacagcagttctgacagtgaaaagggtggccatcataccaagcgttccttgccgaaagataaagagagtaccaaaatgacaatttcagaacaaggaagaacttttcaagaagcggacaaagacgaacaaacagttactaccatcaatcgatcacaatcacatgatggaagtaaaccctcaaacaaagatggcaacagggctgatgaaagatctggaaattacaattcagaagataggaatggtccaggtggaagctccaggaacaatcccattcaggttgatgtaaatttaacgaaaccagtaaatgtagatggcaacactggtggtgataatgcagaggctggcatgtctagaactggtgaaggaaggcaccttccaagcaatgattctgtgtccaccaatggtaaagatttaggtgtgggttctgcagacaatgggcaacctcaacgaatcaggaaaggacgtggttttactcagaagtatgggtatgcacgccgatacaggacgccatctcccgagcgtccccctgttcgaccccgctacgatggagggagagatgatagatggaacaatttcaataggtatgaaagaaatggtccttacagtagacgctcgccagtaaggagataccatggctcgccaagagccaatagcccatccaggtacccaagaagagaacgaatgaggagtaggtcacgcagcccagtgaggcgccatgaccgtggagggtatcaccgccccagcccaagacgtagccgcagccctgcagaaccgagacagaatgtgaatgataggcctcgatcaggtcatggcggaggcgatcctgaccacagccctcctgccaacaggtccagatcgaagagccgggaccccttgggacccagatctcctgatgctgccccagccaagagggagagctccagatacaaccgcaggcgcagcagcagctcaaggtccagcagccctgatggaaacaaaggcctggtttcgtactgagaagtaacggcacaacagtttgcaggctccatggaccatgtttcttgctagtttagcatcatgtactcttttgtaatggattctgaacttgaactgctttcgatgcaggtgtagatttatatgttctgttagatttgaatgtttcttatgccagatattt

SEQ ID NO: 109884 - DNA, 2384 bp, Zea Mays
acccgcacctgcactgcagcacacgcgccgccgaagcgctctgcccacctcgctcccctccagtggccgccggcgcggctcagcggtccatcctcctgacgccacctgcaacggcgccaggcggtgatccattccaactcgcggtcatctcaagtgggtgcggcaaccatgcccaaggttaagaatccccacgttttcatggacatatcaatcagtggaggcagcgccgagaggatcacatttgagctactcgcaaatgtagttccaaagacagcggagaacttcagagcactctgtactggtgaaagtggacttggggcatctacacagaaaccactctattataagggaacacatattcatcgcatagttaaagggtttgttgttcagggtggtgatttttcaagaggagatggtattgcttcattagcccaggcttctttcaactgacttctccctgtagtgtactttataagttcaatgttgcatgctatttccaggaaaaggtggagagagcatttatggtggaaaatttccagatgaaaacttcagattactgcacaatcagcctggtgttctgtccatggcaaattccggcccagacaccaatgggtcacagttttttattacattcaaggctctacctcatcttgatggcaaccttaaatgaatttcaagctataatatttgtagcaaacatgtggtctttgggaaggtggtcagtggaatagctttgcttaaaaagcttgaagcagttggtagtgaaactggaaatccttcttatcaagtgaaaattgtagactgtggtgaagtttccaacacaaattctccggatctgctaaagggagagaaagaaaaaaaactaagaacggcagatggtaactccactgctgaagggagagccaaattaaaaaaaacatccggtgatcataagcaaaggaagaagagaaaacactattcgtctgattcatatagctcagatacttcagactcattgtcctattcttcagatagtggctctgattcagaatcagattcatcaatggatactagctcatccagtgatcataggcgtaagagaagaaaaggatctaagaaggataagcgcaagcccacaaagagaaagggtaaacatacaaggagtaagagaaagagtagaggatccaaaaggcgatctagacggagccatgggagttcaagtgatgattcagtaagctcaaagacagataacagcagttctgacagtgaaaagggtggccatcataccaagcgttccttgccgaaagataaagagagtaccaaaatgacaatttcagaacaaggaagaacttttcaagaagcggacaaagacgaacaaacagttactaccatcaatcgatcacaatcacatgatggaagtaaaccctcaaacaaagatggcaacagggctgatgaaagatctggaaattacaattcagaagataggaatggtccaggtggaagctccaggaacaatcccattcaggttgatgtaaatttaacgaaaccagtaaatgtagatggcaacactggtggtgataatgcagaggctggcatgtctagaactggtgaaggaaggcaccttccaagcaatgattctgtgtccaccaatggtaaagatttaggtgtgggttctgcagacaatgggcaacctcaacgaatcaggaaaggacgtggttttactcagaagtatgggtatgcacgccgatacaggacgccatctcccgagcgtccccctgttcgaccccgctacgatggagggagagatgatagatggaacaatttcaataggtatgaaagaaatggtccttacagtagacgctcgccagtaaggagataccatggctcgccaagagccaatagcccatccaggtacccaagaagagaacgaatgaggagtaggtcacgcagcccagtgaggcgccatgaccgtggagggtatcaccgccccagcccaagacgtagccgcagccctgcagaaccgagacagaatgtgaatgataggcctcgatcaggtcatggcggaggcgatcctgaccacagccctcctgccaacaggtccagatcgaagagccgggaccccttgggacccagatctcctgatgctgccccagccaagagggagagctccagatacaaccgcaggcgcagcagcagctcaaggtccagcagccctgatggaaacaaaggcctggtttcgtactgagaagtaacggcacaacagtttgcaggctccatggaccatgtttcttgctagtttagcatcatgtactcttttgtaatggattctgaacttgaactgctttcgatgcaggtgtagatttatatgttctgttagatttgaatgtttcttatgccagatattt

SEQ ID NO: 109885 - DNA, 564 bp, Zea Mays
atggctcgcttgagggatgttgctaaagattttctcgtttgtcacacctgcaggtcatctcaagtgggtgcggcaaccatgcccaaggttaagaatccccacgttttcatggacatatcaatcagtggaggcagcgccgagaggatcacatttgagctactcgcaaatgtagttccaaagacagcggagaacttcagagcactctgtactggtgaaagtggacttggggcatctacacagaaaccactctattataagggaacacatattcatcgcatagttaaagggtttgttgttcagggtggtgatttttcaagaggagatggaaaaggtggagagagcatttatggtggaaaatttccagatgaaaacttcagattactgcacaatcagcctggtgttctgtccatggcaaattccggcccagacaccaatgggtcacagttttttattacattcaaggctctacctcatcttgatgggtattgcttcttgttcttcagtcacctagctttattggattctcagttctctaaccacaaccaaacactaatactgtcataa

SEQ ID NO: 109886 - DNA, 2083 bp, Zea Mays
cgacgacgcctccctcgctgcgtccgtcggcgatggaccagcagccgcgacaaccttgtggtggtgcgcttcggccacgggcgacatggagagcacgctcaaggggattcgcggcagcgacgcgccgttcgtgatggacctaaacgacgcagccaccgtggcgggcggcatcgaggacacttacggcgaggaccgcgccatcgaggagcagctcgccacgcccttggacacgctcctgtgcgcccgcctcgaccctgtcaagtcgcacatcgggtgcctgctgctgcagtacctcaagctttcgcctaccttgattggtgccaaggtagtattcgaggaaatgcagcaaagcaccatcctcagggacgcgcacaccgctatctgcaccacgcctgacccggcaatcgacacacacttcgccaacaagtggcggatgcgctgctcccgcaacagcaccagtacggcggcagcggtgttggagctcgatcccggcagttgcaccacctgcgacaccagttactaccgccacgttgtgcagcggcacggactgctgcgtttcgacgcatcactcactagggcctacgtgatgcaggtcgcctttggcaggttcgacggacacttcttccacgacttcaccatcatcaagctgaagacggacagcagcagctcgcccctcgagtgttcgaccaaatgtctcagccacgatattggacatgattcacgaaattatgcacacaaattacagaatgcagtcactcatggaatcactgctgctggacatgatatcctacaggtgggattggcttcaacacctgcaatgttcaacattatacttatagaagatgagagaagtcatttacctattgacgccatttgctctcctgatgaattgataaagacatcacgtctttgtgctttagaaatggttcattgccgtaaaccttggatgagatctcttggcaacacagataggcttggactattctctgaagctcgtgctgtgttaaatgcagcaagacagcaagcaatgaagattgcactaaacatgccacagcaccagacctgcatagatgtgatgggagaaggcatattatatggaggtcgacctggtgttttgaaggaagccattgtttgctcgattccgggtgtcatggtgtttacttggactgttaggaatttttctggagttactcatttatacagtcagcatgacagaggtgtggtgtggctaatcgttgctcctgattgctacttcattcaacacaatgagaggatgcacatgatattctatggcttcgatctactgagtttgcaacacttccatggacatttcattcaagctgatatgtttgctccttgggatggtcaggaaataacccagtttctattttctgaactaccaatatattggcagcagtcacatggcatgaacagtctattatttttcagaaagctcaagtattcatcatcagttgagatattttgtggtgcacagttttcatttcctaatattctattgcccaagtcttggtcacaggagttagccaccaacatagaaagacatttactatcagaaatgctagaagtggctaatggctataattttcatgaacttcatctgatgcttgcctctattggagtgacacaaatgatcagttgtggtaaatatttgatatggatcattggcttgctaactccatgggatccgggcagaatggtcttcgacctcaagttcgtgatgcttttggcttgagggcaagccaaatcttaagaaggggggaatgtcaggcatccagtgacagatacaggctacgtctgaggacataaatacaattgggccggggcagagtgagcgagccggacggcaattgtgaagctgagcggcccagagtggtcagcaatgtaattttgtgtcttgagccagttgaacgagtatttagaggagatcgtccataggacaagggagatattcagactgtaaacagaactataccttcttcttcgtctctaacctctgcttcctctgttcctatgaatctcttgctatcttcctgaatccctagttcctgcttcctacctccaa

SEQ ID NO: 109887 - DNA, 444 bp, Zea Mays
atggagaagaagcgggtggtcatcgtgggggccggcgtgagcggcctggcggcgtgcaagcacctcctggagctggggtgccggccgaccgtgttcgaggcggacacggtgctgggcggcgtgtgggcgcgcgcgccggcctgcaccgagctgcagacgccgcgccccttgtaccagtacgcggacttcccgtggccggagagcgtgacggagacgttcccgagccaccgccaggtgtcggcgtacctggacgcgtacgcgcgccgcttcggcgtgctcggctgcgtccgcttcggccgccgtgtggtcggcatggagtaccgcggcgtcggcgagcgggacgtggccgcgtgggaggagtgggccggaaacggccaggccttcggcggcgccggcgccggcgagtgtgtcaggcatccagtgacagatacaggctacgtctga

SEQ ID NO: 109888 - DNA, 1087 bp, Zea Mays
aggtccactggctcagatcacacacaccaccaaaggccaaagcgggacgggagccacagagatagctagcaagaaaccacagatggcggcgatagcggcggccacccaggcggcggcgacggtgctactgctcgcggcgctggtgctggcggcgggaccgggcggggcgcgggcgcagtcggcgtcgccgtcgagccagtgcacgtcggcgctggtgagcctgtcgccgtgcctcagctacatctccgggaacgtgtcggcggcgccgccgtcgtgctgcgcgcagctgggcaagtggtgcagtcggacccgcagtgcctgtgcgtggcgctcagcgcggacccggcgtcgctgggcctcaccgtcaaccgcacccgcgcgctgggcctccccgacgcatgcaaggtcacgacgcccgacgtcagcagctgcaagggcggcgccgccgccgcggggggagcgcctgtggcgacgcccgcggggcagacggcgccggccacggggtccaagacgacgcccgccacgtcgtccgtgcccggtgccgccgcgtcgccgccgggctcggctgcccgtctcgtcgccggcttcttcgtcgccgcggccgtcgtcgctggcttcgccgcgtgatccgaagctagcttcggtaccgtttgtgcgcgtaggaatcgcagcggagtttgtgttgtttgtttcatcggtggtggtggtgcatttgtgattcgttcagtggccgtgagagagagccgtctcttattcatcgatcgactcgattcgtcacagcaatcgcgcatcgctctgaataaagacatcgcctgtctcggttttttctttattgcttctcatttggctatgagaaaatttaagctactccctaataaggggtgattataatctcccaaacaaacactccctaaatcattaatagctggtgagctggtttggtgataatacaattagagttgattgaggagattttgaatagtaagagatttccttctatcagggtgttagtttactttgtaacgattcctgctaaaaaatgatgaatttgtactaatattgatgagctagaaaagttccaagcctc

SEQ ID NO: 109889 - DNA, 99 bp, Zea Mays
tttgcgattgatggctctgttacaaatagtatatatgtgcaattgttctgtcacttgtgcaattgacttgcacgcccacaatcaatttaagctaaaaat

SEQ ID NO: 109890 - DNA, 777 bp, Zea Mays
gcaacgctcgaactgaagactgcattctgcaaacagcaacacgacaagcaggagcagcagctaaagcagcagatatggatcgatcgatggggctgatgacaacgatcaggctgctggcggcggcggcgctgctggtgctggcgtcggggcagcagcagccgccggcggcggcctcgtgcacggcgtcgctgctcaccagcttcaccccgtgcttcagcttcctgaccagcagcaacggcagcagcgggtctccgccgacgcgggagtgctgccggtcgctggcggcgctggtggacgccggcaccggctgcgcgtgcctcgtgctcacgggcgccgtgccgctcggagtgcccgtcaaccggacgctcgccgtgtcgctgcccagggcctgcgactccatgtccgtcccgctgcagtgccgagacacgtcggctcagagcccggccaccggccccgtcgcagcagacacgccgcccgccacgcccgcgtcgccggcggcagcgacgacgccggacgctcccacggcgacgccaccggtgacacaggggcgggaggcggtcctgcccaccagcggctccgcccggagagccagcgcccgcgtcgccgcgacgccggcgctggtgctgctgctcctgctcgccgttgcggccgcgcttgtgtgatcgcgcacggcggtgcgctatatatattgtctggtggagtgctttgtttggtgcagtggtgcttgattaatttgtagcattgtagcactgtattaactgtacgtacgtatatttg

SEQ ID NO: 109891 - DNA, 298 bp, Zea Mays
atgataagcaattcctttttgtgttttttttctgcggcatcttttctgaaatcgtctagaccaaacaccatagttctatctgggcttagtggcagtggcaaaaccactatttactaccaggtaacttctaacttttttggtctgtgtttttacaagttaaggacaaggttgtagcatctagtttgcaaaataatatctgaacctcattttttgattctatttagggtgtgggatgagcattctagacggatatcagttctgctagtaatgtaaatagttttgtttcttgtgaaaaaac

SEQ ID NO: 109892 - DNA, 399 bp, Zea Mays
cctatttttctttttctgattgtaatattttgcttgttgattaccatttgaacagctacaggaagaaagaatgaagcagtaccaaacggcagcgaagcaactagataacacactcttggtgttgaggaggttcatctcgactggaaacgagttgcgtactcctgtaacaaaagatgaaattgtttccgaggtggcgaggcagctcaacatcaacatccatccagagaacctgcatctgcactcacctttggcgtcgctcggcgaattcgagttgcccctccggttaccgcagaacataccgtgcccagaaggtaaccaataatctaacaagcagtattatggcagatatggcgcatgagactttagagagccctttccagatatctcaggaagaaaaaa

SEQ ID NO: 109893 - DNA, 98 bp, Zea Mays
cccgaaggtggcgagttcgagctggagtcccctggtgcaccggacactgtccggtggtgcaccggacactgtccggtggcacaccggacagtccggtg

SEQ ID NO: 109894 - DNA, 107 bp, Zea Mays
ttgtctatttctttttcatacttttgtcttggagcctagcacatggcttttacatgagagcatattttctctactttttaatgtctctctcttctacataagaaaaa

SEQ ID NO: 109895 - DNA, 953 bp, Zea Mays
acatcatcacaggtccaaagcgcttccgattctctcttctcccctccgcccgcctccggttgtcttctccaattccccaacgcagccagcagcgcaaggtccagaagcccaggaccagacgacggacctccgcgccccatcgatccgcgcggccctcccccaacgcgcgtgcgtccgcaactagcgtctgccgccggtcgctttcttccgcaccccccgacgcggcaaggagcccccccgccatgagggtccacccggccccgcggaagcgcaccatcgccgtgcaacgctgcgcctccgcggcggcgggcgcgctcggcgggaagaagctgcgccgcctgccgcacatattcgacaaggtgctggagctcccgttcgcggccgacgcggacgtgtccgtcgaggaggacgcggcggcgctgcggttcgtcgccgccgccgacgagttctccctcgcgggcgcccgcgcgcacgccgtcgagatccacccaggggtcaccaaggtcgtcgtccgcggcctctcctcctcctccctcggcggcgatggcgacgacgacgacgacggggccgccgccgccgccttcgagctcgaccgctggcgcttccgcctcccgccctgcacgcgccccgccatggccaccgccacctacgccgcgggcgagctcgttgtcaccgtccccaagggcgccggccccggcgacggcggcgcggccgctgtcctcggtggcacggagcgcgtccttgtgcttgtatagtatagtaaatctagcttttccctaaattatatatcatctggtttgtgcactccgtcactggtttctcccagcttcaaatacaaacacttagtagagcatgcacttcagactcccattgcagtcggagcgcttggccatattttcatcaaccagagcggtttcgctctgcgttcctaagcaaattttgcatcgcacaga

SEQ ID NO: 109896 - DNA, 2212 bp, Zea Mays
cgttgcgctgcgccaaatctcgcttccagctccggcccggtgtgctccgcaggctccacctccgcgtcctctcaagtctcaaacgctcaaggtctcaccggagaccgcgccgcgccccgcgggcttctggtagctcgggatggcctccgggggctcggccgcacgtgacgcgtacgacgaggaggccgccgtccgccgccccctcgagctcgatagccgtgacgccgccgcctcgtcctccgaccactggcccggtgggaatgccatgcctaggtatcaagtgggcttgacaaaggatgattcaagtagtagacactctgagtggcggcagcctagcacagatgatgtgcgcaagagcaagctcgggccaagatacttcacggcgtttggcgtggatctgtcccctgataatatggcagttgccattgtctattttgtgcaaggggttctgggtcttgcacggcttgctgtgagcttttacttaaaagatgatctccatctagatccagctgagaccgcagtggtatctggtttctcgtccttgccgtggttgatcaagcccctctatggctttatcagtgattccattccactctttggatatcgaaggaggtcgtacctttttctgtcagggttacttggagcactttcatggagtttaatggccacagtagtgagcagtaaatacagtgcagcatcctctattcttcttggctcactttctgttgccttctcagatgttgtagtggattctatggttgttgagagagcccgtggagaatctcaaagcacatctggatcactccagtcgctctgttggggatcttctgcctttggaggaattgtgagtgcttacttcagcggttcgcttgtggatacttatggagtaagatttgtctttggtgtaacagcgtttttacccctgatgacatctgctgttgcagttcttgtaaatgaacatcgcatatcttctggagaacgtactaccttacactctggttcaggattcgttgagagttctaagcagcacgtcaggcagctttggacttcagtaaagcagcctaacatattgttgccgaccttgtttatatttctttggcaagcaacaccacagtcagattctgctatgtttttcttcatcacaaataagcttggattcacaccagagtttctagggcgtgtgaagcttgtaacctcctttgcatccctgctcggtgttgggctctacaactattttctgaaggaagttcctctaaggaaaatatttctcgtgacaaccattataggttcagctcttgggatgacacaggtgcttcttgtaactgggctaaatcggaagtttgggattagtgacgagtggttttctattggtgattcattaatcatcacagtccttggtcaggcttcatttatgccagtcttggtgttagctgcaaaactgtgccctccaggaatggaagccactttatttgcaactttgatgtcaatttctaatgctggaagtgttactggtggtctggttggtgctggtctaactcggatatttggggtcaccagggacacctttgggaacctacctctattgattgtcgtctgcaatcttagttcgctgctgcccttacctcttctaagtctcctgccagaggaatcaggtgacacagacaatggagaaacaaagaatatctgacttgctgagggtttcatctctgtttgttctgattctcaagtatagcataccacagtgcccagcttcaactcagatatgacccatccagttgaagttcaaaagatcagtgggcaaatatgaaaatcatactggagataagttcagttagtcaccaccaccatcagccagtatctcctgcgactattaacctgtgatcaaagcgattcattggtgatcaaaacgactattaacctgcgattcattggcgcacaggtaatcaccactttttttagtttatataagttaccttgcatacgaaggcaaggtcggttttatctttctctacattctttgagttttttgttagctaatgctgcgaccccatgaaaactagagtaggggtcaaagactagtagttgaggattcccttacaaagtcgaatgtattgtaaccaaaaaaaaagagagggaatatttatgcattatggaggcctagagtacggacacgtaaaggaaaatacttgcacacaattcgccttgccgtaca

SEQ ID NO: 109897 - DNA, 303 bp, Zea Mays
aaagtatttagtcattcaaacagctcaatattataaacaaatacaatacactaaaaggaggctagcccagcagtgagctaattagaggaaaaaaaaattgggtgcagccggctgcaaaacagaatgtttgcagcccctcacaaaaatgaggatagaccccacctgcaggtgcaacaacacaattaaaacgttatctgatagacctgcatgtggggtctatactcttttttgtgagaggggctgcaaacattctgttttgcagccggctgcacccaatttttttcccaattacacatgatgccc

SEQ ID NO: 109898 - DNA, 2890 bp, Zea Mays
ggggacgagcagctccacaacaattcgtgcctgcctccctgcctcggcctcctccctcgtcctcccctcctccgccgcctcaaacccggccccctcgcgcgcgtgcgcggcgctcgaggcgacgaatccagccacctcctccgcacccatccccgccgccggtcgccgatattggaaggagctcggaaggctgggacgctgacccgaattttatggggagaggatgccagagctgcgaagcaatactcgtcaagcacgcttaaggtctaagaagcttgacgatctgcagccaggagagccgcttgcgaaaccggtgtcacctgctctgccgagcgcacggaagcgtgctcctacacgtgctgctaggggcagaaagggtgctgctgggagaggagtgcctcccgcaccaaagcctagaagaaagggggttgatattgtcgtcttagaagctgatcctgcttgtgaaaccccacttaaagctttcaagggactggaagttgctgctgctgcgcccaagaaccttcctttgaagcaggtagccgaagttggtgttccgaaaatgaatggtgaaagtggggagaagattgttggggctgaagatgaatcgacagctacacctgtcccagaaagggttcaagtaggtaattctccagagtacataactgacaggaagttaggtaaaggtggttttggtcaggtgtatgttggtcgaagggtttctggtggtgctgctcgcactggtcctgatgcatatgaggttgcattgaaattcgagcatcgtaacagtaaaggatgcaattatggccccccatatgagtggcaagtttataacactctcaatggttgctatggcataccatcggtccactacaagggtcgtcagggcgaatactatatacttgtaatggatatgcttggtcccagcctttgggatgtgtggaattcgatggggcaggcgatgactccaaatatggctgcttgcattgctgtagagagcatatcaattcttgagaagctccattctaaagggtttgtgcatggtgatgtgaaaccagagaattttctgcttggtcagcctggatcgcctgaagataagaagctttaccttatagatcttggtttagcatccaagtggagagagaataatggtcatcatgttgattatgatcaacggcctgatatctttaggggaacaattagatatgcgagtgtccatgctcatttggggcgcactggtagtaggagggatgatttagagtcactggcatacacccttattttcctgataagaggaagattaccttggcaaggctaccagggagataccaagagtttccttgtttgcaagaagaaaatggctacttctccggagatgctttgttgttattgtccagctccattcaaacagtttcttgagattgtcacaaatatgaaatttgacgaagagccaaattatgccaagcttatctctctttttgatggtttgattgaagcgcctgcttcgagacaaatcagaattgatggggctctcaaggttggacagaaacgtggaagattggttgcagatctagaagaagatgaacaacctaaaaagaaggttagattagggagcccagcggctcaatggatttcagtttataatgctaggcggcccatgaagcagaggtaccattacaatgtggctgactcgaggctaagccaacatatagaaaagggcaacgatgatgggctttacattagcagcgtggcttcctcggcaaacctttgggcactcatcatggacgcaggaactggtttctgttctcaggtttatgagctctcaccagttttcctccacaaggactggataatggagcagtgggagaaaagctactacataacagcaattgctggatcatccaacgggagctcattggttgtcatgtccaaaggaactccttacacccaacaatcatacaaggttagcgagtcgttcccttacaagtggatcaataagaagtggaaagaagggttccatgtgacatccatggccaccgctgggaatcgctggggcgtagtcatgtcaaggaattcagggttctctactcaggttgtagagttggatttcctgtaccccagcgagggcatccaccggcgctgggagagcggctacaggataacttccacggcagccaccaacgaccaagccgctttcatcctgagcatgccgaaacggaagccgatggacgagacacaggaaacgctgcggacctccgccttccccagctcacacgtcaaggagaaatgggccaagaacctctacatcgcttcgatttgcttcgggcggaccgtgtgctgatcgcgcgcgcctgggaaatggaagtcgaagcgagggccaccgatccggtacggtggcgcctcgcatcaagagatgcgagatggggcgtcaagtcgaaaccagttctaatgataggatcagtgtatctctgaagatacggtatgggttaccctaccgtatttgtaaagtaatgatgccggccgaacgacctttcctaacgcgtttgggcagaaattcgttgctgtcaccatattttgacgggagtttctcccgtgttgtcggtagaaatttgcgtgtgcactcttcccgttttggcgcccatgcgatgtgtttcacccgatgtatcgctgggcttcctgtttcgtgactcgtgagccgcaatgtctggtggcctgccgactccggttggcattttattttgagagacgtagataaattgaattgattgaatatttagagctcagtcagtcaaggcccgattaagtaacatatgaacgtatgtctatattcattcattattattttaataaatatggatagaaaaaaaaagttggctaaaaagataaacaataa

SEQ ID NO: 109899 - DNA, 2882 bp, Zea Mays
ggggacgagcagctccacaacaattcgtgcctgcctccctgcctcggcctcctccctcgtcctcccctcctccgccgcctcaaacccggccccctcgcgcgcgtgcgcggcgctcgaggcgacgaatccagccacctcctccgcacccatccccgccgccggtcgccgatgagctcggaaggctgggacgctgacccgaattttatggggagaggatgccagagctgcgaagcaatactcgtcaagcacgcttaaggtctaagaagcttgacgatctgcagccaggagagccgcttgcgaaaccggtgtcacctgctctgccgagcgcacggaagcgtgctcctacacgtgctgctaggggcagaaagggtgctgctgggagaggagtgcctcccgcaccaaagcctagaagaaagggggttgatattgtcgtcttagaagctgatcctgcttgtgaaaccccacttaaagctttcaagggactggaagttgctgctgctgcgcccaagaaccttcctttgaagcaggtagccgaagttggtgttccgaaaatgaatggtgaaagtggggagaagattgttggggctgaagatgaatcgacagctacacctgtcccagaaagggttcaagtaggtaattctccagagtacataactgacaggaagttaggtaaaggtggttttggtcaggtgtatgttggtcgaagggtttctggtggtgctgctcgcactggtcctgatgcatatgaggttgcattgaaattcgagcatcgtaacagtaaaggatgcaattatggccccccatatgagtggcaagtttataacactctcaatggttgctatggcataccatcggtccactacaagggtcgtcagggcgaatactatatacttgtaatggatatgcttggtcccagcctttgggatgtgtggaattcgatggggcaggcgatgactccaaatatggctgcttgcattgctgtagagagcatatcaattcttgagaagctccattctaaagggtttgtgcatggtgatgtgaaaccagagaattttctgcttggtcagcctggatcgcctgaagataagaagctttaccttatagatcttggtttagcatccaagtggagagagaataatggtcatcatgttgattatgatcaacggcctgatatctttaggggaacaattagatatgcgagtgtccatgctcatttggggcgcactggtagtaggagggatgatttagagtcactggcatacacccttattttcctgataagaggaagattaccttggcaaggctaccagggagataccaagagtttccttgtttgcaagaagaaaatggctacttctccggagatgctttgttgttattgtccagctccattcaaacagtttcttgagattgtcacaaatatgaaatttgacgaagagccaaattatgccaagcttatctctctttttgatggtttgattgaagcgcctgcttcgagacaaatcagaattgatggggctctcaaggttggacagaaacgtggaagattggttgcagatctagaagaagatgaacaacctaaaaagaaggttagattagggagcccagcggctcaatggatttcagtttataatgctaggcggcccatgaagcagaggtaccattacaatgtggctgactcgaggctaagccaacatatagaaaagggcaacgatgatgggctttacattagcagcgtggcttcctcggcaaacctttgggcactcatcatggacgcaggaactggtttctgttctcaggtttatgagctctcaccagttttcctccacaaggactggataatggagcagtgggagaaaagctactacataacagcaattgctggatcatccaacgggagctcattggttgtcatgtccaaaggaactccttacacccaacaatcatacaaggttagcgagtcgttcccttacaagtggatcaataagaagtggaaagaagggttccatgtgacatccatggccaccgctgggaatcgctggggcgtagtcatgtcaaggaattcagggttctctactcaggttgtagagttggatttcctgtaccccagcgagggcatccaccggcgctgggagagcggctacaggataacttccacggcagccaccaacgaccaagccgctttcatcctgagcatgccgaaacggaagccgatggacgagacacaggaaacgctgcggacctccgccttccccagctcacacgtcaaggagaaatgggccaagaacctctacatcgcttcgatttgcttcgggcggaccgtgtgctgatcgcgcgcgcctgggaaatggaagtcgaagcgagggccaccgatccggtacggtggcgcctcgcatcaagagatgcgagatggggcgtcaagtcgaaaccagttctaatgataggatcagtgtatctctgaagatacggtatgggttaccctaccgtatttgtaaagtaatgatgccggccgaacgacctttcctaacgcgtttgggcagaaattcgttgctgtcaccatattttgacgggagtttctcccgtgttgtcggtagaaatttgcgtgtgcactcttcccgttttggcgcccatgcgatgtgtttcacccgatgtatcgctgggcttcctgtttcgtgactcgtgagccgcaatgtctggtggcctgccgactccggttggcattttattttgagagacgtagataaattgaattgattgaatatttagagctcagtcagtcaaggcccgattaagtaacatatgaacgtatgtctatattcattcattattattttaataaatatggatagaaaaaaaaagttggctaaaaagataaacaataa

SEQ ID NO: 109900 - DNA, 2651 bp, Zea Mays
gagtcggggacgagcagctccacaacaattcgtgcctgcctccctgcctcggcctcctccctcgtcctcccctcctccgccgcctcaaacccggccccctcgcgcgcgtgcgcggcgctcgaggcgacgaatccagccacctcctccgcacccatccccgccgccggtcgccgatgagctcggaaggctgggacgctgacccgaattttatggggagaggatgccagagctgcgaagcaatactcgtcaagcacgcttaaggtctaagaagcttgacgatctgcagccaggagagccgcttgcgaaaccggtgtcacctgctctgccgagcgcacggaagcgtgctcctacacgtgctgctaggggcagaaagggtgctgctgggagaggagtgcctcccgcaccaaagcctagaagaaagggggttgatattgtcgtcttagaagctgatcctgcttgtgaaaccccacttaaagctttcaagggactggaagttgctgctgctgcgcccaagaaccttcctttgaagcaggtagccgaagttggtgttccgaaaatgaatggtgaaagtggggagaagattgttggggctgaagatgaatcgacagctacacctgtcccagaaagggttcaagtaggtaattctccagagtacataactgacaggaagttaggtaaaggtggttttggtcaggtgtatgttggtcgaagggtttctggtggtgctgctcgcactggtcctgatgcatatgaggttgcattgaaattcgagcatcgtaacagtaaaggatgcaattatggccccccatatgagtggcaagtttataacactctcaatggttgctatggcataccatcggtccactacaagggtcgtcagggcgaatactatatacttgtaatggatatgcttggtcccagcctttgggatgtgtggaattcgatggggcaggcgatgactccaaatatggctgcttgcattgctgtagagagcatatcaattcttgagaagctccattctaaagggtttgtgcatggtgatgtgaaaccagagaattttctgcttggtcagcctggatcgcctgaagataagaagctttaccttatagatcttggtttagcatccaagtggagagagaataatggtcatcatgttgattatgatcaacggcctgatatctttaggggaacaattagatatgcgagtgtccatgctcatttggggcgcactggtagtaggagggatgatttagagtcactggcatacacccttattttcctgataagaggaagattaccttggcaaggctaccagggagataccaagagtttccttgtttgcaagaagaaaatggctacttctccggagatgctttgttgttattgtccagctccattcaaacagtttcttgagattgtcacaaatatgaaatttgacgaagagccaaattatgccaagcttatctctctttttgatggtttgattgaagcgcctgcttcgagacaaatcagaattgatggggctctcaaggttggacagaaacgtggaagattggttgcagatctagaagaagatgaacaacctaaaaagaaggttagattagggagcccagcggctcaatggatttcagtttataatgctaggcggcccatgaagcagaggtaccattacaatgtggctgactcgaggctaagccaacatatagaaaagggcaacgatgatgggctttacattagcagcgtggcttcctcggcaaacctttgggcactcatcatggacgcaggaactggtttctgttctcaggtttatgagctctcaccagttttcctccacaaggactggataatggagcagtgggagaaaagctactacataacagcaattgctggatcatccaacgggagctcattggttgtcatgtccaaaggaactccttacacccaacaatcatacaaggttagcgagtcgttcccttacaagtggatcaataagaagtggaaagaagggttccatgtgacatccatggccaccgctgggaatcgctggggcgtagtcatgtcaaggaattcagggttctctactcaggttgtagagttggatttcctgtaccccagcgagggcatccaccggcgctgggagagcggctacaggataacttccacggcagccaccaacgaccaagccgctttcatcctgagcatgccgaaacggaagccgatggacgagacacaggaaacgctgcggacctccgccttccccagctcacacgtcaaggagaaatgggccaagaacctctacatcgcttcgatttgcttcgggcggaccgtgtgctgatcgcgcgcgcctgggaaatggaagtcgaagcgagggccaccgatccggtacggtggcgcctcgcatcaagagatgcgagatggggcgtcaagtcgaaaccagttctaatgataggatcagtgtatctctgaagatacggtatgggttaccctaccgtatttgtaaagtaatgatgccggccgaacgacctttcctaacataaattgaattgattgaatatttagagctcagtcagtcaaggcccgattaagtaacatatgaacgtatgtctatattcattcattattattttaataaatatggatagaaaaaaaaa

SEQ ID NO: 109901 - DNA, 1622 bp, Zea Mays
ccaaaactagtgatcgcccccccggcccccgctccgaaacgtgacgtcggcacgtcgccgctatatatgccggcagtgcagcctgttgcttgtaaacttgcagtgcaggaataaaataagcctccgcccggcttcgttgcatccacgcacgcagcaagcgatcggatttcgccagcatggcggcggcggccgtggtgttcgacgccgaggcgctgagccgggaggagcacatcccggcgcagttcgtgtggcccaccgaggagcgggcgccggcgggcggcgtggaggaggtcgccatccccgtggtcgacctcggcgagttcctccgccgcggggtgctcccgcgcggcgtggcggaggcgtgcgagcgccacggcgtcttccaggtggtgaaccacggcgtgggcgccgcgctgctcgccgaggcctaccgctgttgcgacgccttttacgcgctcccgctcgcggacaagcagcgcgcgcagcgccggcacggggagaaccacggctacgccagcagcttcacgggccgcttccactgctgcctgccgtggaaggagacgctgtccttcaactgccccgccggtgccgggactgcgcgcgccgtcgtcggctacttcgtcgacgtcctcggcgaggactaccgccacatgggggaggtgtaccaggagtactgcgacgcgatgacgcgtctggcgctggacgtgacggaggtgctggcggcagcgctggggctggaccgcggcgcactgcgcggcttcttcgagggcggcgactccgtcatgcggctgaaccactacccggcgtgccggcagccgcacctgacgctggggacgggcccgcaccgggacccgacgtcgctgacgctgctgcaccaggacgacgtgggcgggctgcaggtgcgcgccggcggcgggccgtggcgcgcggtgcggccccgcgcggacgcgttcgtggtcaacattggcgacaccttcgccgcgctcaccgacgggcgtcacaccagctgcctgcaccgcgccgtggtgaccggcggcggctcccgccggtcgctcgccttcttcctcaacccgccgctggaccgcgtcgtccgcccgccgggcgcgctcctccaggagaacaagcaggcgggccgcccgcgcgcgttcccggacttcacgtggcgcgagttcctcgagttcacgcagaagcactaccggtcggacgcgggcaccatggacgccttcgtgtcgtggatcgcgggaggccgccgccaccatggcggacaggaggagggcaactgagatcgatgcatctctagctgtaggcagcagcgcagcagctaccaagaataatggccggcgacggagatgcagctacgacgcacaaataaattgagtgtttgtggtacaataaggacgaggacgatcaatggcgacctgtaaccggtgcagttttagttaatctttcatggcgatatggcattaaccaatcgttggtgtaaaatgcgtgcatgctttgcatgccaatgttggccatgtgatggcacagcgtgagtgtagctcacccaccgtgacaacgtgctaatttcgtgtggtcctagataccaaggtcgtctaatgaacttgatggattgatgattt

SEQ ID NO: 109902 - DNA, 461 bp, Zea Mays
gttcctaggccggtggccgcaactccattacctcgacgcgcggtggcggaggttcctcgatccggagtagtggcggcggttccccgatccagagggcgagcgacagcggggcccttgtgcgggcaagcgacgacgtccccgaagccccgaggaggcggcacttccaaggccggcgagcaagcgacgcccgttgacgtgcgagtagcgacggcgatgcatgatgcgcgatgttcgagcgagcgacgtcatggaaggcgcgagatgcgcacaacgatgattgcgcgtgccatcctccgatccggcgcagttttcttttcgattattatgttttatgcctatcacatgtattatttacactaaaaattgtacgattttatgcttaaacacagagttcgtatatcagtttactgcatgcatattggaaaggcaattccttgatttatgttgttcgtaatttgcgc

SEQ ID NO: 109903 - DNA, 3079 bp, Zea Mays
ttacacttcaaatcattcgtctcaatttatttccatggactggaatgtcatgtttgcttctgatgccccgaagataaatttaagttcaaatccattacatctgtcggttgatcttcggatcagagagctcttcccataagactaaagactaatggcccactagcaaacattttgatggtgttagaaaacacacacgcacattcacaactcaaaaatatgtgcttcgaaaatttaattctttactgaatgcgaataacagtctttcgccgacctggttgtcctttacatttacaaacatgcagatttcttttgggaaatttggctcgtttcctataggttagatttcgtggagttactgtacccaatgttaacaagatgaaattcgtgcaacgattttgaatcggcacttgttattcccgtgctagttagtgtcccatccattctaatatttcatacgtttcgacaaaaatcaggaaaactcattaaagagggcctcagagatcttggtggttcttggtcgtcaggcggagcctttgctccatcaagagtagcaaatattttgatcacatcaccggccccagcggattatcatcacaacagaaaagaaaaagggaaaaaaaacaaagattggtcggccccaatgagagcgatatcgcgagtcagaagtagctggttaagatctcatctttcgcgtagaaatcaatgggaatccgattgattttcttcgtcatccccgccatagccatcgcaagcaaagaaggccagtcaaaccaaacatcaaaaagagtaaacgtaagaaatttgcctgctttgtcaccggcgaaccctgggatgaggcaggaccgccggagcttaaaaagcaggcgggaagtgctaggaaagcgccctccccttgggttcaatctcgcccaaggatagattgcccgacgcaccgaatgcagcgccggacaattgcaatgttaggcagaccaaaacaaacggaagaagaagcgacgcgaacgaggcaaggcaagcaaaatagcgcggatcgagatctggcgattcaaagtgaaggaggcgcggggaagacggcaacgaaccctagtcagacatcgaatgcacggtggcgaaggtggcggcggcagagtgatttgagtggagggcagagggtccgccatccagcctcgtgtatttgtaggcgtcggagccatccgccgtcgtgtagggttttggtctgggctcgcttgccgtcgggccgtggcaacgggatgaagcccatggcccattgaacaatcaaattatgcacatgtcaaccttagaaagtaaacaagcatctactccggtccaaattatatataaaaaaacgtgttttgaatgataaaaaaatgcacagaaatcaatcaaccaaccgtacacgacgttgatcttcatgccagcacgcacatccacacaaaaccagctgctaccacaacagcgccaggagctgcagcgacgccgacgccagcaccagcgcggcggcgctcgcgctccggccgagcgacgccatggccgccgcccccgtctggatctgtatggtgaagttgcaggtggcggtggaggggtcggtctcggtgggcagcgcaaggccctggaagtcgcaggcctcgtccttctggttctgcgcctggtagtacgcgttgaacgcgtacgacgcgttgccggcgacgtccatgccgccgcacgtggagccgtaccccagcggcgtgcagtcggcgaacgtgcaggcgtagtcgacgttggcgccgagcctgccgaggtccttggctctggggttcagcgcgcaccacgtcctggacaggtacgccacgccgcgcgccggcaccagcgtcgtgtcccggccctgccccgtgaggtccatggcgaacttgggctggccgtcgtaccgcagcacgccccagtggcgctcgaagttgcccggcgcgacgctcttggcgtcctcgtcgacgagcccgaacaggtacacctccgccgggcgctggcccggcctcgccggcgtgccggtgttcgccgccagccgccgcagcaggcccgcgtagaagcgctgcgcgtaggacgccttggcgtgcctgtcgccgtccgtgggccaccccacctcgcccacgaccaccggcatgtcgccgtgccccacggcccccagcgccgccaccagcgtgtcgaagttggcgtcgaacacgttggtgtacagcacgccgtggtcgtccactggcgccgcgccgccgtcgaagaaggcgtagtccagcgggaagtgctcgttcaggtacaggctcaggaacgggtagatgttcacggtgaagggcgcgccgttccgagccaggaacctcaccatgtccgccatcagccccgcgatgtcggcgcggaaccgccccgccgacggaaccgggttgctccgaggggagttgtacacgtcggcgttcagcggcacggtcgccttgatccggtcgccgatcccggcgtcgttcagagcgttctggacgttcttcagcgccgggagcgtgacgttgatgaaggacccgttgtacgactccaggaacggctcgttgccgacggccacgtacttgatggtgacgccgccgtcgaagtcgtagcgcctgacgttgtgcttgacccagttcctggcctggccggcgtcggcggccaggcccgcgagcatggcgttggggatggcgaccatgacctcgatgccggtgccggcgagcgcgcgcatggcggcggggtcggcatcgaacagcttcaccttcttgatgccgttgtcccggagcacctgcaccacggccttgggcggcagcgggtgcgtcgcctgcgtgccccagttcacccccagcgccgtcgccggccccaccgcgcaggcgcagagcagcaccgccgccgcgagcctcgccgccatccgcacgggaccgcggtgcgagcttcttggagccgacgagagccactcgggccgccggactgggttgcgaacgagtggacagatttcggggctggactgtactgtacagtagcgaccgtggcgggagaggacgcgagtggaattctgggtcggagctccagcggctctaggaactga

SEQ ID NO: 109904 - DNA, 1384 bp, Zea Mays
cataacagagcgggacattgggaaaggcccacgacaacggcccgctccacctacttccaaacgaacaaaccctctcgaaaaccctctctcatattcaccccgccgccgcctcctcttccccttttcaacttcgccgaaaccctaaccctcccggcgaagtcgccatgtcgaacccgaagggctccaagatgctccagttcatcaactaccgcatgcgggtgacgatccaggacggccgccagctcgtgggcaagttcatggcgttcgaccgccacatgaacctcgtcctcggcgactgcgaggagttccgccgcctcccgccctccaagtcctccaaggccaccggcgaacgcgaggagcgccgcacgctcggcctcctcctgctccgcggcgaggaggtcgtctccatgaccgtcgaggggccgccgccgcccgacgagtcgcgcgccaaggccgcggcggcgggcggagccctcgccggccctggcgtcggccgcgccgctgggcgcggcgtgcccaccggcccgctgctccaggcagctcctggtcttgctggccctgtgcggggcgtgggtggacccgcccccggcatgatgcagccccagatctcgcgcccgccgatgcccaacctgtcggcccagccggtgtcgtacccgcaggtcgtgcgcccgccgcaggggatgcctccgccaatgcgtcctggaatgccgccgcagatgccgatgcaattccgcccgcctggggcgccgcctgctccgttccctggggcaccgccacaacagtacatgaggggaccgccgccgatggggccgccccaggtgaggcccgggatgccggggccgccaccgcctggaatgaggcctggaatgcctccgccaccattcggacagccgaggcctgggatgccgcctccgccacctggtccacagcagcctggacagaacccgccgcagtagcttcctggataagcttcttgcagatacacctatggaagatttttgtatctcgagagaggatcataatcgcacctggggaggacctgtgaattgcaccaaagcttcaccattctgtctcgcatcagggcagtagtttcctttgggtattgtgacttgtgagggaggagaaccttgccagcgtgtgtaccactcatcctttgatgtgagaagggaccttgtacgtagagaggccaggacttgtattttaactgttggtgttggttatgttaggaaatatggataactggctgcagtcttgttacggtgttgattcatgctctgtttaagcccttgttttctctctctaaaaagtagtctcttgtgtttgttgatgaagcaagataattggtttagagaaaagtttatatatgcatataattattcatcca

SEQ ID NO: 109905 - DNA, 495 bp, Zea Mays
atggcataccggcaagtgctgctcttggccgtggccgtggccgtggccgtcgcgtgcctcgcgcccctggcctctgccaagcagtgggtggtcggggacgagggcgggtggagggccaagttcaacgagaccggctgggccaacggcaagacgttcttggtcggcgacagcctgctgttcgtgtaccccaaggagagccacacggtagtgaaggtgggcaaggacgccttcgcggcgtgcgacctgggcgccaacctgcagctcggcaactggaccggcggcaacgacgtcgtgcagctggacaagcccggcaaggcgtggttcatctgcaacaagcccaaccactgcctcaacggcatgaagctcgccgtcgacgtcgccgtcgccgtcgccccggccccgccgccgtcggcggcgcccctcaccggctacacggtcggcggcgcggtcgtggccgtcgcttgcgccgtgttcgcggctgcgctagcgctctag

SEQ ID NO: 109906 - DNA, 833 bp, Zea Mays
atggtgttcaagtgccctccgttgcaaaaactgatgcgctataggataattatatcaacctatatgagttcatctctgctgcaatctgagggcattgctcagggccatttcacgcacattttcttggatgacgctgcacaagcctctgaaccagaggcgatgattcccttgtcagggttgtgcagatgggacactgtggttgtgttggcaggagatccgatgcaattaggcccggttattcactgtagacaagtagataaggatggtttaggccgatcctttatgcaaaggctgctctttgaattcgagcagtatgaaacaagaaatcttaactatgtgacaaagtttgtgaagaattattggtgccatccagcaatcctacatataccatcagagcttttctacgggggtgaactgatagcctgtagtgaagatgaagtgtcctcagtttacgagtgcgttggccttcctaacaagtctttccctgttcttttcattgggattcaaggatgtgatgagtgggaacgcaacgttccatcatggttcaataggattgaagtaagtaaagtagtaagtatcatcaggagtctgactagagttggtgatgttcgtgaaactgatataggggtcattactccatactctcagcaagtcaccatgataaagaaagctctagagtattttgaaatgcctgactttaaagttggaagtgtagaacagttccaaggtcgagggaagtaataataatctctacggtctggtccactataaagcataacgagtttgacaaattctttaatctgggattcttgagcaactataagaggttcaat

SEQ ID NO: 109907 - DNA, 553 bp, Zea Mays
cccatccactgcggcacgcgtcccgcctctggtttgcttgcctcccagatcttgccaactaattggaggcagccgagctgatctcccatcccgcaacgcgccgtctcgacggcggatcgttttcttctgcttctactgcgtgatctttgggcaagaagataagacacgtccaagcgtcgccacagtcaagggcggcttggttgcagtcaagatggggaaggacagagaatctgccaagctgaaggaggagaaggggtccaaggatgagatccatatgaaggtcaagagcaagggcgagccgtccggcgaggaagacggcaaggaggaggtcgaggtagagattgaggccaagtttgttgagaaggaagaggtcacaggctcgggtgacggtgcgggaggaaagggtaccaagaagaaggatacaaaggagaaagacaagaaaaagaaggaaggtggtgacgattcagggaaggcagaggaagacaataagggtaaagcgaaggattcggagggcaagggccaagtgaagaaggaaaagaaggatggtgctggg

SEQ ID NO: 109908 - DNA, 1029 bp, Zea Mays
gcacaacaatatatgctactattgtttgcaattgttttcccaccacaaatctcccagaaaacatctcgacggtggtaaaaagccacataggctgaaaggccttgagaattattggtgttcgacgaagcccagtgtgcggaacgcgcccatgagcccactcggctaccgccagaaaagccatttcagataaagcccacggcccgccgaaactccgacccgcccggccgacacggcaggtcgctcgccacgcggcgctccaccgtcggcaaacgtcccccaccgacgcacgtcaccttccgccggccttctcctcctttcccacccgcctcttctccatctccactccggtctttactgtagtataaaggaagggtaggctggctggatgtcctcccatccactgcggcacgcgtcccgcctctggtttgcttgcctcccagatcttgccaactaattggaggcagccgagctgatctcccatcccgcaacgcgccgtctcgacggcggatcgttttcttctgcttctactgcgtgatctttgggcaagaagataagacacgtccaagcgtcgccacagtcaaggtgagaagaaaagctccccctctcctgcagtcctgttactccagttggttcgccgcagtgcagtgtttgtctttgctcggtaacggcggcttggttgcagtcaagatggggaaggacagagaatctgccaagctgaaggaggagaaggggtccaaggatgagatccatatgaaggtcaagagcaagggcgagccgtccggcgaggaagacggcaaggaggaggtcgaggtagagattgaggccaagtttgttgagaaggaagaggtcacaggctcgggtgacggtgcgggaggaaagggtaccaagaagaaggatacaaaggagaaagacaagaaaaagaaggaaggtggtgacgattcagggaaggcagaggaagacaataagggtaaagcgaaggattcggagggcaagggccaagtgaagaaggaaaagaaggatggtgctggg

SEQ ID NO: 109909 - DNA, 1752 bp, Zea Mays
gttcttgatacttggttctcaagtgctctgtggcctttcagcacgcttggttggcctgatctttccaaggaggattataagcatttttatccttcaactgttctggagacaggccacgatattttgttcttctgggttgcacgaatggtcatgatgggaattgagttcacaggatcagtaccattttcttatgtctatctacatggtcttatccgggatgctgagggtcgaaaaatgtcgaagacattagggaatgtcattgatcccctagataccatcaaagagtacgggacagatgctttgagatttacactatctttgggcactgcaggccaggacctcaatctctctacagaaaggttgacgtcaaataaggctttcacaaacaagctgtggaacgcagggaaatttttgttacagaacttgcctgataaaaatgatgtctctgcatgggatgtcttgttgtctaataagttcgactcagaagcatcactccagaaactgccattgccagaatgctgggtggttacaggactacatgaactcatcgataaggtcagcagaagctatgataagtttttcttcggagatgctgctagagaaatatatgattacttctggggggattttgctgattggtatattgaagctagcaaaacacggctttaccactcgagtgacaagatcgctgctgctacagcccagagtgttctggtgtatgtgtttgaaaacatactgaagttattgcatcccttcatgccattcgtcactgaagaattatggcaggcatttccatacagaaaacaagcacttatggttactccctggcctaccactgaccttcctaaagatttgaggtccatcaaacggttccagaatttgcaatcattgataagaggaatcagaaatgttcgagcagaatattctgttgagccagctaaacggatatcagcttctgttgttgctactgcggatgtcctggaatacgtatcaagggagaagcaggtcctagcattactttcaaagcttgacgttcagaacgtacattttactgaatcagcaccaggcgatgcaaaccagtcggttcacattgttgctgatgagggtttggaggcgtatctacctttggctgatatggttgacgtgtctgaagaggttaagcggctctccaagcgcctctccaagatgcagtcggagtatgatgctcttgttgcccgactcaattccccaagttttgttgaaaaggcccctgaagatattgttcgcggagttcgtgaaaaagcgtctgaggcagacgagaagatctctctaactaaaaatcgtctcacttttctgcaatcaaccattaccacttaaatacagtaatccacggggactctaccaggatgccattttgatcgatgacgcaggacaaaactgattgttaatagtttttggttgaaggatatgatagattggcaacgaagttgtgccttgtccagcagaaacacacattctttctagttcatatctgttgtctcttgaaacttaaaacatacattcggctaggcatataatttatattcctgacttatggttttagagcctttcgggatgcccttagttgaggtaaattttgttctgcctctgaagttttgctgatgccattgttagtaatattcatattttgtaaggtgggcgcacgttattagatatgaatgatctgtaaggtcggtgcacatgtattatcaatgactattgtttcgggcgtca

SEQ ID NO: 109910 - DNA, 1403 bp, Zea Mays
gttcttgatacttggttctcaagtgctctgtggcctttcagcacgcttggttggcctgatctttccaaggaggattataagcatttttatccttcaactgttctggagacaggccacgatattttgttcttctgggttgcacgaatggtcatgatgggaattgagttcacaggatcagtaccattttcttatgtctatctacatggtcttatccgggatgctgagggtcgaaaaatgtcgaagacattagggaatgtcattgatcccctagataccatcaaagagtacgggacagatgctttgagatttacactatctttgggcactgcaggccaggacctcaatctctctacagaaaggttgacgtcaaataaggctttcacaaacaagctgtggaacgcagggaaatttttgttacagaacttgcctgataaaaatgatgtctctgcatgggatgtcttgttgtctaataagttcgactcagaagcatcactccagaaactgccattgccagaatgctgggtggttacaggactacatgaactcatcgataaggtcagcagaagctatgataagtttttcttcggagatgctgctagagaaatatatgattacttctggggggattttgctgattggtatattgaagctagcaaaacacggctttaccactcgagtgacaagatcgctgctgctacagcccagagtgttctggtgtatgtgtttgaaaacatactgaagttattgcatcccttcatgccattcgtcactgaagaattatggcaggcatttccatacagaaaacaagcacttatggttactccctggcctaccactgaccttcctaaagatttgaggtccatcaaacggttccagaatttgcaatcattgataagaggaatcagaaatgttcgagcagaatattctgttgagccagctaaacggatatcagcttctgttgttgctactgcggatgtcctggaatacgtatcagtaagtgtgcagatccattttgttagtgacactttttttctcgaatgcgcaggagaactgcgcatcttatataaaagagaggaagaaaagccatacaaaagatggcatcttgctgagcaagttccccaaggatcctacacacaaccgtaggacattacaaaccggaaccaagacttgaccctacctcgctaagagctgcaactaagcctaggtgctttagctcttcagctcctgccatagcccagctagtacattcatccaggaaccttcgaagaattctagataatgagggggactccccttcaaacactgttctgtttctctggatccatagacaccaagctcccaggaggccaggatgatcaaggagttaagcccctttttcatgttcttggaaaccctgaggctca

SEQ ID NO: 109911 - DNA, 956 bp, Zea Mays
aattttatattcattcatgctcctacataatgcgtgcctcggttcatccgatgcaacgccaccgtccgtcctacagctctggtcgcgcgagctaataataacagatggcgtggcctgcgccgccgttcctgcacgcgccgtcgccgctcgaggcgtgggcgtcggcggcgggcgccgtcgcgatggccttcctggccgtctccgagttccgaggcgaccacttggcctactccaagttctcgcgcggcggcggcggcggcggcggcggcggccagcaagggacgaagcagcagcagcagcggcagcgggtgcgggtaccgagccgaatcgggatggtgctgctctacttcccggcgctcgccgccgcggtcgcgtccttcgcggtgccaggcgccgtcgacggcgcgcgcgcgcacgtcctcagcgccgccatcgccgtccacttcctcaaacgggtcctcgaggcgctcttcctccaccggtacagcgggagcatgccgctggccacgtcgctgctgatcgccggccactacctgttcgccggcggcggcatgatctacgcgcagcgcctcaggcgccgcgggctcccggagccccgcgtggacctgctgcttcccggcgtgctcgccttcgccgtcggcctcgccggcaacttctaccaccactacctcctctcgaggctgagggcgcgccacggcggtgacgcaggcggcgagggggcgtacaggatccccagcggcgggctgttcggcctcgtcgcctgcccgcactacctcttcgagaccctcgccttcttcggcctcgccatggtctcccagacgctgttcgcgctcaccgtggccgtgggcaccgcggcctacctcgccggccggagccgcgccaccaggaagtggtacgccgccaagttcgacgacttcccgtccagggtcaaagctcttgtgccctatgtctggtag

SEQ ID NO: 109912 - DNA, 1401 bp, Zea Mays
tttcaattctccctttctgatggaagggctcgcccctaaaattgtgacgacatatcgagttttggacgtgcaggttcgctgggctgcaactggtgttctccttcacgtcgttgcgcgtgacgagggttggcgaggcgaggaagcgtgctcttgatcccgagtttaaagagggcgggcaacataattggaagcaagttttgtcaaatagcggtattgcaagtatctcggttgtgttgatagcattagtcatcagagggatagataggtgtttagattcaaaagagtcaactcttgttactgctcttattgatggtgttatctgacattatgcttgctataatggagatacatggtcatctgagctcgacattctttgtaaagctaagccacaaattatcacaacattcaagagtgcggaaggctaccattggtggtgtaaccatagatgggcttcttgtagcagcagctggattcttgattgggcttgcatttgtgctgataagatttttcaccactcaatgtgctcctgatgtattctggaaccagctgctagctatacccttggcacagctgccgccctatgtagaagtttgatcgattccttcttgagcgcaacagttcagtatagtgggttctacagtgttcgcaaaaaggtaaagccaacaaagttcaatatttaaaataactcgatgtgtccagggtttgcaagacaagattaagcagctctaagattaagatagttgccatcgatcttgccacaatttttacttgagctgagcagataacaagcggcttgggccagggtctcttggcctacgcgtagacagactccaggaagatgtcgatcttctgcttctccatcaccgtcgttatcatgcagcctgctggaatgccacagcgggacaggagcatggggatgagcaggcgcaagatgactgcaagtggcgccggatcccgacgttcggcgactggaacctgcgggacgacatgcccgtcacccaatacttgcaagcagggacttcttcatcgttgtgccgccggcagagaaggacgacgacgaggatctgttcaaggtgccccagtgttcctgccaagccctacaactacaagaaggtgaaacaaaacaggacgcttagtttctctcgccaattaattacactcagggaaaaaagttttcttccaccagctctgaagatagtatcagttagcactgtttcatatttccgttccatatctccatttccatatacattatacccagtcgacactgtttcataaatccttgaaatttctttttgtgtgaattttctgtggttaaacaccgagcatgcatgcaataaatataattaccaatatatttattttatggttcacattctagattgtataggatggaaatta

SEQ ID NO: 109913 - DNA, 2152 bp, Zea Mays
ggagctcctctccatcccatctccaacgtcgccccaacccccatcaccgacagggaacccacctctcacgtcgacaccgccagaggaggagatggtggagatacgggcgttgcgatccgaggcagcacgctagagcgacgagagcgtggcgacgtggagatcatgggagtcctgcgcagcgtcgcggcgaggcgcccgtcggggaggcagcgggcacggagagagcggagagtgacggcgacaacgggtcccgcctgtcgcgcgaaccagggaaatatctacatctcgtctgcgccgccgctgggatttattagggttctacttctagcccaggccaactccacaccaatccaatcctggggcgggcgactgcctccttccctcgatttgacgtgcgcttcctcttcctcgctcgctctcggtcgcagtcacaggcccacaacacaagcaactttcttattactgtcggggttccgaagccaacaaaaggacgcatcattccaactaactttcagagcagcgcagcgtgtcttgctttgttggtgccttgcaaaccgcaggaagtatctttgatatataaaaatgagaaataggccaaggagtatgctatcacgatgagccgcccagatatatatatcgtgtgcctccgtcacatcgtgctagctggttcttttcttcatgaggcatatagggtatttattcaaatgcccgcaaagggagggcagtgcactgagtgcatcgggagggctcatagttcttctttgactgcaagggataggcagcaggtcttcttcagcctcttttcaattctccctttctgatggaagctggcgtgccggaaggtgccgagcaggtacatgtctcagctgaagaatccgaagactgccaagaaaggcgaggagaccacggtggccaagagcgagaagcgggggcaagaatctaagacgaatgccaagaagaaaatcttaggacgctcacggaagtgtgcccatgccgaacctgatggggagaaccgaaacggttgcagcagcactgatgcagacgagaactcacttgcagaaactgctgcctccgatcaggagaggaaggtggtgctgcaggaattgagaatcgaggtggatacatcacgagctgacaattccaatgacaacaaggagaatctgtcgagtgctccgagtgatgaagaagcattgaacaattcacattctgaaaatgaaaacagacagttggagaacaatgagaacgttcctctgaacgagaatgttgctctgaaggtggctaaactgcagagcaaagtgcatcaagagcaaccaggaaagctcaagaaaactaccaaccctaggccattcaggctaaggactgatgaaagaggagtgcttaaagaagcaaaaccagagaaaaggcagccgttcactgagaataattccacggcagtactcaaggatgcaaacagaggagtgacgaagaaacgaagcacccagattgtaacggctcagcagctcgatgagtccagctccaggccggccgtcaacagcatccaatgcagagctgtgaaaccggagagggtttctagggttgcatcatcaacacgaagagccaaaacagcaagtgaccttatggcaccttcttcccggactgggaagaagaggaaggcggctacggtgaagctgtcgaggatccaaacaccagctgcttgagctcgggcagatcaaggaggaaatgagaaactgccgacaacggtttttgttgtctgctccagcgacgagttctgtatttattactgcgtcgaattcgttttccggattaggtggatttatgtacactgatcatttctttctgcgagtcgtgtggtggaacccctctgctttgttaatgtaccgccaccgaccagattttttcttcttctgtagaatgattcagaatttgattatttttctgtaacttaattgaactggggaaaggaggcccggcccaacccaacccatgaaacatttcaattttagctgtgtactaggatccatttcatcttgctaccatgtgttgttgcccttgatagatatcagaaatagggtgtagtgtatgagaagtagagaaccgatgctcttttatagccctcaatagatatcagtttctttcttttctttgatttaca

SEQ ID NO: 109914 - DNA, 2226 bp, Zea Mays
cttcacccaccagccccccaaatctcacgggctcacgacgatagacccgccctctgtgccacaaaggagctcctctccatcccatctccaacgtcgccccaacccccatcaccgacagggaacccacctctcacgtcgacaccgccagaggaggagatggtggagatacgggcgttgcgatccgaggcagcacgctagagcgacgagagcgtggcgacgtggagatcatgggagtcctgcgcagcgtcgcggcgaggcgcccgtcggggaggcagcgggcacggagagagcggagagtgacggcgacaacgggtcccgcctgtcgcgcgaaccagggaaatatctacatctcgtctgcgccgccgctgggatttattagggttctacttctagcccaggccaactccacaccaatccaatcctggggcgggcgactgcctccttccctcgatttgacgtgcgcttcctcttcctcgctcgctctcggtcgcagtcacaggcccacaacacaagcaactttcttattactgtcggggttccgaagccaacaaaaggacgcatcattccaactaactttcagagcagcgcagcgtgtcttgctttgttggtgccttgcaaaccgcaggtgctgtgctacaattgcagaaataaggtgtagtgtatgagaagtagagaaccaatgctcttttatagccctcaatagatatcagtttctttcttttctttgatttacacgcacactttcccagctactgtttgcttgtttggtatagcaggaagtatctttgatatataaaaatgagaaataggccaaggagtatgctatcacgatgagccgcccagatatatatatcgtgtgcctccgtcacatcgtgctagctggttcttttcttcatgaggcatatagggtatttattcaaatgcccgcaaagggagggcagtgcactgagtgcatcgggagggctcatagttcttctttgactgcaagggataggcagcaggtcttcttcagcctcttttcaattctccctttctgatggaagctggcgtgccggaaggtgccgagcaggtacatgtctcagctgaagaatccgaagactgccaagaaaggcgaggagaccacggtggccaagagcgagaagcgggggcaagaatctaagacgaatgccaagaagaaaatcttaggacgctcacggaagtgtgcccatgccgaacctgatggggagaaccgaaacggttgcagcagcactgatgcagacgagaactcacttgcagaaactgctgcctccgatcaggagaggaaggtggtgctgcaggaattgagaatcgaggtggatacatcacgagctgacaattccaatgacaacaaggagaatctgtcgagtgctccgagtgatgaagaagcattgaacaattcacattctgaaaatgaaaacagacagttggagaacaatgagaacgttcctctgaacgagaatgttgctctgaaggtggctaaactgcagagcaaagtgcatcaagagcaaccaggaaagctcaagaaaactaccaaccctaggccattcaggctaaggactgatgaaagaggagtgcttaaagaagcaaaaccagagaaaaggcagccgttcactgagaataattccacggcagtactcaaggatgcaaacagaggagtgacgaagaaacgaagcacccagattgtaacggctcagcagctcgatgagtccagctccaggccggccgtcaacagcatccaatgcagagctgtgaaaccggagagggtttctagggttgcatcatcaacacgaagagccaaaacagcaagtgaccttatggcaccttcttcccggactgggaagaagaggaaggcggctacggtgaagctgtcgaggatccaaacaccagctgcttgagctcgggcagatcaaggaggaaatgagaaactgccgacaacggtttttgttgtctgctccagcgacgagttctgtatttattactgcgtcgaattcgttttccggattaggtggatttatgtacactgatcatttctttctgcgagtcgtgtggtggaacccctctgctttgttaatgtaccgccaccgaccagattttttcttcttctgtagaatgattcagaatttgattatttttctgtaacttaattgaactggggaaaggaggcccggcccaacccaacccatgaaacatttcaattttagctgtgta

SEQ ID NO: 109915 - DNA, 1065 bp, Zea Mays
caacccccatcaccgacagggaacccacctctcacgtcgacaccgccagaggaggagatggtggagatacgggcgttgcgatccgaggcagcacgctagagcgacgagagcgtggcgacgtggagatcatgggagtcctgcgcagcgtcgcggcgaggcgcccgtcggggaggcagcgggcacggagagagcggagagtgacggcgacaacgggtcccgcctgtcgcgcgaaccagggaaatatctacatctcgtctgcgccgccgctgggatttattagggttctacttctagcccaggccaactccacaccaatccaatcctggggcgggcgactgcctccttccctcgatttgacgtgcgcttcctcttcctcgctcgctctcggtcgcagtcacaggtacctacgtcctgttcttcctcgcttatggatttctttccgcgtggaaggtagtagatctctctttgctcgatctgttttcgttttgtaagattcattcacgtctgcgctgtggctatttattcagatttggtcgtcatttctgggtttgaccagcgtaagcattggccccgatctggattctggagcttgactgtatctccttttgtttttttattttgtactatctaacatagattttgcgtctaacaatcattaagttacacgcacgcatgattatatttgaagtttaaccttgccgtgttgtggttaagtgcgcttctgagcacattatgtactgaattctgcaaatcagtaaaggaattataaattgtagagtcaacttccgttagggtacgctaataacatgcccgagaacgtgtatttccttaagaagaagttcttctgcttataaaatactctttgtgtctttgtttctcggaggtgctgcttttctaaaataaatatcacagctttagtgatcagtgattattgactaggttatctgtaaccaccacagaatctctgaaagtagaccagagaaatctagcggtaataatcatcggggtcagcttctttagccatgccccccgactgcccgacggggacttcatggcagattcgaa

SEQ ID NO: 109916 - DNA, 990 bp, Zea Mays
aggctgacagagagtccgttcctattctgcctggcgccatgatcatcgagaccctgaaggcgcgcatcttgcgcgcgctgaagccgtcgtccctctcggcagcgggcgacggcgcgcgctccccgaccaagccggcgcaccagtgccacggcggcgacgcgtccttcttcgacgcgcgggagccgctggacgcgtgggagctggtggacgacgggcgcgcggcgtcgcccggcgacccgctgctggggttccccgccgccgggggggagggcggagcgggcgtggtgctgtacacgacgacgctgcgcggcgtgcggcgcacgttcgaggactgcaacggcgtgcgcgcgctgctggagagcctgggcgcgccgttccaggagcgcgacgtgtccatggaccgcggcctgcgcgaccagctgtgggccgcggccggggagaaggcggtgccgccgcgcctgttcgtgcgcggccgcgacctcggcggcgcgggccaggtgctcgcgctccacgagcagggccgcctcgccccgctgctgccgtgcggagaggccggggcgagaagcaggtgcggcgcgtgcgccggggtcgggttcgtggtgtgcggcgcctgcgacggcagccggaaggcggggggagacggcggcgggcgctgccgcggcgggtgcaacgagaacggcctcgtcatgtgcccgctctgtctgtccatttagcggccgcgcagggcagggcaggccactggaaaccaccttcttcgtcgtctcgttctccgcttctgatcagagtcgttattagaatttattataagtgctccccttcttctcgcaggcggaagttgtgtccactccactgctgctggcctgaccgtctgagtgtgtgtttcgagttcttggttttgccacatcacgcttggagcgatgtgcgtgatgtatatatatgctgctagtttgtagatgtccatgtcaaaaaaaccatgcatgcttccatcca

SEQ ID NO: 109917 - DNA, 947 bp, Zea Mays
tgcctgacctatttaaatatttaataaatctaaaaaacgtttgttaaacaagcatttcagattattgtttcggcctactataaacctctaacagaaacaataattctgaacaaaaacgaactcgcacaaactctcttttctttcccccaaccctcccacatatacactttttttcttctcttttataaaaccccaccccgaaaatgtctccgctagtcagagtcctcgcaccgcacgcaacaagtacgcaggcagcgcagcctcgagccgtcgccatggcgagcaagcacctcgtcctcgccgcatgcctcctcctcctcctgcccaccgcctcggtcgccaccgacgtcgactactgcagtaagaaggactacccggtgaaggtgagcggggtgcagatcctgcccgatccggtcgaacccggcaagcccgccactttcaagatctccgcttctactgataaaaccatcgagaaggggaagctggtcatcgacgtaaagtatttcttcttctatgtgcactcggagacccgcgacatctgcggagagacttcctgcccagcgaccggcgacttcgtgctgtcccaccagcagacgctgccaggcttcactccgccgggctcctacacgatctacatgaagattgtcggggacgacaacgaggagctgagctgcatctcgttcgggttcagcatcggcttcgtcgcgtccagctgaacacgtccgagcccgggcacgagaggcatccagctcatggatgtaattacgtgaagcacactctgtatcctatgactttttgtgggtgtctgtgttcaactgagacgtttttatccggagttgaacatcacagtaaagcaaagtcactgataccatgtaatggaactctgagcgcttgatggggcccgtgttttttagactcacaataaagccggtttgtgtttgtgccta

SEQ ID NO: 109918 - DNA, 2808 bp, Zea Mays
tgcctgacctatttaaatatttaataaatctaaaaaacgtttgttaaacaagcatttcagattattgtttcggcctactataaacctctaacagaaacaataattctgaacaaaaacgaactcgcacaaactctcttttctttcccccaaccctcccacatatacactttttttcttctcttttataaaaccccaccccgaaaatgtctccgctagtcagagtcctcgcaccgcacgcaacaagtacgcaggcagcgcagcctcgagccgtcgccatggcgagcaagcacctcgtcctcgccgcatgcctcctcctcctcctgcccaccgcctcggtcgccaccgacgtcgactactgcagtaagaaggactacccggtgaaggtgagcggggtgcagatcctgcccgatccggtcgaacccggcaagcccgccactttcaagatctccgcttctactggtacagtttaaattcgatgtagccccttcgtctttacgcttcatgcttgctgatgttactgctgtgtgctgtcggagtactgaatagctgggcttttttttactccgtcatgaatttctggcatacgtacttaggactacgatgggaactagtaatcaccagtcaaaaaaagttcggcacgggactgaattttagctggaattttcctagattatttaagtacgcaggggtactggtacctttgggcgctgttgctggatgtaatttttttgtttgtgcatgtcctgcgctattggggattgggattttcctgctttattcgtccttactataccagccgctgacgaattagctagtccttttgggggaattctttgaggtggtaggttgcaggagtagttgaagactttgctcactgaattcattgcagtacttgggtatttggaagaaattagcaattggtgatgaacttcatagcatcatagtagtactaggtccagttgaatttcgctcgtatgttaactttggaggcgtagtacttaccttgggtattgttggagagcagctggacctattgtttttctttttctctcgcatgtacagttccattctcggtttggtttctgcatgcacttgtgtagttttagctgatagctggtgtgcttagcaggctgaaaagtgttgagtggctacagctacagtttatcttaagactaccatctgatagttcaatgtttctgcatgtagctgtttgttagtaatcccagtcatgtactcaactacacttaaaatagtcctttccatgacaccatcacgaaaaaaacatttctgaagtgttggattgcttgttacatgtcttttagtaccatagtgaaccactacaaggcaggacggtattagtccttgtgaagtagtaaggtcgcttgctctgatgtgcccagcatcacattaagcctgcaagactacaacatggaacacgactctgtcctgccacttggctttgagaaatagtaggttgctaatgctgcctggaacattgttgagaataactcagccatgcgcaacactatcgtaaaatggcatgtgattttttggcagtctctgtttagtggttcattcatatagttggtagttgcgtgcaacttcagttcttctgttgaatccgtttagcatctgtttcagcgaacttgttttgaacagagctgcggaatttctttctatgaaggaacaacaggataatcaacttagtcactgattgcaccgtaagaagtagcatcttttacccatttttgaaaaaaatagtaataaaatatattacggaggatccacctaattgagtcatctttgtgtttcgtatcctgctcttcacatggcaagttatggtatgactgactgatttttcggagtgtagtaacaacgatcgagagtaatttgtcctctagccgcaccatagtaatattccgtccctgacatgctaataagtgccacaatactggcatatgcataatatttagtcatgtactgcaatgaatcgtccaaattttactgtgcctgatgtatttagttttcaaaaatattttgaattagttgaacatgccacatatgcgcgccctgtggcaagtcggtcacctgcaccagtcatttgcatgcggcacagctgcaggggtatgccacattgtttgatcaatcttattctttgtaaaaaaaaagactccactgtttgcatgcattttattggtctaagttatctgagtaccaaaccatgtcatgatgggatcgggatctagtttttttttcgagttgtcaaaatgaagtctcttatatccttgcgaagagataatgatttccatggattttccagataaaaccatcgagaaggggaagctggtcatcgacgtaaagtatttcttcttctatgtgcactcggagacccgcgacatctgcggagagacttcctgcccagcgaccggcgacttcgtgctgtcccaccagcagacgctgccaggcttcactccgccgggctcctacacgatctacatgaagattgtcggggacgacaacgaggagctgagctgcatctcgttcgggttcagcatcggcttcgtcgcgtccagctgaacacgtccgagcccgggcacgagaggcatccagctcatggatgtaattacgtgaagcacactctgtatcctatgactttttgtgggtgtctgtgttcaactgagacgtttttatccggagttgaacatcacagtaaagcaaagtcactgataccatgtaatggaactctgagcgcttgatggggcccgtgttttttagactcacaataaagccggtttgtgtttgtgccta

SEQ ID NO: 109919 - DNA, 1525 bp, Zea Mays
tgcctgacctatttaaatatttaataaatctaaaaaacgtttgttaaacaagcatttcagattattgtttcggcctactataaacctctaacagaaacaataattctgaacaaaaacgaactcgcacaaactctcttttctttcccccaaccctcccacatatacactttttttcttctcttttataaaaccccaccccgaaaatgtctccgctagtcagagtcctcgcaccgcacgcaacaagtacgcaggcagcgcagcctcgagccgtcgccatggcgagcaagcacctcgtcctcgccgcatgcctcctcctcctcctgcccaccgcctcggtcgccaccgacgtcgactactgcagtgagcatcgccgcctccacgccgcccgctccgtcgtcgggggagggcggagctgcagatttcgtagacctgtaactgcagatttcgctttttgatgtggcctgcaggtaagaaggactacccggtgaaggtgagcggggtgcagatcctgcccgatccggtcgaacccggcaagcccgccactttcaagatctccgcttctactgataaaaccatcgagaaggggaagctggtcatcgacgtaaagtatttcttcttctatgtgcactcggagacccgcgacatctgcggagagacttcctgcccagcgaccggcgacttcgtgctgtcccaccagcagacgctgccaggcttcactccgccggtgagacttctccgcacagccagcaatcgcacgtctgggccctgtttggcagcattgttttctaatactgtggtttagaataccatagcatatataattttttttgggttgtgcagagaaaacttgggtcaagagtggagtatccaataccacagaaacactacagtatcgaacaaaaccataggataaaaaaaacagagttttggaagtggtcaatgaaacatcttttagctagcctataaaactacggtattctccagtactacagtatttaccttgaaactaggaaatcacggagcttctgaacgggtccttttttttagttctgttcaggaaaacccccagattccctctgttgtgttttcttaggacctggcagattgtgcgcctgatattcagactcggattggtgtcagtcaaacgttgttcatgcacactgatgcgttctgaggttctttccgctccgtcgcagggctcctacacgatctacatgaagattgtcggggacgacaacgaggagctgagctgcatctcgttcgggttcagcatcggcttcgtcgcgtccagctgaacacgtccgagcccgggcacgagaggcatccagctcatggatgtaattacgtgaagcacactctgtatcctatgactttttgtgggtgtctgtgttcaactgagacgtttttatccggagttgaacatcacagtaaagcaaagtcactgataccatgtaatggaactctgagcgcttgatggggcccgtgttttttagactcacaataaagccggtttgtgtttgtgcct

SEQ ID NO: 109920 - DNA, 495 bp, Zea Mays
atgatgccccaccggcgggcgcagacgacgactcgtggtcgtggacgaacctcagctcgtgccgccgaaggtctggatcgccgccgtacggccggcggccggcattcagagagcggtcgtcgtcggccgtactactcgatcgacggacgcgcggctgctaatagctggccgaccaccgccgcgccgtcgatcggtcgacgtacggccggcagcaagaaagacgacgagagcatttttcagtctacttgcatgattaattacctgagggcggtgagccgatcgggaacttggccgcagcgcacccctggggagcggcggcggcccaccagggcgcggccgggccggcgccgccgtcggtggcgatcacctggaagccgccgagcccgtggtcctggaagcccgtcgtcgttgccgccgacggcctggaagcaggccgggagaccgagaacaacaggtgttcctgctgcaagttcattgccgccaggcgccagctag

SEQ ID NO: 109921 - DNA, 1802 bp, Zea Mays
cttttttttcagactcggattggtccgccctccttgtgctccgccggcaatggcgtccaccgccgtcaagctcatcgacatcgcagtcaacttcacagatggcatgttcaagggcatctaccacggcaagcagtgccacgccgccgacatcccggccgtactcgcgcgcgcgtgggctgcaggcgtcgatcgcatcattgtcaccggaggctccctgaaagagtccagagaggcattgcagatcgccgagaccgacgggagactgttctgcactgtgggagtgcacccaacaagatgcggggaattcgaggagagtggagatcccgagggtcattttcaggcactgctggctctagcgaaggagggtttagataaaggcaaggtcgttgctgttggtgaatgtggtttggattatgacagacttcagttctgtccggcagatatgcaaaagaagtacttcgagaaacaatttgagttggctgaagcagtaaaactgcccatgtttcttcacatgcgtgctgctggtgaagacttctgtgaaatcatgacacggaatttgcacagattccctggtggggttacacattccttcactgactcagcagaagatcgggacatgctactttcttttgagaagatgtttataggtgttaatggttgctctctgaaaactaacgaaaatcttgaggttctacgaggcattcctgtcgagaggttgatgatagaaacagattctccatattgtgacataagaaatactcatgctggaagccagtatgtaaaatctgtctggccatctaagaagaaagaaaagtatgagccagattcaacagtaaaaggtcgcaatgagccttgtttagttaggcaagttcttgaggtagtggctggaagcaaaggaatttctgacatagaaggcctgagtagaactctgtaccacaacacatgcaggctcttctttcctcaagatcttgacgcttctgctaatgcgcagcttgagagtggtactgccgtccaggattgctgatgtcagagtgatttttttattataaatgtttccttttgactggtactgccgtccaggtttcgtacaacttccaatatgcctatgaaatatttttggtcttatatttcccatgtttcatgagcctgatgacatgtcaggcacgttctgactatgtacagccctactgaggctatgtcctaaaatcatttagggctaatttgacaatcatatttttcaaggatttttcattttttttcaagggaaataaattagttcattttctctttaggaaaaatgggaatcccctgagaaaattaagttgtcaaactagctcttaaactgttctttttactgagtatacacaaaacagaggtacaacttgaattgatcacatctttcaaacgtcaattgattcctcggtggctgcagttgcggcggcgtagggcgggggtaggacagggcgcccacgcggtggcggaggccgacatggtggcgctgcaggttctggaaccggaggctgagaagcggggcaggggcgtaatggcggctgcggtggccatggccggagcgcagagatttatagaatatgacgaatattgaataaattattcactatccaggcgtaggggtgggcattttaaaaccgaacctgaacccgaaccaaacccgaatagaccgaattgtcggtctattcgggttttcgggttcgggttcggttcctatatgtgctatatttcgggatatgtgttcgggttcggttcctaacctttaaaacccaaatagacctaataacccgaaa

SEQ ID NO: 109922 - DNA, 1983 bp, Zea Mays
agaggatttctattgtagaaatgcagttaggcccattaggttttgcccttttttttcagactcggattggtccgccctccttgtgctccgccggcaatggcgtccaccgccgtcaagctcatcggcaagttcctccgctccctctcccacctcaccgtcctgtatcgtcccctctctaccccggactgaccctctgccttcaccttgccctccacccccctccctccccttctgcggccgtggcgagcaccccaccagacatcgcagtcaacttcacagatggcatgttcaagggcatctaccacggcaagcagtgccacgccgccgacatcccggccgtactcgcgcgcgcgtgggctgcaggcgtcgatcgcatcattgtcaccggaggctccctgaaagagtccagagaggcattgcagatcgccgagaccgacgggagactgttctgcactgtgggagtgcacccaacaagatgcggggaattcgaggagagtggagatcccgagggtcattttcaggcactgctggctctagcgaaggagggtttagataaaggcaaggtcgttgctgttggtgaatgtggtttggattatgacagacttcagttctgtccggcagatatgcaaaagaagtacttcgagaaacaatttgagttggctgaagcagtaaaactgcccatgtttcttcacatgcgtgctgctggtgaagacttctgtgaaatcatgacacggaatttgcacagattccctggtggggttacacattccttcactgactcagcagaagatcgggacatgctactttcttttgagaagatgtttataggtgttaatggttgctctctgaaaactaacgaaaatcttgaggttctacgaggcattcctgtcgagaggttgatgatagaaacagattctccatattgtgacataagaaatactcatgctggaagccagtatgtaaaatctgtctggccatctaagaagaaagaaaagtatgagccagattcaacagtaaaaggtcgcaatgagccttgtttagttaggcaagttcttgaggtagtggctggaagcaaaggaatttctgacatagaaggcctgagtagaactctgtaccacaacacatgcaggctcttctttcctcaagatcttgacgcttctgctaatgcgcagcttgagagtggtactgccgtccaggattgctgatgtcagagtgatttttttattataaatgtttccttttgactggtactgccgtccaggtttcgtacaacttccaatatgcctatgaaatatttttggtcttatatttcccatgtttcatgagcctgatgacatgtcaggcacgttctgactatgtacagccctactgaggctatgtcctaaaatcatttagggctaatttgacaatcatatttttcaaggatttttcattttttttcaagggaaataaattagttcattttctctttaggaaaaatgggaatcccctgagaaaattaagttgtcaaactagctcttaaactgttctttttactgagtatacacaaaacagaggtacaacttgaattgatcacatctttcaaacgtcaattgattcctcggtggctgcagttgcggcggcgtagggcgggggtaggacagggcgcccacgcggtggcggaggccgacatggtggcgctgcaggttctggaaccggaggctgagaagcggggcaggggcgtaatggcggctgcggtggccatggccggagcgcagagatttatagaatatgacgaatattgaataaattattcactatccaggcgtaggggtgggcattttaaaaccgaacctgaacccgaaccaaacccgaatagaccgaattgtcggtctattcgggttttcgggttcgggttcggttcctatatgtgctatatttcgggatatgtgttcgggttcggttcctaacctttaaaacccaaatagacctaataacccgaaa

SEQ ID NO: 109923 - DNA, 771 bp, Zea Mays
atggcgcacctcgcacacgactacttcacacttccacctgaggacaagcctccgctcggcccctacatcgacacggctccatctccaacttcctttatcccgcagttggtggagaccgaggaagaggatgaggttttccacacctcgcccagcacgtgttcgacgatggtccccaaccgcgatgccaccaccagcatgctcgccatggtcgaggtcacctggagcgacgagtacgcgctcgtggacctgcagtccgtctgctactactccacgtccaacgccaagcccaagttcaatagcctcgacgaggtcgatccgaagctgctcaagaccttcatcccgctcaccgagcagaagcacttctccgacgtcgccatcgacgccgtcatcgactccgcctccatcaccatcacccaccacgaggcgctgatggccaagggtgtcatcttctgctccatccccaagtccatctgtgagtacccagaccttgtcaggcactacctgggcagcatcgtactgccaggcgacaactactatgccgccctcaattcagcggtgttcagcgacgggtccttttgcttcgttcccaaggacacaatctgccccatggaaatctcgacctactttaggatcaacaacaaggagaccaaccagttcgagaggactctgattgtggccgttgagagatgcacctatgtcttgctcattgagttgtgtcttcagctgaattttccagttcagataatggtgaagatggtgctactttactga

SEQ ID NO: 109924 - DNA, 113 bp, Zea Mays
tattttttgtaaatagattatgtagctcgacggcggagggtggcggcggcacacggttttgctcccacgtcgtacacgtaagcagtgacatggatggatgtacgtggacgttg

SEQ ID NO: 109925 - DNA, 2146 bp, Zea Mays
atccacatttcgtataatccttcattgactgtctttgctttcgattggtaacatgataagcttactactcttcagaatcagagagctgttcagatgactggagttcacattcatcttctgctggcaacccagacataccatatgtggttgtctccaagtcatcaattgtgactgctgtatgcaaggagattcttggctgctacaggaagttacttggcattcctgatctgttgaatcaaccaaacatgtcaattctgaagcaacttttgcagactttacagccaactgaaaattttgatgatgttctttccgagttccaaccatctcttgctccttgcaatgttgattacctgtattgtggagcatgtaaaatattggaggatattatggattcagtgtcctcattttcataccttctgtcttctaatgtgttaattactatacaatcaattgtaaattctgttgttgtgttgttggacaaatctggggaaccaaatgggaaaaatatacacatgggatgctccaaagcaatcattccctttctgcgaaagcgtcttggatactcagctcataagctgctcagtgctgatttccctagcgaagatgctggaaaaggatggcagagtaaaggtgatcttatacagaagatattgcaaatataccttaggaatagtgactctacttcagatctacttgctgagataggtcgtgaattgcctaaggaaccttcgctcaaaacaaaagataaccaagatgtatcgtatggttttccaacattgtgttcctccactattacctcttggtaccgtgtgcttcacgaggagaacacagggagtttaaacaagacgatcaaacaagcactgaaggctagaggatcagttgatactattcttcaagagattcagaaatcagtggatgcatttgtctctctaataggaatgtgcaagtcccacgaaaaggtttctatgcatgcaatggcagttaaacatggggggaaatttattgacacatttctgaaagccttcaactttctagagagacatttcgagcaacataatgacaccatagttaaaatgctaaaacaactccagaaaggaacaagaataatccaatccatatgttcagatgctaagggtaacaagcggacaatgatcacaagcaaagtacctcctgcaaagagatccatggagcggttcttgttccaggtcaaggcgctgctacacagctgctccgccgagaaggaatttcagatgggcaatttgaagcacaaggacttgcaaggccatgtggtgagctctcaggcgtatgggaacgtggatgaggaagatgaggagcagacggaggtcgactccgaccttccagctgatgagcacgataatggcaatgccatggaggaggatgctgtggaaggtagcaacgagacgccgatggaggaggaagaggaatagtggcataggtaccaatctgtacatctctttctctctaagccggccaaaaatctgtcccaaaaattaacagttttgtgtgtgcatttagtgtagaaaaaaagataggatccccaccagaatctaggttgcaacgtcacttgtaaatatggaagtctgaataagtagtttatatattgctagcagtggtcgtttcataaccaaaacaccattaatattaatagcaaactcataaacacaaaatgacatagaaagaagcaatattacaacgcgaggggaaaagggtggtccgcctctggctcgctctgggagatgacgagattcagatggcctttgcgggtggcgcggtggaggcggagaggtcggcgaggagcggctcgttggcggaggcgccgccggcgttggtgggggagtccgggtcgtggttggggtcgagcgcgcggtccatggcgcgtcggccggtctcgaggcagggcttgcatgccatctcgatggtgatccagccgagcaccaccgcggcgatcgcgatcaccgccgtcaccaccgcccccatcgcgatgaagtattcctctcgtcctctgcgcggacggcagatctggtggtgtggtggatgcagtggagtgtccacgggacgggtgctgggtgcggaaactgcgaaccagttacagagggacaaaggggccgttgctgtgggtcccggc

SEQ ID NO: 109926 - DNA, 1421 bp, Zea Mays
cacgagcaggtttcctgcaacgcagcgcgtcgagcagaccagacccgcccggcctggttgtggtcgaggaggagactggaggaggacgggatagcagacgagaggagaggacgcgcacgccatgtcaggtccaccaccaaagccttgggagcgatctggaactgaaggaacttcaggtccagcacctttcaagcccccatctggtggaagcaccagtgatgttgttgaagcttctggtaccgctaaacccagcgaaaatgttactgcgatggaggggaatgccgctcctaatgtaaatagcactgtttcaaggcctatgccacagcggccttggcagcagacaggttatggaaacacctatggagggtatggtggatccaacatgtatagttcatatggtggatttggcaacacttatggtaccggtggactcggaaatagcatgtactcgagttacggaggaggttatggtggtggcatgtacggcggtggcatgtatggaggaggcatgtatggtgggatgggaggttatggtggttacggcatgggcggaatgggtggtatgggcatgggtccatacggtaatcaggatccaaattcgatgggccctcctgcatccccgccaggtttctgggtgtccttcctccgagtgatgcatggtgttgtcaatttcttcggacgaatctcattccttgttgaacagaacactcaggcatcctatttcttcatgacagcaatgctgcagctcttcgaccggtccggtatgctctacggtgagcttgcacggtttgtgctgcgtttgctaggagtgagaagaaagccaaagaaggggggcagcattcaggggccagaagcgctggcgttcgagggacctagccggcagtctaccgaggcaccgaaaacgaacaactgggacaacgtctggggaaactgagatcatgcctatgggtgcaacgagttgaatcatatagaagaagtgcaagggctatgacctatgggagtttgcttgccttttgattcatcaaaaagaagattgcggccagataccgcctttggtggcaacttaggggaagctgtgaagaagaaactgctgggcctctcttgcttttcccagctttgccttgatgtacctgcgagggccatggcccatgacactggtaggttttttttttcatcgcaactgtaaggtttggtgaagaacggtttcacagtgcactgatatatatgtagctgcttgctgctgttgtgatatcagtgtgggtatcgattgtttgtatatctctatctgggtaaatagtgtccgccttcgaaaagaatacatcaaatgtttgtgcaccctttacagcctcgtctaacttggttttgaatttggacttggacttgttgagagtccccaccccatgcaagtgtcgattctgttg

SEQ ID NO: 109927 - DNA, 1374 bp, Zea Mays
cccgcctccccggtctgtgtttgccccctgcccggttggcccctggctctcctcccgcccgcccggccgcccccaccccacccaatcctaccccgcggggggaattctcagttctcgcggcgacgactgggagaccgccgccgccgccatcctactccaggtgccctgagaactcgatcgggctcttcgctggcgacgaacacccaccagctatcaggtgtacaaccatgtacttcaccgtgtccgcccctgcaatgtctctatgatcctccagctacggtagacgccccgttcgctagctgaggacctcctggttcctgtgagcaggcggcgtggttagctgctgccttcaagaatgcagagacccaatgcgccgtcggcttgcgccaccatcaccttcgcggaggctctaaggagggagatggagtaccgcaagtgggtggagaggacccacccacatctgctcgtcggaatctgcggagcccctgaaatgcagagagatttcagtgcaggaccagtacctgatgcgatcaagagaaaactagctgccgagaccagtgtgcctccacaacaatcaagtttcagctgtgtaactggacagaagcagccccaaaactggtaccccacaaagaaaaaggtgaaagttccacatcttccatcgcagattctgcagtgtcccagaccaaacgtggtgccatccttctggtgcaaaatctgcaaggtcgactgtgtcaccgagttcaatttcagcgctcacgttggaggcaaaaagcacaaggccaaaaagctagagattctaggtaagaggaacgctgggggacctgctagccgatgcgcaggcaacaggagcgctggacagaatggactagcagtttctgggagcagaagcagcgaacagaatgtggctggcagcgttgctgctggaccgaactgtgacatgtcgtctgagagcagaactaatggaacagaaggaagtgggtgcactgtccggctatgagcagcttgggtttcactcgagtctggtatttcaataaaagttcgccttgcacattttcttctcaagggcacagttaacatatttatgtgtcagatggctaggccgctagggagatttcatctgatgggttggactgaacaacactagtcagataataagttgaaacgtatgcactatgcagtgtcctattcccatgtgagagcagtacattgtttggacatatatctgacagcagatgcatcctgtgtcctttcgcttccttctcgaaaatgtacagtagctaaccttgttcgggtaggaggtggaagttgaggacgctgttctgagtatgtactgggtagttataatgtatgacatcatggcttgtttgttgtttc

SEQ ID NO: 109928 - DNA, 1085 bp, Zea Mays
cccgcctccccggtctgtgtttgccccctgcccggttggcccctggctctcctcccgcccgcccggccgcccccaccccacccaatcctaccccgcggggggaattctcagttctcgcggcgacgactgggagaccgccgccgccgccatcctactccaggtgccctgagaactcgatcgggctcttcgctggcgacgaacacccaccaggatttcagtgcaggaccagtacctgatgcgatcaagagaaaactagctgccgagaccagtgtgcctccacaacaatcaagtttcagctgtgtaactggacagaagcagccccaaaactggtaccccacaaagaaaaaggtgaaagttccacatcttccatcgcagattctgcagtgtcccagaccaaacgtggtgccatccttctggtgcaaaatctgcaaggtcgactgtgtcaccgagttcaatttcagcgctcacgttggaggcaaaaagcacaaggccaaaaagctagagattctaggtaagaggaacgctgggggacctgctagccgatgcgcaggcaacaggagcgctggacagaatggactagcagtttctgggagcagaagcagcgaacagaatgtggctggcagcgttgctgctggaccgaactgtgacatgtcgtctgagagcagaactaatggaacagaaggaagtgggtgcactgtccggctatgagcagcttgggtttcactcgagtctggtatttcaataaaagttcgccttgcacattttcttctcaagggcacagttaacatatttatgtgtcagatggctaggccgctagggagatttcatctgatgggttggactgaacaacactagtcagataataagttgaaacgtatgcactatgcagtgtcctattcccatgtgagagcagtacattgtttggacatatatctgacagcagatgcatcctgtgtcctttcgcttccttctcgaaaatgtacagtagctaaccttgttcgggtaggaggtggaagttgaggacgctgttctgagtatgtactgggtagttataatgtatgacatcatggcttgtttgttgtttc

SEQ ID NO: 109929 - DNA, 2278 bp, Zea Mays
ctccctccatccatcacgctcccccagaccttcgcctcccgactccgcgcgccgcctgccgaaccacaggtccgatcgcccgcgccccgccgccctcgccgctccagatctggcgacgacggaccgcaccgcaccgcctcgccgatcgcttgctcgctctcgtcgcgtcccgcgcgcgccctcattctcactgccacgacttcctacccgctagcgccgccgccgagcgcgcggcctcggaattacgcccgtcctagtgggaagccgccgccgcgagcggcaacggcaatgcggggcgcgccggccgggtgcgcgtggtaggggtccgcggccgccgcgacgatggaggtggaggccatgggcggcgccgggggcaagcggggcagggccaagggcgcgggcgcgggcgcgggcgccgagccggagccgaagcgacgcgcgatggcggtggccgtgcagccgcccgccgccgcgccgtgggcgcagcagcacccggcctcgcggatctaccgcgtctcccgggcctccggcggcaaggaccgccacagcaaggtgtacacggccaagggcatcagggaccgccgcgtccgcctctccgttgccaccgccatccagttctacgacctgcaggaccgcctcggctacgaccagcccagcaaggccatcgagtggctcatcagggccgctgccgaggccatcgacaagctcccctcgctcgacgccgccgcgggcttccccgcgcacccggcctccgccaaggaccacgccccgcctgtcggtgacgacgacgaccaccaccaccagcagcagcagcagctcacgaggtccggatgcagcagcacgtccgagaccagcaagggctccgtcctctccctctcccgctccgagagccgggtcaaggcgcgggagcgcgcaagggagcggaacaccgttgccagggacaaggaccccgccgccaacgacaccaccgccaccacctcggcgcaggcggcgtccttcaccgagctgcttacggggatggccgcggccagcgccgcccccgctcaacacaagcaccagctgcggcagtcgtcggtgtcctggcagccgacgattgtctccgccaccaccgactacatcgggttcgcgcagccccggaagggcggggggcacgcgatggcgcacgccttcgcctcccccgctcctcacctcggcaacattgcgtccatcgccatggccccagcgcagcacttcggcttggccagtggtgccgtcaccgtcgcctccgggggcggcggcgagccgcacgccgagatgacgcacttctcgttcttgcaggaccatttcatgcccgtccacgcggcaccggcgccggccccggcgtcggctcccgccggagaatacaacctcgacttctccatgtcctcgggtcttatgggtgtcaacactaggggggcccttcagtccaattcgcagccgcatatctccggccaccatcaccagcagcagcagctccagaggctgtctactccactggacgctcccaacatacccttcctgtacagctctgccgccgctgcagctgcggcggtcaccacgcccaccacggccgacggccagttcgccgcgttccagctctggaacgggttccagcacgcagacatgaaggagaagggcaagcactgatcgacacctgcccagcgcagtgcgctgctatctggatggacgtggaaactggaaaggcgtcaaataatcgcagcctgtccctacaaagcaccatccattattgcctgaagctgctgccatgattgcagtggggatggttcctccccccgaattcttggaagtagatcatccttatttcaggctatcacactgaagaacctcgtcgtccttactctggcaaataaccttccgcacttctttttctgcctgctgctgtactcatttcctggaggcgaggttttcgggggcatgatttgccagaccagagcgcccccgtcagagatctactgtgatcattcccactcgaaaactttgccggtggatgggttcggtttggcccccttgatcggctctctctcgagctttagtgatcagttagttagttcttatatccctgccatttgtatggttctcggttgtgtgttgcacgaggagtgggaggactccagtgcatgacgtgtgtgtgcaagtttgtgcccctgttgtgtactactggcatagtgagagttctcctcgtatgtaaattttatttttattgttttgcagtggttatctcgtgttgctccctgatttg

SEQ ID NO: 109930 - DNA, 859 bp, Zea Mays
gaccttcgcctcccgactccgcgcgccgcccgccgccgcgccgtgggcgcagcagcacccggcctcgcggatctaccgcgtctcccgggcctccggcggcaaggaccgccacagcaaggtgtacacggccaagggcatcagggaccgccgcgtccgcctctccgttgccaccgccatccagttctacgacctgcaggaccgcctcggctacgaccagcccagcaaggccatcgagtggctcatcagggccgctgccgaggccatcgacaagctcccctcgctcgacgccgccgcgggcttccccgcgcacccggcctccgccaaggaccacgccccgcctgtcggtgacgacgacgaccaccaccaccagcagcagcagcagctcacgaggtccggatgcagcagcacgtccgagaccagcaagggctccgtcctctccctctcccgctccgagagccgggtcaaggcgcgggagcgcgcaagggagcggaacaccgttgccagggacaaggaccccgccgccaacgacaccaccgccaccacctcggcgcaggcggcgtccttcaccgagctgcttacggggatggccgcggccagcgccgcccccgctcaacacaagcaccagctgcggcagtcgtcggtgtcctggcagccgacgattgtctccgccaccaccgactacatcgggttcgcgcagccccggaagggcggggggcacgcgatggcgcacgccttcgcctcccccgctcctcacctcggcaacattgcgtccatcgccatggccccagcgcagcacttcggcttggccagtggtgccgtcaccgtcgcctccgggggcggcggcgagccgcacgccgag

SEQ ID NO: 109931 - DNA, 98 bp, Zea Mays
atcagcttgccacgaccaacctggtgtgatgaacacaggaacagcgatggtttccggttcaggcgttgtatcgagcatctaacgggcggctagagaag

SEQ ID NO: 109932 - DNA, 577 bp, Zea Mays
aatgcacagtcaaagaaactccaaagtgatgcatacattgtttagatgtcatttgttttatttactgatttcttaatcatagttattctcttgttatagtgagtagatgaaacacaaataaggagatcaactatattctcattatatacactttggatattacaaacaccctgcccctccttatatagagagataaccctaacttaatagctataaagtaaccgtgcgtgaacagtggccgcggctaacctaaccctaatgacctagctaatgatttaaggcccataaaagcccataacattccatccttccttaaaaacagctcgtccgccaactgtagtcaagaagaattgatccatactaaactagcacttaatgactcaatgctaagtcttttacatctcgacttagtattttattcacctagaaaaaatttgaaccacatcagtggccggatctgccgaaggaggacgcgtcggcggccagatcgaccgaagacggacatggctgcggtagcgcagagggctccctgcgcttggcgaaggtcggtggcaccctccggtgttgtagctcaggt

SEQ ID NO: 109933 - DNA, 751 bp, Zea Mays
tttttttgtatgtggttgtaagtttggtctgaagattgcaatccagtccaaacctattgggtttcttcttgttattataagttgtgttgtgtgcttaagttctcatgctcggctgttgctttgtgctgctttttctgcagctgttatggagacggaaggctttgattacctggaggatacatgcccgtccctactatctgacttgttagctactgtggcagtcgtggacgacgatcttgcatcccttaaccgaaaaaggggagtcagcgggaaccaagtcatggctctagtgggaagcgttgaaaggcgcacccggaggaagctttagtagctggcttccctagagggagactgtagttgacaacgatttgatttggacgctggtagctgtgaataatatcgtatccagatgattttttttttttttttgcagaagcagaagttgtaaattttttgaattgaatgcctttttttttcctgtttgggacccttccttacgtaaagttctagcttttatactgttttcaataccctaaattgtcccctaccctaccctatatttagagaagattcttctctaagctgcagcactgtccagattctctctctttttttctctatccattttaatactttaaaaagaggattaagtcaaactaatattatatatataggacatttaagggtattgataataaatatgtacaaaaaactagagcaaatatgtccctaacatatgtatttaacatac

SEQ ID NO: 109934 - DNA, 1723 bp, Zea Mays
tttgcatcccggatgcaaataatttttttccgccaaagccaggattcctctgctcttcctgtttagggtttccccctctctctgctcctgccggatgcgatggcgattccgccgcggactccttccccgccgccatcgtggtcgcgctctgtaaccgagaccgttcgggggtcccaccagttcaccgtacggggctactccctcgccaagggcatgggccccggccgctacctcgccagcgacgtcttcgccgtcggaggataccactgggccgtctacctctaccccgacggcaagaacgccgaggacaactccaactacgtctccgttttcgtcgccctcgcttccgacggcatcgacgtccgagccctcttcgagctcaccctcctcgaccagtccggccgcggctgccacaaggttcactcgcactttgaccgctcgctcaagttcggcccatacccccctcaagtacaggggatccatgtggggttacaagcgcttctacaaaagaacactcttggaagaatctgatttcttaaagaatgattgcctagtgatgaactgcacagtaggtgttgtcaagaaccgtatagaaacaccaaaggacatccagattcatgttccacgatcagacatgggccgctgcttcaaggagctcctcagccgctgcattggatgtgacataacattcgaagtgcgagatgagaaagtcagggcacacaagtggattcttgctgctcgctccccagtatttaaagcccagttctttggtcctattggaaagcctgacctgcacacggttgttgtggaggatgtggaacctgttgtcttcaaggcaatggtgaacttcatttacgctgatgaactccccagcattcctgagctagctgggtctgcctcaacgtggacatcaacagtagtagtacagcatttgttggcagcagctgatagatatggactggtccgtctgcgtatcctgtgtgaatcaaagctctgtgatgaactgactcctgaaactgtcgcaacaactttagcccttgctgaacagcaccattgtgctgagctgaagtctgcatgtctaaagttcattgctttgcgaggaaatttgggagctgttatggagacggaaggctttgattacctggaggatacatgcccgtccctactatctgacttgttagctactgtggcagtcgtggacgacgatcttgcatcccttaaccgaaaaaggggagtcagcgggaaccaagtcatggctctagtgggaagcgttgaaaggcgcacccggaggaagctttagtagctggcttccctagagggagactgtagttgacaacgatttgatttggacgctggtagctgtgaataatatcgtatccagatgattttttttttttttttgcagaagcagaagttgtaaattttttgaattgaatgcctttttttttcctgtttgggacccttccttacgtaaagttctagcttttatactgttttcaataccctaaattgtcccctaccctaccctatatttagagaagattcttctctaagctgcagcactgtccagattctctctctttttttctctatccattttaatactttaaaaagaggattaagtcaaactaatattatatatataggacatttaagggtattgataataaatatgtacaaaaaactagagcaaatatgtccctaacatatgtatttaacatac

SEQ ID NO: 109935 - DNA, 1361 bp, Zea Mays
cgtgtgccggcgccaaacgcaatccgctgctgaaaaaaaaaagagagaagggaatcccaccgctctccccacctcactgctgccgggccccagccgccgcgcacgcccaaaacacacactgacgcgtgggcccactgccttttcccttgttgcctctctcctttgtgcgtcttcttcctccctcgcgcaccgcaggcaaggcacacaagagaaaagcagagggggccagatgaggagggacctcgcatcctccttcgctaccgccgcatcctcttcctcggcagccgacgcgctccggggctggtgggatgacgtcaacgagtcgccccagtgccaggacgcggccttcttctccctcgccgccgcctacgccctcgtctccgccgtcgcactgattcagctcgtcaggatccagcgccgggtgcccgagttcggatggaccacgcagaaggtcttccacctcatgaacttccttgtcaacggggtccgtgctctggtattcggcttccatgtccacgtcttcctcctccgcgcaaaagtatacaagttggtgttgctagatctccctggtctgttgtttttctccacctacaccttgctcgtgctcttctgggcagaaatataccatcaggctaggagtctcccaacagacaagctgaggcctgcatacattgccgttaacaccatcatatacgttgttcaggtttgcatatggatataccttgggataaatgataatgctgtggtcgagctagccagcaaaatattcatcgtagctgtctccttcgttgcgcttcttggcttttcagtatatggtggaaggttatttgtcttgctgagacgtttccctattgaatctaaggggcggcaaaagaagctttatgaggttgggactgtgacagcaatttgtgttacctgcttcctgataagatgtgttgtggttgcattatctgcgtttgatgccgatgtatctctcgaggttttggaccatccagtcctagatttcttctattatatgcttgcggagatactgccttctgcgctagttctcttcgtccttcggaagcttcctcccaagcgggtttcggcacaataccaccctattaactagagagttttgtttttttttaatgatgttacatgctaagaactccggataatctgaaactactggaaacctacagccggctgtagttggatgcttttgcttgtgctgttatgtttatggaagcatcagtgttggcgatgaatataatgacgatcattctatatggggaagtggtgctaatgaatgaatactccttttatatatggttgcatctcatgttgttatttggtcggtttgtgcactgcatgacatg

SEQ ID NO: 109936 - DNA, 120 bp, Zea Mays
cttacttttttctttgtttttagcttcaaaagtgcacccattagttcatctaacagttacaaacttacttcatgcaaagatgccactttttgattgtttactaatttatatgctttaaat

SEQ ID NO: 109937 - DNA, 1683 bp, Zea Mays
caaacaatggcgaagcagactgagagctacgagctgcacaaactgcggccccaggtggatgacctgttcaaggagttcgacgccctggtcgacagacctctggatgagagggaggacctggctgcaatcttcaaggtcctcgaagagatcagggacaagatcaagatcaaacacggtggcaagaaagtagacgacgacgagctccttccgcggagcaagaggggggacctggccaacctgctccccctcatcaggactgcactggagctacgcagcaagccgccgccgccgcctgtgcagcaggacgccacgggcggtgcccacgacagcaagccgaccggctgcatcccctgcaagccccggccgtcgcagcagcacaaggaagaaaaagaaggcagcaaggaagtcgtgtcactcaagctgctgctccggctgacccagaacgtgctggagccggagcagtactacgagtggacgaccagctacgtggacgaggagaggatctacgggtgggacaaggaggccggcgaggtgatcgacgccctcgtggccgccgccgacggctcgggggcgcggatgttccgggccgcgggcatcgcgggcatccacggcagcggcaagacggcgctggcgcggaaggtgttcgtgcacgacaaggccaaggacaacttcgcgctccgcctgtgggtgtgcgtcggcccgccggactcggaggaccgcttcaacctcctctaccggatgctcgacaacctcggcctcgacaccgacaaggtcgaggaggtcgtcgacaagtccagcgtcgtcagagacgccaggggcagaacggaggcggagctccggaaggccgcagccagacctgccgagcagaagaaggcgagggcagcgtcgtcgtcaccgaggccggcgccggtggagatgccaacaggcaggcaaaggacgaggagctgctcaaggagaaggtagagaacagccgcgccgtcgagaaatccaaaatcggagtgctgctctacatcctcaacatggtcctgtccaagacgtcgtacatgatcgtgttcgacgacatccgggcgtaccgccacgacgacgacgacgcacagggatgctggtacagcaacctcacgctgctgccgccggcggagggcgagtggggggaccgcctcgcctacggcctgcccaagacgaaacacaggggcgccgtgctggtgacctgccgcaaggaagacgacgccaagaccatggcgcgcacgggcctcgtggtccgcccgcccaagctcgaaggtgatgacgcctggaagctcttcagaagagagtacgaccaggccaaggacgacaagcgcaacaaggacggcggcggcaaagaaggcagcaagggggaggaggaggacctgctcctcaagcagctgcaggagatgaagaaggagatcgtgggcaagtgcctcggcctgccggtggccatcatcgaggcggctaggggcttcgccgacctcgagcccttgccggatgatactagtcccctcaaaccggtgaccagcaaggacattgacaaggacaagcagctgtctcaagcaaataagtaacagattagttgaattcgtgctgtgtaatgcttctgcgttgctttggctctcttctaataaaatttaattatgggctataaaagtcaaaaattttaatttgaaatat

SEQ ID NO: 109938 - DNA, 1158 bp, Zea Mays
tccgctttgtctcagcctctctcttccgtactgcttctcctctacctccgtcgccagccagccactacctcgattcgctcccctccggccctcctgtcgcgcgcgctctgcctcactggcgccacggtcgcccgcgccggcaggctcgagtccctcgacgccatcgcctagattgtctactagctggcccccgctcgccgcgaggtggtgcttgcggaggtggcggcgatcgtgcctgcatggtgctcgacaaaaaggtgctctacgagacgacatctgcttccgcgcgcacaagctcaccatgcgcagcttcggtgacgtttagccacgtcatctccgccaccatgagcggcgtcacctgctgcctttgcttctccggtcagctcaactccgatctccgtaggctagccgtcaacctgatcccgttcccgcgcctgcacttcttcatggtcggcttcgcgccgctcaccttccgggggctcctagaaatatcacgtcctgactgtgccagaactcccaaaatagatatgggacgccaagaacatgatgtgcatcgtggacccgcgccacggttgctacctgacggcgtccgccatgttctgcgacaagatgagcaacagggaggtggacgagcagatgcttaacgtgccaaacaatgactcctacttcgtggactcgatctccaacaacgttcagtccacggatgtgcctcttttgagagtgaattatacttttactcaattaggatattgtgtttctttggatctttgtttgattaatgatttttttggatgagagtgtggctacaggatgaagcaatgcattttttgatggaacacacatgtgcagtatacaaatggaccatcaggttgcggagcattccattattccaaccttattccagagtagttctgtgcactttaaagccgaacgtttgtggatccagaaaagaagcaaattttgtatgtatatatgtgtagatccaggtgatcgctattgttagcttttgtttacaatggtcgccacccaaaaaagttgtaactcgctcatttctagacttgtgaataatgttgttagcactatgtttgcttttgcagtgacactacctgacgcttgtaatgttgtttggtcgcgaactgttgtcgcgctatgtaaaga

SEQ ID NO: 109939 - DNA, 1033 bp, Zea Mays
agatccaacaaactgtcatcagcatataatgtttgcacacagccactcaaacatgcatttgcactgcatcgtatatatccaacaaaacggcagctagagatgatggcatcctccctcctctttgttgtcgtcctcctcgcagcgctgtcatcgccgccgccgtcagccgtcctggcggcggacgacgacggcaccacgcacctgcacttcttcatgcacgacgtggtgaccgggagcaacccgacggcggtgcaggtgatcaagggcgcggggtcgtcggtcgtcccggggctggcgttcggcgacaccacggtgatcgacgacgcgctgacggagacgtcgtcgcccacgtccgccgccgtgggccgcgctcagggcttctacatgatgtcgtcgcagtcgggcatcgtgctcatggtgtgcgccaacctgctgctcaccgcgggggaccacaacggcagcacgctcgcggtggtgggccgggacgacgtcgcggcggacgtgcgggagctctccgtcgtcggcggcacgggccggttcaggatggccaccggctacgtgctgtggaagacgtccagcatgaacgggcctgacgctaccgtcgagctcgacgtgcacgtgaggacggccacaaccgccgccacgggtagcggcaccactggtgccttctcgggcgccgctgccaagcgggtcggagcagggtgggtcattgcgtgcgccgtcgccgtcgttggggcggtggttggatccggcgtctggtggtgatcggctggcgtgcagtgcagtggtgcacacagtttggtgacatgtccatgactccatgtacttgcattgcttctgctagtggtcattctgaatcatcatggtggatgtagtgttggtttacttttcgcttgtttttcagttggatattatttgacctttttctgtcatgtcgagattctgggtcgaactttttcccttttgaaatgtaagtttttgttaaactaaatatgagtacatcaaattgataattaaacggattttggaacac

SEQ ID NO: 109940 - DNA, 3024 bp, Zea Mays
gcttaaaatctagctaggctcggatgaaaaacaacacacacctctagtagcgagaggcaagggacgtaagaagtcgtctaattcttggatcgaattagacgacttcttcgtccctctcttcattagcacgctaacttgtaatctgcaggatctaagcaaagacttgattcagttatggacggattggtaggcctcttgaaagttcgtgtggtccggggtatcaaccttgcctaccgcgacgcaagaggcagcgatccgtatgtcgtcctacggcttggcaagaagaaactgaagacaagcgtgaagaagagatccgtgaaccccatatggcaagaggagctaactctgaccgtcacagatcccagccaaccactgaagctggaggtgttcgacaaggacaccttcagcagagacgaccccatgggagacgcggaggtggacgtggcgccactgatggaggcggtgagcatgaacccgcgggaggagagtctgaggaacggcgccatcatcaggtccgagcggccgagcgccaggaactgcctcgccgacgagagccacgtgtgctggaggaacggcaagttcgcgcaggacatgatcctccggctcaggaacgtcgagagcggggagatacagctgcagctgcagtgggtgaacttccctcctggtcctggtcctgctgctgcaacaaccaggtgacctgatcgatggtagctgctgttcctgtcgccattgcctcctgctggcaggaacaggaactctctgaagcacggggtcagggtagttcatgttgcttcgattcgatcgtaggggagataatgccggatggcgctgctcatgctttgtaaagtttgggaggacatgcatcataattgaagtcaagtgataggatcctgttttttaagtacacgatacatccctttttttatttgtcgctctcatcagtggacgactgttgatggggtagttgagtgctgtgaatcgtggtgcagcgatcgcagttgcaaaagttgcagggtcaggctgccgcggcaacgggtcgtcgtctcctcacctcgccggggctttacttatccaccgcagggccaccgagcgaggcgataacccaaccagtatcagccagctcgcagtccctccgccaccaattttttttttctcattctcgtttccaaattatccgccgctgaaacaatctgcacccccacgcacaagcacgaagcagtcagcagtagagtacaaatcctcgcctgcatcctggttttcgtccccattctctccccgccactccagcggaacggcggcgggggagtgagtgacggcaacgaggcaagatggcgaggaggaggccgatggactacgaggagctgaacgagaaagtcaagaaggcgcagtacgcggtgcgcggggagctgtacctccgcgcctcccagctccagaaggagggcaagaagatcatcttcaccaacgtcggcaacccgcacgccctcggccagaagccgctcaccttcccgcgccaggtggtggcgctgtgccaggctccgttcctcctcgatgaccccaatgtcggcctcatgttcccgcccgatgccatcgtgcgggccaagcgctatctcgccatggcgccgggaggtctaggtgcgtacagtgatgcccgtggtatccccggaatcaggaaggaagttgctgacttcatccacaagcgtgatggatatccgagtgacccagaactcatttacctgacagacggcgccagcaaaggtgtgatgcaaatgctgaatgccatcattagaaacgagagggatgggatcttggttcctgttcctcagtacccactttattctgctatcatttccctctttggtgggtctctggtcccatactacttggaagaagaggctaactggaaccttgactttgcaaacatccgacaagcagtggccgaggcacgttcgaagggaatcactgttcgagcgacggtgattataaatccaggaaatcccactggccagtgccttagtgaagcaaatataagggaacttgtgcgatattgctaccatgaaaacttagttctgcttgcagacgaagtgtatcagcagaacgtttatcaagatgagcgcccatttataagcgcaagaaaggttatgttcgacatgggtccgccaataagcagggaggttcagcttgtttctttccacactgtgtccaaagggtactggggagagtgtggacaacgtggtggatacttcgaaatgacaaatcttcctccaaagacagtagatgagatctacaaggttgcatcaatagtactgagtccgaatgttcccgggcaaatctttatgggagtgatggttaaccctcctaaacctggagatatctcatacccgaagttcactgccgaaagcaagtccatcctcgaatctttgaggaggagagcgcgcatgatgacagacggtttcaacagctgccgaaacgtggtgtgcaatttcacagaaggagctatgtactctttcccccaaatacagctgccagcaagagccatcgaggcggcaaagagagccggcaaagcagcagacgttttctactgcctcaagctcctggaggcaacggggatttccactgttccgggatctggttttgggcagaaggaaggggtgttccaccttcggacaactatccttccagccgaggaagacttccctaccatcatgtcgagcttcaagaagttcaacgactcatttcatggagcaatacgagggctactccaggatgtgatgtcaacatgaaaagaagcgaccgcgccaccattttgcttctactgcccatactagtagaaacagtgatcggtgcactatgtgatattttgctgctgcaactgcggccttagtctgctatgtatgtgttgcctgttctgaaagagtaaagaagcgaccgataatgtatatcctgagccgcgcggcggggagaaagcatttcgcttttaagggaaagggaagcatcagcagcgccgccgccgctagagccctagac

SEQ ID NO: 109941 - DNA, 3028 bp, Zea Mays
gcttaaaatctagctaggctcggatgaaaaacaacacacacctctagtagcgagaggcaagggacgtaagaagtcgtctaattcttggatcgaattagacgacttcttcgtccctctcttcattagcacgctaacttgtaatctgcaggatctaagcaaagacttgattcagttatggacggattggtaggcctcttgaaagttcgtgtggtccggggtatcaaccttgcctaccgcgacgcaagaggcagcgatccgtatgtcgtcctacggcttggcaagaagaaactgaagacaagcgtgaagaagagatccgtgaaccccatatggcaagaggagctaactctgaccgtcacagatcccagccaaccactgaagctggtgagaggtgttcgacaaggacaccttcagcagagacgaccccatgggagacgcggaggtggacgtggcgccactgatggaggcggtgagcatgaacccgcgggaggagagtctgaggaacggcgccatcatcaggtccgagcggccgagcgccaggaactgcctcgccgacgagagccacgtgtgctggaggaacggcaagttcgcgcaggacatgatcctccggctcaggaacgtcgagagcggggagatacagctgcagctgcagtgggtgaacttccctcctggtcctggtcctgctgctgcaacaaccaggtgacctgatcgatggtagctgctgttcctgtcgccattgcctcctgctggcaggaacaggaactctctgaagcacggggtcagggtagttcatgttgcttcgattcgatcgtaggggagataatgccggatggcgctgctcatgctttgtaaagtttgggaggacatgcatcataattgaagtcaagtgataggatcctgttttttaagtacacgatacatccctttttttatttgtcgctctcatcagtggacgactgttgatggggtagttgagtgctgtgaatcgtggtgcagcgatcgcagttgcaaaagttgcagggtcaggctgccgcggcaacgggtcgtcgtctcctcacctcgccggggctttacttatccaccgcagggccaccgagcgaggcgataacccaaccagtatcagccagctcgcagtccctccgccaccaattttttttttctcattctcgtttccaaattatccgccgctgaaacaatctgcacccccacgcacaagcacgaagcagtcagcagtagagtacaaatcctcgcctgcatcctggttttcgtccccattctctccccgccactccagcggaacggcggcgggggagtgagtgacggcaacgaggcaagatggcgaggaggaggccgatggactacgaggagctgaacgagaaagtcaagaaggcgcagtacgcggtgcgcggggagctgtacctccgcgcctcccagctccagaaggagggcaagaagatcatcttcaccaacgtcggcaacccgcacgccctcggccagaagccgctcaccttcccgcgccaggtggtggcgctgtgccaggctccgttcctcctcgatgaccccaatgtcggcctcatgttcccgcccgatgccatcgtgcgggccaagcgctatctcgccatggcgccgggaggtctaggtgcgtacagtgatgcccgtggtatccccggaatcaggaaggaagttgctgacttcatccacaagcgtgatggatatccgagtgacccagaactcatttacctgacagacggcgccagcaaaggtgtgatgcaaatgctgaatgccatcattagaaacgagagggatgggatcttggttcctgttcctcagtacccactttattctgctatcatttccctctttggtgggtctctggtcccatactacttggaagaagaggctaactggaaccttgactttgcaaacatccgacaagcagtggccgaggcacgttcgaagggaatcactgttcgagcgacggtgattataaatccaggaaatcccactggccagtgccttagtgaagcaaatataagggaacttgtgcgatattgctaccatgaaaacttagttctgcttgcagacgaagtgtatcagcagaacgtttatcaagatgagcgcccatttataagcgcaagaaaggttatgttcgacatgggtccgccaataagcagggaggttcagcttgtttctttccacactgtgtccaaagggtactggggagagtgtggacaacgtggtggatacttcgaaatgacaaatcttcctccaaagacagtagatgagatctacaaggttgcatcaatagtactgagtccgaatgttcccgggcaaatctttatgggagtgatggttaaccctcctaaacctggagatatctcatacccgaagttcactgccgaaagcaagtccatcctcgaatctttgaggaggagagcgcgcatgatgacagacggtttcaacagctgccgaaacgtggtgtgcaatttcacagaaggagctatgtactctttcccccaaatacagctgccagcaagagccatcgaggcggcaaagagagccggcaaagcagcagacgttttctactgcctcaagctcctggaggcaacggggatttccactgttccgggatctggttttgggcagaaggaaggggtgttccaccttcggacaactatccttccagccgaggaagacttccctaccatcatgtcgagcttcaagaagttcaacgactcatttcatggagcaatacgagggctactccaggatgtgatgtcaacatgaaaagaagcgaccgcgccaccattttgcttctactgcccatactagtagaaacagtgatcggtgcactatgtgatattttgctgctgcaactgcggccttagtctgctatgtatgtgttgcctgttctgaaagagtaaagaagcgaccgataatgtatatcctgagccgcgcggcggggagaaagcatttcgcttttaagggaaagggaagcatcagcagcgccgccgccgctagagccctagac

SEQ ID NO: 109942 - DNA, 2769 bp, Zea Mays
gcttaaaatctagctaggctcggatgaaaaacaacacacacctctagtagcgagaggcaagggacgtaagaagtcgtctaattcttggatcgaattagacgacttcttcgtccctctcttcattagcacgctaacttgtaatctgcaggatctaagcaaagacttgattcagttatggacggattggtaggcctcttgaaagttcgtgtggtccggggtatcaaccttgcctaccgcgacgcaagaggcagcgatccgtatgtcgtcctacggcttggcaagaagaaactgaagacaagcgtgaagaagagatccgtgaaccccatatggcaagaggagctaactctgaccgtcacagatcccagccaaccactgaagctggaggtgttcgacaaggacaccttcagcagagacgaccccatgggagacgcggaggtggacgtggcgccactgatggaggcggtgagcatgaacccgcgggaggagagtctgaggaacggcgccatcatcaggtccgagcggccgagcgccaggaactgcctcgccgacgagagccacgtgtgctggaggaacggcaagttcgcgcaggacatgatcctccggctcaggaacgtcgagagcggggagatacagctgcagctgcagtgggtgaacttccctcctggtcctggtcctgctgctgcaacaaccaggtgacctgatcgatggtagctgctgttcctgtcgccattgcctcctgctggcaggaacaggaactctctgaagcacggggtcagggtagttcatgttgcttcgattcgatcgtaggggagataatgccggatggcgctgctcatgctttgtaaagtttgggaggacatgcatcataattgaagtcaagtgataggatcctgttttttaagtacacgatacatccctttttttatttgtcgctctcatcagtggacgactgttgatggggtagttgagtgctgtgaatcgtggtgcagcgatcgcagttgcaaaagttgcagggtcaggctgccgcggcaacgggtcgtcgtctcctcacctcgccggggctttacttatccaccgcagggccaccgagcgaggcgataacccaaccagtatcagccagctcgcagtccctccgccaccaattttttttttctcattctcgtttccaaattatccgccgctgaaacaatctgcacccccacgcacaagcacgaagcagtcagcagtagagtacaaatcctcgcctgcatcctggttttcgtccccattctctccccgccactccagcggaacggcggcgggggagtgagtgacggcaacgaggcaagatggcgaggaggaggccgatggactacgaggagctgaacgagaaagtcaagaaggcgcagtacgcggtgcgcggggagctgtacctccgcgcctcccagctccagaaggagggcaagaagatcatcttcaccaacgtcggcaacccgcacgccctcggccagaagccgctcaccttcccgcgccaggtggtggcgctgtgccaggctccgttcctcctcgatgaccccaatgtcggcctcatgttcccgcccgatgccatcgtgcgggccaagcgctatctcgccatggcgccgggaggtctaggtgcgtacagtgatgcccgtggtatccccggaatcaggaaggaagttgctgacttcatccacaagcgtgatggatatccgagtgacccagaactcatttacctgacagacggcgccagcaaaggtgtgatgcaaatgctgaatgccatcattagaaacgagagggatgggatcttggttcctgttcctcagtacccactttattctgctatcatttccctctttggtgggtctctggtcccatactacttggaagaagaggctaactggaaccttgactttgcaaacatccgacaagcagtggccgaggcacgttcgaagggaatcactgttcgagcgacggtgattataaatccaggaaatcccactggccagtgccttagtgaagcaaatataagggaacttgtgcgatattgctaccatgaaaacttagttctgcttgcagacgaagtgtatcagcagaacgtttatcaagatgagcgcccatttataagcgcaagaaaggttatgttcgacatgggtccgccaataagcagggaggttcagcttgtttctttccacactgtgtccaaagggtactggggagagtgtggacaacgtggtggatacttcgaaatgacaaatcttcctccaaagacagtagatgagatctacaaggttgcatcaatagtactgagtccgaatgttcccgggcaaatctttatgggagtgatggttaaccctcctaaacctggagatatctcatacccgaagttcactgccgaaagcaagtccatcctcgaatctttgaggaggagagcgcgcatgatgacagacggtttcaacagctgccgaaacgtggtgtgcaatttcacagaaggagctatgtactctttcccccaaatacagctgccagcaagagccatcgaggcggcaaagagagccggcaaagcagcagacgttttctactgcctcaagctcctggaggcaacggggatttccactgttccgggatctggttttgggcagaaggaaggggtgttccaccttcggacaactatccttccagccgaggaagacttccctaccatcatgtcgagcttcaagaagttcaacgactcatttcatggagcaatacgagggctactccaggatgtga

SEQ ID NO: 109943 - DNA, 1439 bp, Zea Mays
gcttaacgagccagctcgaactcgaacgagccgagccggctcgttatccacaccatgtcataaacaaccctccaaatcatggcccatcacgagtgacagcccaatacccgtcccatcggtcgacgccctctgataaaaatctggcagaaaccgaaccgtagagcccgagcctcgcggtcgcggatccgtcctgcaaatctcctctcatacttctccaccggatccctgtaagattcccggagatgtcggacgaggagcaccagttcgagtccaaggccgacgccggcgcctccaagacctacccgcagcaggccggcaccatccgcaagaacggctacatcgtcatcaagggacgtccctgcaaggttgttgaggtctccacttccaagactgggaagcatgggcatgccaagtgccactttgttggcattgacgttttcactggaaagaagcttgaggatattgttccttcttctcacaactgtgatgttccccatgttgatcgcactgagtatcagctgattgacatcactgaagatggatttgtgagccttttgactgacagtggcaacactaaggatgacctcaggcttccgactgatgaagctctggaaggccagatcaagagcggatatgatgatggaaaggacctcctcctgacggtgatgtcttccatgggcgaggaacagatctgcgctgtcaaggagatcgggggcaagaactaaagccgctgctgctgtctcgtgtgcttagagttgagatgcatagataaagcgtataagttatctgtggttttgggtttacctggaaatttgtcgaggtggttggtgttactactctacttggttagcgatctgtggtattcttttcaacttagttatggtcaatatgtattcagttgaaatatttggtttaaattcttgcctacagtcttgttatgccttgtaggatcggcagcagctctatcctatgcctttgtattgagggttgcgacggtctgctcgtgttcattttctgtatatctcgctgatttagatatatctaaaatatccaacacagcaagaggaggctctgtgcagttgggccaacctaaccgaaaggccaaaccagcattacgaaggtccaaaataccaagaccacatcaactcctttggacgacaggcaacgcaacacctctcaaccgtgtttgtacatgtctcttgacttgcgtatgtgtagagctcgaagtcagtcaatgatgatggtgaaagtagtggattcgtgcttatggactctgataaatgtcaaataccacaaggccttgagtaatagctctataaataagagggaaatcctctaggctaagtgttcaagaccatataccatggcatacaaacatccaagaagtaactgcaaaacttattggtgtttaactgtttattacaaaaaaaaaaaaaaaa

SEQ ID NO: 109944 - DNA, 1481 bp, Zea Mays
gcttaacgagccagctcgaactcgaacgagccgagccggctcgttatccacaccatgtcataaacaaccctccaaatcatggcccatcacgagtgacagcccaatacccgtcccatcggtcgacgccctctgataaaaatctggcagaaaccgaaccgtagagcccgagcctcgcggtcgcggatccgtcctgcaaatctcctctcatacttctccaccggatccctgtaagattcccggagatgtcggacgaggagcaccagttcgagtccaaggccgacgccggcgcctccaagacctacccgcagcaggccggcaccatccgcaagaacggctacatcgtcatcaagggacgtccctgcaaggtgagagatttggccatcgcatgtttgaggcagatttcttagctgtggatttagatatacttcaagtgctgggtctgctgcattcacacctggaaggattttgctgcagatgtgtctatggatatgtataccgtgacctacagtgccgctctgtaggataaagatttggtttcaattttgccacagtttccatctggatgaagtgctccatggggctattcccatgtggtggttctgcacctaacatgttgtctgaacatgtctaaacaatttagtatacgttcttgttttaggttgttgaggtctccacttccaagactgggaagcatgggcatgccaagtgccactttgttggcattgacgttttcactggaaagaagcttgaggatattgttccttcttctcacaactgtgatgtaagctatcattgtcactccttgtggttgcttgttcagttatgagtgcacgtaacctttttgtcttgtccgtgcattgtacaggttccccatgttgatcgcactgagtatcagctgattgacatcactgaagatggatttgtgcgtttgcttccattgcaacaacctggcatttctgtaatactttccggtttagtttagtttagtttataatgatcgatgagagcattttacaggtgagccttttgactgacagtggcaacactaaggatgacctcaggcttccgactgatgaagctctggaaggccaggtcagttagcggcggcagattcccctccaccgcttctgttccaggtctctgagactgagacatttcgctctacgtctgcagatcaagagcggatatgatgatggaaaggacctcctcctgacggtgatgtcttccatgggcgaggaacagatctgcgctgtcaaggagatcgggggcaagaactaaagccgctgctgctgtctcgtgtgcttagagttgagatgcatagataaagcgtataagttatctgtggttttgggtttacctggaaatttgtcgaggtggttggtgttactactctacttggttagcgatctgtggtattcttttcaacttagttatggtcaatatgtattcagttgaaatatttggtttaaattcttgcctac

SEQ ID NO: 109945 - DNA, 1037 bp, Zea Mays
tcgttatccacaccatgtcataaacaaccctccaaatcatggcccatcacgagtgacagcccaatacccgtcccatcggtcgacgccctctgataaaaatctggcagaaaccgaaccgtagagcccgagcctcgcggtcgcggatccgtcctgcaaatctcctctcatacttctccaccggatccctgtaagattcccggagatgtcggacgaggagcaccagttcgagtccaaggccgacgccggcgcctccaagacctacccgcagcaggccggcaccatccgcaagaacggctacatcgtcatcaagggacgtccctgcaaggttgttgaggtctccacttccaagactgggaagcatgggcatgccaagtgccactttgttggcattgacgttttcactggaaagaagcttgaggatattgttccttcttctcacaactgtgatgttccccatgttgatcgcactgagtatcagctgattgacatcactgaagatggatttgtgcgtttgcttccattgcaacaacctggcatttctgtaatactttccggtttagtttagtttagtttataatgatcgatgagagcattttacaggtgagccttttgactgacagtggcaacactaaggatgacctcaggcttccgactgatgaagctctggaaggccaggtcagttagcggcggcagattcccctccaccgcttctgttccaggtctctgagactgagacatttcgctctacgtctgcagatcaagagcggatatgatgatggaaaggacctcctcctgacggtgatgtcttccatgggcgaggaacagatctgcgctgtcaaggagatcgggggcaagaactaaagccgctgctgctgtctcgtgtgcttagagttgagatgcatagataaagcgtataagttatctgtggttttgggtttacctggaaatttgtcgaggtggttggtgttactactctacttggttagcgatctgtggtattcttttcaacttagttatggtcaatatgtattcagttg

SEQ ID NO: 109946 - DNA, 2196 bp, Zea Mays
cactagtctgtctgatctatcattaagcttaactgtttggagcctgcctgcctgcgttgtagcatgcatagccgccggccgcctgcagatttgcaaccatagcagcctatagcctatagattggcggctccatcgatctcgatctctgtctccacctccttagcttattatcccaattcccatgcacgcaagaaacaccaataattgatcttggaggtgatcaatggcggcgttcggctgcgtccacgccgccgcggctacccttggcggcggcgcgcggttcgcggtgcgcgtcctgtgcggccgctggttcatgctcttcgcttccaccatgatcatgaccacgagtggcggcgcctacatcttcggcgcctactccaaggcgctcaaggcgtcgctggagtacgacctggacacgctcgacaccatcggcttctccaagaacatgggcataagcctaggcatcgtgtcgggcctcatcaacgaggtcgccccgccgtgggtcgtgctggttaccggcgccgccatgaacctggcgggctacctcatggtctacctcgccatgtccgccgccgctcatcggccaccggtgtggctcatgtgcctgtacatattcgttggcaccgtctcccaaacgttcgccagcacgggggccctcgtcaccagcgtcaggaacttcccggacgaccgcggcgtcgtgctcggcatgctcttgggctacgctgggttcagcggcgccgtcttcacgcagctctaccgcgccttcgatggtggtggtggcggtgaagcggccacgcttttgctgctcctggcatgcctccccactgccgtctcgctgctctttagcttcaccgttcgcgtcatcccaccacgacgaccaccgataagcagcagcacggcggaacgcaagggcgtgctgggtttccttggcgtctctgtcctcgtcggcgtctacctcctcgctctgaacgttgtcgaggtgaaggcagcgacccgactgccgaggcgtttctaccacgtcaccaacaccttgctcgtcctcatcctcgtcgtcggcccactcgtcgtcgtcgtgaagcaggagtaccaccagcagacctcatcccatagccatagtacgcttcagcaagacgtcccccgagctgtgccgggaccgggagagcaagagatcaactactcggttcggcaggctctttgcagccagcacatgctgctgctcttcgtcgccaccgcctgcggcatcggcggcatcatgacggtggtggacaacatgagccagatcgggcagtcgctggggcactcgcagcgcaccatcacaatgctggtgtcgctcgtgagcctggccaactacgctgggcgcgtgctggccggcctgggctccgactacgtggtggcgcgctacaggctgccgcgcccgctggcgctcaccgccacgctcctcctcgccttcttcggccacctcctcgtcgccgcgggcctgcgtgatggcgtctacgccgcgtcgctcatcatgggcttctgcctcggctctctatggacggtgctgttcgccgtcgtgtcggaggtgtttgggctgaagcacttctccacgctctacaacctgtccacgttggcgagccccgtcggatcctacgtgctgagcgtgcaggtggcgggccggatgtacgaccgtgaggcgcaacggcagggccatcgccggcaagacgagctcgcctgcgttggggttcagtgcttcagggcatcgttcgagatcatcgccggtgtcacgttgctcggcgtggcggtgtccatggtgatggcctggaggacgagggcgttctaccatgataggacgcggttcttattcagtgctgctgctgctgatgtcgcagacacagccgccacgacagacagcagcagcagcaggcaagaagacgaaaacaaaacgatagctgcaagtcaaagtatcggtatttgctagatatactctcgtcgtcgtcgtagcaaagacattaggatacaaaaagtcctctatatatctcttgcatatcatgcagtgtgtgtccaacatgcgctggtacaatcatacttcttaaggtgacacaccatactaatttaaagcgatgacgagctgagtgtcttgtcttaatagtggcggtacaccatgataggagctcagtacacttctatgtaaatttgttacatgaaagtaacaat

SEQ ID NO: 109947 - DNA, 2580 bp, Zea Mays
gtccacccggtggccggtgcggtgccgactgctcctcgcctgtcgcctcgcacaccggatctcgtcgccgccctcgcttctgtagtttgttcctcgcgagatctcgtgcgccgtccgtcctaccacgctgccctctgccgccaccgccaccgccaccgccaccatcaccacctgcgccggcgctcctctaggacgcagttcgcctccgaccccgactccagattttacatgcttctctagtagtccattggagtaattaacatcgattacacggtcatggaagagcaccaagtcaagccatcggatctgccacccactagtttgcacaaccaggattcagccgcaactcctgttaccagtgctgaccctgctcgtcctgctgcttcaaatgattctcccagtcaggttgccagtgcagctcctgctgctgtttctgcacctaccgctgctcctgcagaagatgctgcagggcgtgaggcgtcagcatctgtgttctctgcgtctggtttatcctcctgggctaagaacctaaaaattcctcagccttcaccaggtcaagaatcacctacaggaaagaatacctttgcccgtttaacaagtggccttggactgcgtttgtctccaaaagcggcacagcaagatgagggtgctgaaggaagcacctccccaacaacaggacagcctggtgtttttggttctttaacgaaaggcattgtggattcctctaagaatgctgtaaaggcagtgcaagtcaaggctcgccacatggtctcacagaataaaagacgataccaggaaggaggatttgatttagacatgacatatattactgagaacataattgctatgggttttcctgctggtgatttgagttcagggctttttggatattttgagggtttctaccgcaaccacatggaggaagtcatcaggttctttgaaatgcaccataaggggaagtataaggtgtacaatctttgttctgaaaggctatatgatgcatctctttttgaaggaaaggtggcctgctttccttttgatgatcataactgccccccgatacaacttgtcatatcattctgccatagtgcctactcatggttgaaggaggatatagaaaatgtggtggttgtccattgcaaagctggtaaggcaaggacaggattgatgatctcgagtcttctactatttctaaagttctttcctactgctgaggagtccattgaatactataaccagaaaagatgtgtagatggaaaagggctgattctaccaagtcagattagatatgtgaagtattttgagcgcatcttaacttacttcaatggtgaaaatcagccacccaggaggtgtatgcttagggggtttcgtcttcatagatgcccctattggattaggccatcaattacagtctctaaccacaatggtgttcttttttctacaaagaagcatccaagaacaaaagaactaatgccagaagatttctggtttagtgcaccaaagaaggggattatggtttttgcattgccgggagaacctggcttagccgaggtagctggtgatttcaagatccagtttcatgatcgacagggagatttttactgctggctaaacacaacaatgatggagaacagggtaaccttgaacccaactgatcttgatgattttgacaagagaaaactgccctcacctggattccagattgaggttgtcctggtagattacgatggctcgcaaccagcaaaaccaaaaccaggcgctggacctgctgctgataaatctcatgctgattcctcggctagcacggttgcaaaagaaaatagtgctgcacctgaagaatccaacaagggaactggaagcaataatgatagagatgaagtcttctctgacagcgacggggaggatggatcttctaacggaaggaaggagaagactgccggcggtggtcaaagcagtgtaaatgctgctaaaccatcccagacaggcaacatggaggaggcggcggcatctgctgctgctagcagactggacaaagtggctataagcagcgaacagggaaccacaaaggcacctgatggtacatctctcaaaactgaagtcagcagcaaggccagctccaccacagcaccacctcctccagctgctgactcttccagcatgagcgaattcaaggcgattgccgcagatgcctcggtgttctcgttcggagatgaagatgattatgaaagtgagtaatgattctatgggtgggtacggtgttgagtttccgctgtacagtttggtgcttctaggaccccccatcatagaatgccaaagtccagagatgttaattcattcttgcatttcgtctccactgtagcagtgtcatcggtctgatgttgtacccagatgatgaaacttgttgtaactcaaccaggtcttgaacctctcctgtttgtttacagaaatgccttgtacacgaactcacttaaacagcgcaactactttttattattgatagttaaaagtgtgggtaatgtgtgtgcagccttggaaattaacaacggaaactaacactttggttgttttcggataaaaaaa

SEQ ID NO: 109948 - DNA, 5454 bp, Zea Mays
atggaccccgacgccggcggggctggggccgggggccgggcgggcttcgagcgggcgtgccggctgcccaacaccgtccactccgaggtcctgccgtcgctgccgctccccaccctcccgcgcgagctcggcttcgacgcgctccgcgacgacgagcccctcgccgcgcccgaccgccccgacatgatcatgcaggccgccaacatcgcccgcatcctcgccgacaccgacgtctcccacctgggcttcaccgcggcggacaacgtcgaagtggatcccagccggtgctcctggctctggagggaggtgctcaagcacaaccccgacgccttcaaggtcaaggcgcccgggccgtcttctcaagctagtcctttactcacaatcagggtgggcctgggttggctgtgccactcagacgttacatgggctgctggttttcttcttatcccacaagtctctgtcctgattcccgatggttcaactgttgaaaatttggcatgccttgctaatatatcatctatcggatcatcattttcaggtccatttggaggcccaggataccacaatcaagaacgtgagaagcactttgaacatcttacacctaatatgagcaaaacacgaaatggatctgcattttctcaggatgaaattaactcacacagagagcattttcgtaatgaactgaccccagattcagttgcttcaaagaagccaaaagtaaggaagaaagaaattaacaattctgtttcaacttctccccacagcattcctaataatcaagaagttattgctaccttctgtgaggcggtggaggatttctgtggaaaagctgaaattcctgacgatggtgatggtggtgactggttgtcaatcccacttgacgatgttaaggttcttgtgaatgaaattacatctgttcgatccaaaaggatattgcatgaggttcctatggatacagttacaaggttattagacgtgattgaccgtcagattcgatgttctcaaggtttgtcgatagatgtgaaggaaaattctgacgcctttgatgctgaacctctggttttctctgctttggagtccagtcatgctgcgttggcaattatgacccaccatgatatgccaaagcaactgtatcgggaagaacttattgagcgtattatcgatttctcaaggcatcagatcacagattgtatggcagcaagtaacccaacctttcgagctctctacaaaccagctggaaatgttgcaaatgatggagatgatgatgaaggtgatttggaaaatggacaagttagcaaaaggagacgtactgctactaatttgagcatgagaaaatcttcaaacagagtttctgcttctgtttattctgctgtgcagaaactatgcttgatattgggttttcttaaggaactgctcacaacagtgcgcttgtcagatagttgtattctgcaattagcgaaaacatgctttactacattcttggtggataatatgcagctattacaattgaaagcgattggggttatttgcacggtgttttcatcatacacacagcacaggagttacttggttgatgaaacacttcaccttcttcgtaagttgcagttttccaagaatgccgttagaacctaccatctagcagatgaagaccaaaagcaaatccagatgataacagcactgttagttcacttggttcagtttagtgctattgttcctgatagcttaaagggaacagttgattggaccactatcgttgatgcctctagtgatgctgattattatccaattcaatgccatgaagcggcaacagaggcttgttgtcgtttttggactgatgtccttcaacgttttactgctgctaaatctcaagatatgtcggaaaccaaagggataatagacaatcttgttcaggatttcctaacgatactaaacttgccggagtatccagctgctgcttctattcttgaggttctctgcgtgttgctgcttcagaatgctggattgaaatctaaggacattaatgctcggtgctttgctattgatcttcttggtggtattgcatcaagattaaagcgtgattctgtcgtctgtagtgaagaaaagctttggatattgcaagatttcactgataaaggcagtgacggctcaatttttttgaaaaacaagtgttgcgtttgtcttggtggaagaggcataaatatagcctgtaatgaatgtggaagatgtttccattcagattgtatgggggctggtagtcaggataacttacagcgtgatagtgtctgccccttgtgtttttgcaaacaacagctcaatgtgctacagtcgtactgccagtcacaaattaaagaaaatggcaaaaaaactgctgcctctgccagtaagaaatctgctaaaccaactgaggtgtcagcagtggaaattgttcaacaaatactactgagttatctccaagaagctggttcacaagatgatgggaacctgtttactcgatggttctatctgtgcatctggaacaaagatgaccaacattctcaggagaagatcatttactatcttgctagattaaaatccaaggagattctgcgagattctggcaatggtctggcaatttccagagattcagcaaagaaaatttgcttggcacttggtcagaagaactcattttgtaggggttttgataaaattcttgcccttcttttggctagtttgagagaaaattctcctgtaataagagcaaaagcattacgtgcggtcagctgtatagttgaagctgatcctgaggtcttgggtgacaaacgtgtccaatatgctgttgaagggagattttgtgattcagctatttctgttcgtgaagctgcccttgaacttgttgggaggcatattgcttcacatcctgatgtgggcctgaagtatatagaaaaagttgctgagcggataaaggacactggagtcagcgttcgcaagcgtgcaatcaaaattataagggatctttgtgcttcaaatccgaacacggacacaactcatgcctttgtggagataatttctcgtgttaatgatgaggagtccagtgtacaggatcttgtatgtaaaacattttatgaactatggtttgaagaaccaactgggagtcataagcacttggttgctgatggaagttcagttccaatggagatagctaaaaagactgagcaaattgttgacatgttgaggaagatgcccaatcaccaacccctgattaccatcataaaacgtaacttgactcttgatttcctccctcagtcaaccaaggctgcagggattaactcatccatggtggcatcaattcggaagcgttgtgaattgatatgcaaacgcttattagaaagaatattgcaggttgaggagggagctgctaatgagatggaaatccacacactaccttatattgttgccttgcaagcattctgtattgttgatcccacactctgcattccagtaactgatccttctaagtttgttgtgacactgcaaccataccttaatattcaggtgagcatggtttactttgattactatgtcattttgccactattttgccatttagagcatttgacagcggtagagcttactgactgtaaccagaaggtcccaggttcgagcctcagcctctgcatattatgctggtgcctttgtgctctgagcaagtcagcaggtagaggtccaggattagtggaaaaccttgttaatattttctacaagcatctgtgtggagctaattcagatagtcagctgttgggtcgatcactgttttgtcttggactcctccttcggtatggttatcaattgatgctaacatctgaaaatcagcttgattttcccaagatcatcaacttgctccagagaaaatatcttctcaaggatgatttcagcttgaaggttcgagctttgcagactttgggatacatacttattgcgaagcctgaatttatgctacaaaaggatatgttgaatctcatagagacagcactctcttctgaggttgattatagattcaagattcaaggacttcaaaacctctacgagtatcttagagatgctgaaagccaacttactgctgagagtactgcgaaacctcctgggcagtgtgaaataaatggcagaagtgaagtgcctgttgctgctggtgctggagacaccaacatatgtggtggtattatccaattgtattggagttctattcttgaaaggtgcttggatacaaatgatcaagttcgccagagtgcacttaagattgttgaagttgtacttcgtcagggtttagtccaccctattacctgtgtacctcaccttatagcacttgaaatggacccgctggaggggaattcgaagttggctcatcatctcttgatgaatatgaatgaaaagtacccttcattttttgaaagtcgcttgggtgatggactgcaattgtcatttaaattctttgaatccatagtcagcaaccataagatgtccgcaaacataaaatcaaatccaattgcatttgtcaaacctggcatatctagaatataccgtcttatccgttcaaatcgaaattctagaaacaaatttgtccactcgatagttcggaaattcgagtctgatagccggagtcgcagcacagttagctttcttgtatactgtgctgaagttctcgcctctctgcctttcacatgctctgatgaaccactttacttgatctatgatataaatcgagctattcaccttagagctggaggagtcgagggcaatttgaaaaggtggacttctatgtctcagtctcaagagatggcgggtatgccaaccttgccaggagagagtcatgttgtcatgcaagaagagcctggcggatattatgataacatgggagatgccactgaaagggtgaatgacaatccttgcagtacttcagatgtggacattgccaaagttcagggagattgccatgatgcaatagccctccagctacttctgaaattgaagagacatttgaaagttgtttatggtttagatgatgcccgctgtcaggcattttccctgaaggagcccccgaaatctggagaaacattctccaggcagaatgtttcttttaatattggcaacactaacctcagtctgccgagctgcctgcaggacgcagcctctgtttaccaggatttcaagacagtgcttcgcgaagattccatggactttgctgtgttcgtcccttcagtccagactaggaagcgcccaaccccaagaaatacaacgagcccaaccccaagaagtatgacgagagtcaggagaacggctgccccgagtgttacaaaagcccgtggtggtgcacgtggcgacgattccgacgataccgatgacgacgactggaccgggggtccaagagtgctagacttcagtgggggcggccgcgtgacaaggcagagggtccaagtatga

SEQ ID NO: 109949 - DNA, 246 bp, Zea Mays
atggttttgcaatggttacctgattacttctgcctgacctacgtatctgtgtgcttctgctcatgcaaaacttgcaggctgttgaagcaggagggcggcttgcgacgtgcaggcaatggtggtgccctagatctgtatgcttatatggtcacagacagatcagatgaagttaacgaagctttgtttatagaaatagcgatggagatgtttactgtaaggcaattggacaggccaagttataactga

SEQ ID NO: 109950 - DNA, 304 bp, Zea Mays
ggcaccaccgcaaacgctgacggaggtgggttcctgagctgcctccgattgatgtcgccgttgacagttgccatctcagtccacatcaagcctggttctaaggtcgccaccatcacaggtcgttctgcccttttcagattcttggttgctgccgctgtctctctactcagacgctaaccctgaagcgtccgtgtgtgaattttgtacagatcggggacgaggcggtcgacgtctagatcgacgcgctagcgagggatggcgaggtcaacgccgcatttgtcgacttcatgagctcagtgagtag

SEQ ID NO: 109951 - DNA, 300 bp, Zea Mays
atgcatttaggcattttaatgtatccattcagaagtgaggtgctgttaaattttttgacagacattaaaagtaatttgaaggcaattgaagataaagtctcctattatcatctgatgagtgaagcaatgccaggtcttgatggtagacgcattatagataaacgtaaatatgtaatgatgcaggaaagcacagcaagaaatttactaagtaggcaaacccacctgcccaatagttgtttccccaggtccatgaggtctgtcacggttttgtctccatcgcgaataagctcaagaatctgt

SEQ ID NO: 109952 - DNA, 138 bp, Zea Mays
tttttttctggaatacgcaggagagttgcgcatcattgcattaatagaagaataggaaagggggatagaaccccggtacagaacacacacaccacttagagactaactaaggatcaccgactatcatggaggaaacac

SEQ ID NO: 109953 - DNA, 260 bp, Zea Mays
gacaagatcagaaaggccatcgttgagtcaaacgatgcaaacattaagttgaatcctaatcaatccacggcggacccctcatcgcagcaggaggacggggagcaacagttacatccgttttttagttcgttccatatccccgtacaccaactcccggtgcacccccgggcagcccattcaggagggctttcacaacttccaaacatgttgtggaagttttcggttctggcggagtagtagctgagcgcccgacccccaat

SEQ ID NO: 109954 - DNA, 1555 bp, Zea Mays
gaggttgtcagccagcgagatatctgatctcctccggctccggtgcggtgaggaccccatcccgccggcggacaaaagttacatggcctgccccccgcccgaacaggaagagggcccacacgtcggccactctgtctgaccacagcacccccaccacctagctttattcccaaaacgttttcccctggaaagagaaaaagagaaaaacggagattccttgcccccttttcccttccccatcgtcgaaaccctagccccgcctcgccgccggcacgccggatcggtcggcgccatgtccaaggccagggtctacgccgacgtcaacgtgctgcgccccaaggagtactgggattacgaggcgctcaccgttcaatggggtgagcaggatgactatgaagttgtcaggaaggtcgggagaggaaaatacagtgaagtatttgaaggtattaatgttaacaataatgagaaatgcatcatcaagatcctcaagcctgtgaagaaaaagaagatcaaaagagaaattaaaattcttcagaatctttgtggaggccctaacattgtgaagctgctcgatattgttagagatcagcattcgaaaacgcccagcttgatctttgaatatgttaacaacacagatttcaaagtgctgtacccaacattaacagattatgacattcggtattacatctacgagttactcaaggcattagattactgccattcacaaggtattatgcaccgagatgtgaagccccacaatgttatgatagatcatgagcttcggaaactccggctgatagactggggtcttgctgaattctatcatcctggcaaggaatataatgtccgtgttgcatccaggtacttcaaggggcctgagcttcttgttgacttgcaagattatgattactctttggacatgtggagtctgggctgcatgtttgctgggatgatttttcgtaaggaaccatttttctacgggcatgacaaccatgatcaacttgttaagatagccaaggtacttgggacagatgggctgaatgtttatttgaacaagtacagaattgagcttgaccctcagcttgaagccctcgttggaaggcatagcaggaaaccctggttaaagtttatgaacgcagataaccagcacctagtgtctcctgaggccatagatttccttgacaagcttttgcgttatgatcatcaggagaggcttactgcacttgaagctatgacgcacccgtacttccaacaagtgagagccgctgagaacagcaggacgcgagcgtgacaggcaaagagcgaagaccatctgctcttttatcagtcagtcaggttgtatgagatgagtagccgttgggtcacttggcagaaaataaacaatagcggtagagcctgtactgtacgtaacgtaacctcctcgaggagttgtgaggtttgggacgtgattgcgaacatggtatattaatgattgttcatgtaaggtgctgtttggttcaagaaatgtaacacaaatggtaatggtaatggtttacgctcgattactggcggtaac

SEQ ID NO: 109955 - DNA, 1232 bp, Zea Mays
cccgacgcggccagcgccagcaggagcgccgccgctgaaagcctcatcaggttcttgctggaccacagctgagacctcccatgcttgctatatctgtgctgtgcagctggtgtgacgcaagtggtgaagtgatgacgatgatatatgctaccgtccggcggccggggtcgtacagtgacgggagtgagcaggatgactatgaagttgtcaggaaggtcgggagaggaaaatacagtgaagtatttgaaggtattaatgttaacaataatgagaaatgcatcatcaagatcctcaagcctgtgaagaaaaagaagatcaaaagagaaattaaaattcttcagaatctttgtggaggccctaacattgtgaagctgctcgatattgttagagatcagcattcgaaaacgcccagcttgatctttgaatatgttaacaacacagatttcaaagtgctgtacccaacattaacagattatgacattcggtattacatctacgagttactcaaggcattagattactgccattcacaaggtattatgcaccgagatgtgaagccccacaatgttatgatagatcatgagcttcggaaactccggctgatagactggggtcttgctgaattctatcatcctggcaaggaatataatgtccgtgttgcatccaggtacttcaaggggcctgagcttcttgttgacttgcaagattatgattactctttggacatgtggagtctgggctgcatgtttgctgggatgatttttcgtaaggaaccatttttctacgggcatgacaaccatgatcaacttgttaagatagccaaggtacttgggacagatgggctgaatgtttatttgaacaagtacagaattgagcttgaccctcagcttgaagccctcgttggaaggcatagcaggaaaccctggttaaagtttatgaacgcagataaccagcacctagtgtctcctgaggccatagatttccttgacaagcttttgcgttatgatcatcaggagaggcttactgcacttgaagctatgacgcacccgtacttccaacaagtgagagccgctgagaacagcaggacgcgagcgtgacaggcaaagagcgaagaccatctgctcttttatcagtcagtcaggttgtatgagatgagtagccgttgggtcacttggcagaaaataaacaatagcggtagagcctgtactgtacgtaacgtaacctcctcgagg

SEQ ID NO: 109956 - DNA, 1495 bp, Zea Mays
gaggttgtcagccagcgagatatctgatctcctccggctccggtgcggtgaggaccccatcccgccggcggacaaaagttacatggcctgccccccgcccgaacaggaagagggcccacacgtcggccactctgtctgaccacagcacccccaccacctagctttattcccaaaacgttttcccctggaaagagaaaaagagaaaaacggagattccttgcccccttttcccttccccatcgtcgaaaccctagccccgcctcgccgccggcacgccggatcggtcggcgccatgtccaaggccagggtctacgccgacgtcaacgtgctgcgccccaaggagtactgggattacgaggcgctcaccgttcaatggggtgagcaggatgactatgaagttgtcaggaaggtcgggagaggaaaatacagtgaagtatttgaaggtattaatgttaacaataatgagaaatgcatcatcaagatcctcaagcctgtgaagaaaaagaagatcaaaagagaaattaaaattcttcagaatctttgtggaggccctaacattgtgaagctgctcgatattgttagagatcagcattcgaaaacgcccagcttgatctttgaatatgttaacaacacagatttcaaagtgctgtacccaacattaacagattatgacattcggtattacatctacgagttactcaaggcattagattactgccattcacaaggtattatgcaccgagatgtgaagccccacaatgttatgatagatcatgagcttcggaaactccggctgatagactggggtcttgctgaattctatcatcctggcaaggaatataatgtccgtgttgcatccaggtacttcaaggggcctgagcttcttgttgacttgcaagattatgattactctttggacatgtggagtctgggctgcatgtttgctgggatgatttttcgtaaggaaccatttttctacgggcatgacaaccatgatcaacttgttaagatagccaaggtacttgggacagatgggctgaatgtttatttgaacaagtacagaattgagcttgaccctcagcttgaagccctcgttggaaggcatagcaggaaaccctggttaaagtttatgaacgcagataaccagcacctagtgtctcctgaggccatagatttccttgacaagcttttgcgttatgatcatcaggagaggcttactgcacttgaagctatggtgaatttcccagtgctagttttaattgttttgggaggtgtggattgtgatgccttgtcgttttatattgttgcagacgcacccgtacttccaacaagtgagagccgctgagaacagcaggacgcgagcgtgacaggcaaagagcgaagaccatctgctcttttatcagtcagtcaggttgtatgagatgagtagccgttgggtcacttggcagaaaataaacaatagcggtagagcctgtactgtacgtaacgtaacctc

SEQ ID NO: 109957 - DNA, 798 bp, Zea Mays
gaggttgtcagccagcgagatatctgatctcctccggctccggtgcggtgaggaccccatcccgccggcggacaaaagttacatggcctgccccccgcccgaacaggaagagggcccacacgtcggccactctgtctgaccacagcacccccaccacctagctttattcccaaaacgttttcccctggaaagagaaaaagagaaaaacggagattccttgcccccttttcccttccccatcgtcgaaaccctagccccgcctcgccgccggcacgccggatcggtcggcgccatgtccaaggccagggtctacgccgacgtcaacgtgctgcgccccaaggagtactgggattacgaggcgctcaccgttcaatggggtgagcaggatgactatgaagttgtcaggaaggtcgggagaggaaaatacagtgaagtatttgaaggtattaatgttaacaataatgagaaatgcatcatcaagatcctcaagcctgtgaagaaaaagaaggtagactatgaactatatcacctgccctttgtaacttgttatcccctgaacctactattttaccaatgacaggctactgttttcattccacacatgtttaaatttcataatttcaattgattttaacctatgcctcgtgctggtgtagatcaaaagagaaattaaaattcttcagaatctttgtggaggccctaacattgtgaagctgctcgatattgttagagatcagcattcgaaaacgcccagcttgatctttgaatatgttaacaacacagatttcaaagtgctgt

SEQ ID NO: 109958 - DNA, 1117 bp, Zea Mays
taaaaacatcgaaaggcctgtctgtattattaattaatcagccgagcacggcacagtcgcggcggacgttgccctgccggtcccgggccgtcttgacgccgacgcggcccatcttcgtcatggcctccacgaaggcccgctcgaacgccacgctgctctgggccagcgcgtcgacggtgggcctggacctagggtccgcgtgcagcacctggtccgacgccagaaggcccttcccggcctgcaggttgcggaagaactggttgtcgaaggcgacgggcgtcacggggtccatggccacggccacccgcgggtccaccccggccgggcaccacgccgcaagctgcgccgcgtaccccgagtccagcgtccggtccggcgccgacggcccccgcagacgtcccgagaacgtgccgcagtgtgccagccccaccgtgtgcccggctgcatgcagtggaccagcagtggtcgttcgtcgtcagtccgatccggctccagcctaatagctagctagtatactcgattgatggccggccatgcaatgcatgcacctgagagggcgatcatgtcggcctgcgacagcccgttggcggcgaacatctggctcagctggtccaggttgaagaagggcgccggcagcctcccgttgacgctgctggccgtcgacctcagcccgtccagccgaccaagctccacagcgcggtgttcgtgtaccagcgcgatggcgtccctggtggccatggcgagcacgtcggcgcaggacaccttgccgcggcaccccggcacggcgtccacggccgccctggctctgatcaccgtgtcgaagccatcgccggccagggactggttgatgacgtggtccttctccgccgtgttgttcgccgtcgacgccaccatcaccgacgcgtcgcagccctacgtacgtacgtacaggtcgtcgacgtatgcatgtcacggccggctgccggatgcatgatgcatgcccggtcgttacgtcggtatatataatatatttacctcgacgaagcagtcgtggaagaagaggcgcacggtggcgccgactgtggctgccgtctgctggaccttcctggccaccacgccgcggacgatggactccacg

SEQ ID NO: 109959 - DNA, 3627 bp, Zea Mays
gtccaaggctgcctccatgcacgccgccgccgccatgccctcccgctgctggtccagactccaaagccctcactcctcccgagcgaacacccaactcacccctcgattgctgtctgtcctgtttctgtttggaatgccgcttctttggctgcttccattccatggcggaaaaatcgcagcctttctggatttgcatcggttatctctttgcctgtgcgggtggagctaagctgcccacgtcctgcacgctgtccccgtctccccgacggatacgcccagcccagtcgacgacaggggagcaacacaacagtgatgtagatggattcagattcagtgatgcaggaagcttctcctgaattactagacatgtagacatgatgacaattcgagtaatcaacttgagtgtcggtaatagtcgctggctccaaggttgtcgacttgtcgtggtgaatggtacaaaggcacatccctatcgtcttggcatacccttggagcagctgacttgactttgtgtgtctgctgcactaggtgcttgtataaagtgtgtcctttacgaagccagagggcacatgtcatctgccttatctggagcacacttaggctttagggggagggaggaagggatatcagttcgtcgatccatccaggggatggctaactacacggcctattgcatcgctttgaaggctaaggatcatcatgatctcagggatatgcatagcttatcagcttgtgcaaagtacctttggagcacttctagggcaacagtgatccgcaatgaggtacttgtcgtattgtctgccatcagcctgttgttcatgaccacctttgggcccttgcgccgccggagcagaaactcgtttgtacagaatggtttcatggttgcatacactttgtcctcgtccctgatatcatacacacttggttcaatgtactcatctgcagtaaagagcagcatgtatcccatttgggcctcatccctgtatctcctcttttgttctgcggactctattacatcttattgtctcaatggcaacaatcaacaaaaggaacagcttattttgtttcttcttttccaaatatatgtcagccaaataactaatggatctgattctaatggctctctagttttttcggtagctgcttttaaatttatggaacgattctgggcataccagctggccaccggatcatggaatttgaacaaaatggttgctgactacatgtatgaggaacaatccagaagtggctcatcttatgatccaaccagcatgaaaggttatcattacttagttgattggcccttggatgagtcaaaactggaagcaaggatgtcatatgcaaaggaattaacagtggatgatgcacagatcattgacatagagaggatatttatgtgcagtgaactaagctccgagctgaaggatgtatgcctttccttctctctttttcttctgctgagaaggcgcttctttgggtttgtctgcgttgaagcttcacagcgaaagacacatgattttgtcttcaagggggttttgtcaaagaatcaggacggaaccctcaattacgacaggatcttcaggttgattgaggttgagttagcttttatgtatgatttcttcttcaccaagtatgctgttctttactatggatctaaaaaggtttcagcaatttggtccctggcatcagccagcttcatgtctgtgacaatctacaagctgatagaaagtgttctttctaaccagaatcggtctgaattcgtgggcacaacaacatctgatgttacaacaacatctgatgttgttgtaacaatactgatagtagcatgcattgttttgcttgagtttatccaagtattacttttttttagcaccatttggtgcagagtatcatttgtttgccattatgttcgagaacaagcaacgaacacaaggagaggcttctgcatgaaactgtttcaaaagttctgctgcatgagattcagggagattattcttaacatggctattggtatcaccaggtcaaggtcaagcgaatactactaccaaaataaacttgggcaatactccttgcttgaatcagtgattagttgcaagtacaagcagagtccacgtaaggtatggtttcacaggtttatgcatcgatattgtagtcttatagtggctccagactttgggtacctttgtaatacaaacaaagactttattcacgcacaacgtatccgcaagaaacatgtgaaacctgcagctatcaagataccagtagaagtaaaaaaggcagttgtccattccctccagcgtacacagggtgtcctagcgaatggagaatcgtcattagtgtacaatgaggtgcatgacctcttatgggcttgcaggcacaatatgctctcagacccaggcaccaactgttacctggacaaggagaatcagacacacatcattttgacttggcacattgcaacgtgttactgcgaggtgcaaacattgaaatgcctttatcctagagttgggggggcactcaagttacatcttgacatcgcaaccatactgtcaaagtactgtgcatacctggtggtctcagcaccgaagttgcttcctgggaactactatgattctagccttgtgtttgatgcagtagcagtggaagctgcacagtttctgcagaaagtggaagacaagtatgaagccttgagaagtttgcctgtatcaacagaaacctccatcttacagagggggatgaagttggcgaggcagctcgaggagatggaatgtgacaagtgttggaaggtgcttgcggatttctgggcagagatgttgctctatatcgcgccttcggaaaatgtgaatgagcatttcgaggcactggcaaatggaggggagtttataacacactggtgggcattgctcacccacgctggcattctagagagggctccaaggaatgtcaacaatgacatagaaaatcaatgggaaggatcatcatcatatggttgcccatctacaactcaggctgcagctgcagcctgtgccacaaatcaacagccaatggctggggaccgtactgtgcaactgattgaaatgaatgtcggagacatagaagatgctaagactgacaggcattatcctggagagatttcatatggtgctgctttaaggcttcgtcgtgcgaactcctacattagcaagtgtagagaagctgctaccttagccaccagcgccacgattaaaccagcaatacgtggaaactgtgagcaagtgaggatgatgattcggcaacaagcatatctaggtcaaaatgtggaactcgcaagtcccagcgcaagcactgctccaagtgagaacaaagagattgaaattgtaatagcatgtgagtaatgttgctatatatgtgtcaatgaatgaaatttgtacatatgcatggggcaacattcacaggttcagctggtcatttgtttgtggagccatgaactattatgaagttgtcctgttattctgaaagtaaaagagtgcagagatcatatgtaatgtgacagatatttagtatcaaaatagtgtacaattgtcttaagatgaaattcgtatatatggggcatcttcattcacaggtcctgctgtatgatgcttgctc

SEQ ID NO: 109960 - DNA, 648 bp, Zea Mays
gactcagcccactagcccagccccggcaaagcctcacatccatccggagggcgcagcccgtcgctccttctcgccggtcgccgccgcccccctctcatcgtccaaggctgcctccatgcacgccgccgccgccatgccctcccgctgctggtccagactccaaagccctcactcctcccgagcgaacacccaactcacccctcgattgctgtctgtcctgtttctgtttggaatgccgcttctttggctgcttccattccatggcggaaaaatcgcagcctttctggatttgcatcggttatctctttgcctgtgcgggtggagctaagctgcccacgtcctgcacgctgtccccgtctccccgacggatacgcccagcccagtcgacgacaggggagcaacacaacagtgatgtagatggattcagattcagtgatgcaggaagcttctcctgaattactagacatgtagacatgatgacaattcgagtaatcaacttgagtgtcggtaatagtcgctggctccaaggttgtcgacttgtcgtggtcagtttcaccgaatagatctgcccaatctagacttgctaggattcaaataggagtttagtttgctagtatttctctactgattaatcaattgagttttatt

SEQ ID NO: 109961 - DNA, 618 bp, Zea Mays
atggccgccgccgccgctgcttctgcggccctccagaggttcatcgacgacaagctggccgccctccaagctgcggagcaggaggctgcggcagctcgtgcgcgtgttcgggccatcgtcctgctcctagaggaagaacaggctgctgtcgcaacccttgactccaagaatggagccattccatactcagaatctggaatagagtcatttagtccaaataggctctggaaccaaacactacctaaactccgggatgatctggtcctcgaggaactacaacttgggccagacacgacttcagcaccacctcaggccttctactccaacaactcccagccaacttcctcctctcgcccccctggcagtggcggccagggacagggccgtggtcgtggccgtggccgtgggaagggtggcgggggttctggtgctaaccatcacaggcagggagggcaccttgctggtcctgcgcgcaaccaggctaatagcagcacctcgacgataggtgcgccgacaacctggccctccctctacaacccatggactgggacgatctccatgtaccccggtccaactatgggtgaactacagcagccctcacgcccccaacagcagtag

SEQ ID NO: 109962 - DNA, 2834 bp, Zea Mays
actggactactggagccctataggctatagccaccaccgcactcgcctccctctctccctcccacactccaccacccgcgccgccgcctcctactccgccccggcccctctgatccggaccgagcgccggccatggcgctcgccttcgacgagttcgggcgccccttcattatcctgcgggagcaggagaagaagacgcgccttcgggggcttgacgcgcagaaggccaacatcgcctcggccaaggccgtcgcgcggatcctccgcacgtcgctgggacccaagggcatggacaagatgctccagtcccccgacggcgacgtcatcatcacaaatgatggagcgaccatcctggagcagatggatgttgacaaccagatagcaaagctgatggtggagctgtcccgtagtcaagactatgaaatcggggatggtaccaccggggtggtagtcatggcaggggctcttctcgagcaggctgagaagcttctggagcgtggtattcaccccattagggtggctgaaggctatgagatggcgtcaaaggtagcttttgaccacctagaacatatatccgaaaagtttgagttcagtgcagacaacattgaacccctggtccagacctgcatgacaactctatcctcaaagattgttaaccgttgcaagcgggcgttggcagagattgctgtcaaagcagtacttgcggttgcagatttggagaggaaggatgttaacttggatctaattaaagtagaaggcaaggttggtgggaagctggaggacactgaacttgtatatggaattattgttgacaaagatatgagccatccacaaatgccaaagagaattgaggatgctaagattgccatcttgacatgcccatttgagcctccgaagccaaagacaaagcataaggttgacattgacactgtcgagaaattccagacactgcgtgagcaagagcagaaatactttgatgaaatggttcagaagtgcaaggatgctggtgcaaccctggttatttgccagtggggttttgatgatgaagccaatcatttattgatgcatagaaatctgccagcagtgagatgggttggtggtgttgaattggaactgattgccattgctacaggagggcggattgttccgagattccaagagttgagtcctgaaaagcttggaaaggctggattagtcagagagaaatcattcggaacaacaaaggaccggatgctttacattgagaagtgtgccaattctagagctgtaaccattttcatccgtgggggaaacaaaatgatgattgaggagaccaagcgcagtcttcatgatgctctttgcgtagcaaggaatctgatccggaataactcgattgtgtacggtggcggctcagccgagatatcttgctcaattgctgttgaaactgctgcagatcggcacccgggagttgagcagtatgctatcaggtcattcgctgatgcattagatgctgttccactagcgttggccgaaaacagtggtttgtcaccaattgataccttaactgcggtaaaagctcaacaagtcaaggagagcaacccccactgtggcatagactgcaacgacgttggcaccaccgacatgaaagaacagaacgtcttcgagaccctgattggcaagcagcaacagatcttgcttgccacccaggtggtgaagatgatcctgaagatcgacgatgtcatctcaccgtccgagtactgacggaaagaaggaacggatggctatgctggatatgcgtaggcggcattgctgatgtgttttgattggtgtacctccttgtccaggcttgctgcctaccactcactccctgtgtgacgttttgctgaaattggtttgtactgtgcacgataatatctggaaatagactctagacagtccttagttatctttttattatataaaaaaagtcagcgccttctcgttagggttgagatgtttgcagtattgatgcttttgtagtgtttttatagctcagcttaagctgtcatttttgtttgatgatttgcaatagttggacgccctcatgaacaaaatgcaatggttcatcttttggttcacatggacaaaatgttaaaatccgaaagcgttttctcaccgcacgacacagcatatttttttattatttcttttaaagtaaaatgtgttggaactgttaattcttttcaacagtttgttcacatggacattgcgatcctgatgttgtgatgacatactctatcttggtggaagcttatcgaaaggaagaatctatgctttgcatcaggagaacctaactttggttccaactgattttaccgtggtgattttgctcatccgaactctttagatgcattgaccaaacgatagattctgtttggttggatgcaaccgagattgcacccacagctgcaacacaagtcaaatctgttgccatccctactagcgggccaggctcgcacaagccatgccatgtttgctcatgaagcttggttgcattggttgagaatctccttgctatccttgatttagtgagatgtgcccacgtaccacagtacgtgtaactgagatataaggagttatatagggctctgcctctgaaagtgcccagtttgagctgccaaacagagggagtttactgaactggtgaatgggaacaaaattgcatgtgtatcctccactatggcactgttaatccttttcttgacaagacaggatcaggttttggaagaatgaaagaattcataatctgatggtaaaatttttctgtggccctactctgaaccagatcacctttaactccccgaaaatccttcaga

SEQ ID NO: 109963 - DNA, 2145 bp, Zea Mays
actggactactggagccctataggctatagccaccaccgcactcgcctccctctctccctcccacactccaccacccgcgccgccgcctcctactccgccccggcccctctgatccggaccgagcgccggccatggcgctcgccttcgacgagttcgggcgccccttcattatcctgcgggagcaggagaagaagacgcgccttcgggggcttgacgcgcagaaggccaacatcgcctcggccaaggccgtcgcgcggatcctccgcacgtcgctgggacccaagggcatggacaagatgctccagtcccccgacggcgacgtcatcatcacaaatgatggagcgaccatcctggagcagatggatgttgacaaccagatagcaaagctgatggtggagctgtcccgtagtcaagactatgaaatcggggatggtaccaccggggtggtagtcatggcaggggctcttctcgagcaggctgagaagcttctggagcgtggtattcaccccattagggtggctgaaggctatgagatggcgtcaaaggtagcttttgaccacctagaacatatatccgaaaagtttgagttcagtgcagacaacattgaacccctggtccagacctgcatgacaactctatcctcaaagattgttaaccgttgcaagcgggcgttggcagagattgctgtcaaagcagtacttgcggttgcagatttggagaggaaggatgttaacttggatctaattaaagtagaaggcaaggttggtgggaagctggaggacactgaacttgtatatggaattattgttgacaaagatatgagccatccacaaatgccaaagagaattgaggatgctaagattgccatcttgacatgcccatttgagcctccgaagccaaagacaaagcataaggttgacattgacactgtcgagaaattccagacactgcgtgagcaagagcagaaatactttgatgaaatggttcagaagtgcaaggatgctggtgcaaccctggttatttgccagtggggttttgatgatgaagccaatcatttattgatgcatagaaatctgccagcagtgagatgggttggtggtgttgaattggaactgattgccattgctacaggagggcggattgttccgagattccaagagttgagtcctgaaaagcttggaaaggctggattagtcagagagaaatcattcggaacaacaaaggaccggatgctttacattgagaagtgtgccaattctagagctgtaaccattttcatccgtgggggaaacaaaatgatgattgaggagaccaagcgcagtcttcatgatgctctttgcgtagcaaggaatctgatccggaataactcgattgtgtacggtggcggctcagccgagatatcttgctcaattgctgttgaaactgctgcagatcggcacccgggagttgagcagtatgctatcaggtcattcgctgatgcattagatgctgttccactagcgttggccgaaaacagtggtttgtcaccaattgataccttaactgcggtaaaagctcaacaagtcaaggtatgggcaaccctattttgtagtgtttgcacaacgatgttgttgctgttcttgtttgcaataactcttggtgacatgattactaacaacacctctgcaggagagcaacccccactgtggcatagactgcaacgacgttggcaccaccgacatgaaagaacagaacgtcttcgagaccctgattggcaagcagcaacagatcttgcttgccacccaggtggtgaagatgatcctgaagatcgacgatgtcatctcaccgtccgagtactgacggaaagaaggaacggatggctatgctggatatgcgtaggcggcattgctgatgtgttttgattggtgtacctccttgtccaggcttgctgcctaccactcactccctgtgtgacgttttgctgaaattggtttgtactgtgcacgataatatctggaaatagactctagacagtccttagttatctttttattatataaaaaaagtcagcgccttctcgttagggttgagatgtttgcagtattgatgcttttgtagtgtttttatagctcagcttaagctgtcatttttgtttgatgatttgc

SEQ ID NO: 109964 - DNA, 114 bp, Zea Mays
cagtgttccccgacgagaaagaaaaccctgcgactaacaagcacacgccgctgcacaaatatatggttcttaagcctcttgtgaaggtcttggtcctctaattaatgaaaaaaa

SEQ ID NO: 109965 - DNA, 1366 bp, Zea Mays
agttcccatccgccgcccgcgcacttgttccttccggcacagcacacaggacaccgtagacagattcatcgcgacgatggggctggacgtcgtggagatcgggatgggcgccgatttgagcctggatctgaggcacttcgcctccaaggccgtgcggcagagcaaggactacgcgccggcgccggcgccggacatggacgcctgcatccgccgcctcgaggaggagcggggcaagatcgagatgttcaagcgggagctgccgctctgcgcgcgcctcctcgcagacgtgatcgatgtgatgaaggaggaagcggggaaggcggtggcggaggaggacggcgccgccggggacaagagcaagtggatgagcacggcgcagctctggacgggcgattgcggccgcgaggacgcggaaccagagaagcaagacaaggagaggagctcgcctgaggccaggtctcgcgccgccggcggcgctttcttgccgctcaaggctgccgtgggctccggcgcgccggcgttcgcgccgctcggcttgagaatggacgacaaggccgccgcgcgcgccgggatgcccgacctgtgcttgctgtcgccgccggcgaccaagagcgccgccgaggagagccgacgccaggtggtggggtttgcgcaggcggcgacgagggcggccgccgccacggcgccagctgccccttcgcttagcgttggcgtccagtccccgtcgcagcaggcgaggaaggctcggcgttgctggtccacggagctgcatcgccagttcgtcgccgccttgaaccagctcggtggcccccaagttgccaccccaaagcagatcagggagctgatgaaggtggacggcctcacaaacgacgaagtgaaaagccaccttcagaaataccggctgcacaaccggagggcgccagggtccggcgtggtgagccagcccatcgtgctggtgggagggctgtggattccgcaggagcaaagcagctcgcagtccgggtctccccacggcccgctccacttctccacctcaggcatcgcagtctcgtcggcggccaccgtcagctgcgaggaggaagacggacggtccgagagctatggctggaaatgatggagaggctgctgctgctgctgctgctgagaggggagctgcagcctcaggaacgggaatcatcaggagggaaactgagagtagtgtagctgtctgtacacatacatagttacattacattacatacagggagtgagggagatcgggccttgagcgctcgagaccaaactgatgcttcgggtttgtacatcccaaagagatgagatgatacagttttgcggctaatccatgtttcgggcttttttgtcacca

SEQ ID NO: 109966 - DNA, 2489 bp, Zea Mays
tagtaaacatttgtgccgcgtatgctcgtatgtgtgtgtgtttgaagagttccctcacgacaagggcccccacaatccgaggggcaaaatggtccagtcaaaaaagccctacttccgagattagacaaaacaaaactcccccgacgtcggcttctccagcgccacgctctcctctccagtctccaccaacgtcctccccccaccgcaccgcaccgccctcccctcccctcccctccccgcgcgtgcgccgccgccgcgagatccggggcgcgatgtggcgcagctgcgtctcgcggggcctctccagggccaaggcctccgcctccaggctcctctccacggcatcgtcgtcttacacggtggtggaccacacctacgacgcggtcgtggtgggggccggcggcgcggggctccgggcggccatcggcctctccgagcacggcttcaacaccgcgtgcatcaccaagctcttccccacgcgctcgcacaccgtcgcggcacagggaggcataaatgccgcgcttggaaacatgagtgaagatgattggaggtggcacatgtatgacactgtgaagggaagcgattggctcggtgaccaggattctattcagtatatgtgcagagaagcaccaaaagctgttatagagcttgagaactatggattaccattttcaagaactgaagagggaaagatataccaacgtgcctttggaggacagagcttagattttggcaaaggtggacaagcctaccgttgtgcctgtgctgctgacagaacaggacatgctatgctacacacattatatggtcaagcaatgaagcacaatactcaattttttgtggaatactttgcattggaccttctcatggacaatgatggaaagtgtcaaggagtcattgccttaaacatggaagatggaactcttcaccgtttccgtgcttctaatacaattctagccacaggaggttatggcagggcatatttctcagcaacctcagcacacacttgtactggagatggcaatgctatggtcgcacgtgctggtttacctcttcaggatcttgagtttgtacaattccatcctacaggcatttatggtgctggatgcctgattactgaaggttctcgtggtgaaggtggtatccttagaaatagtgaaggtgaacggttcatggaacgatatgctcctactgcaaaagatcttgcttctcgtgatgttgtttcaagatcaatgacaatggaaattagagaaggacgtggtgtagggccattgaaggatcacatttatttgcatctgaaccatctgccgcctgaggttctcaaagaaaggctccctggcatttctgaaactgctgctatttttgctggtgttgacgtcaccaaggagcccattccagttttgcctactgtgcattacaatatgggtggtatcccaacgaactaccatggggaggtagtggatatcaagggtaataatccagatgctgttatccctggtctaatggctgctggtgaagcagcctgtgcatctgtccatggtgcaaataggctaggcgcaaattcacttcttgacatagttgtttttggcagagcttgtgcaaacagggtagcagatatttctaaaccaggtgagaagcagaaacctctggagaaagatgctggagagaagaccatagcctggttggacaagctgaggaatgcgaatgggtcattgccaacttccaagatccgtctcaacatgcaacgtgttatgcaaaataatgctgctgtgttccgtacacaagaaacacttgaagaaggttgtgaactgattagcaaaacatgggaaagtttccatgatgtgaagctcagtgaccgaagtctcatttggaactctgacttgatagagaccctggaactggaaaatctgttgataaacgcatgcataactatgtattcggcagaggctcggaaggaaagcagaggagctcatgctcgtgaagatttcacgacaagagatgacgagaagtggatgaaacactccctgggatattgggagaacgagaaggttcgattggcatacaggccagtgcacatgaaaacattggacgatgaagtagagtcattcccgccaaaagcacgtgtctattgatcgattcaagcctaacacctcgggaattccgtgtaaggtgttaataaagcagatgggcgttcctggctgagaacatgacctggatttgtgtccctcattttctgtgtttctgtattctgcctagtttgctagaaataaaagggtaagatagaacacatgctaatccctggctgatgtttgtgtacatgaaattttgcatgggttgttacctgttaatgctctgcctggtatcattaacccatgattcatgaatgttttggtgattcatggcatggtgcgacgttgtcaaacaacgtagatttgtacgcctgttccttggatatagtataatatatatgtacacatgtgttggagcag

SEQ ID NO: 109967 - DNA, 858 bp, Zea Mays
gcacaccaaaagtactcaggactgtcatctctcagttgcaattgcaaaaaaaatacagagagagagagagagagagagagatccctaccctgcaaagagagactgacaatggacgcaaaaccggcgagtgtctgcatcttcctgctgcttcttctggcgcagaatccttcttcctcctctgcagacgaccagaagtgcttttacaccactgaccgggtggcgacctggtgcgtggactgggcgtgcaagttcggctgcctgatcgacgccaagcagtaccataccaagtacaagaacagctggtgcgaaggctccaggagaggcatctgtcactgccacttctgcgactgattctcacgaacagtcatctcgaaataaacaaatcatgtaataaaagccccgtggtcgtacgatataattttaaaaaacaccgattatagggatggagtcggatggaaaatgttgttcttttgtggtagattaaagccccctctgcctctggcaatagtataatgttatgcgcttggaaacaaacactggctacccttggaatgatttggaggacggtctttatatggcctccttagttactctaggcgttctagagtgtgcgtacaaatttaattatttggtttgtttttgttttagataaacattttttaatgcttcctaggccagtagccagtttaccatggacacagttcagtccacctcccttctcctaataggccatggtggccagctcattcactcccttcctctcccaccggaccaaggcccacagatgccggcctactagctgcctcaaccaaaagtccatagcccacccaacctcctctctgcagtcacccgttgttc

SEQ ID NO: 109968 - DNA, 96 bp, Zea Mays
gttaaagcaagaataatcatcatcgagccatcgattcgtcatcacgggttcaagatacatatgattaattcaaacaaattcaaataagaaaacaaa

SEQ ID NO: 109969 - DNA, 1942 bp, Zea Mays
gagttgttccataaagttagcacggaaaattactgttcaagtaaagtacaggagccgcaaaccaccgcacggccccatggcctcagtctcccacgttcgcgtgcaatcaccgacgtgaactccatctccagcttacacaactcttccggtacacgcatgcagccgcgtatccaatccattaaatgcgtcgtcgtcggccacgcgcgcacgccgcacggcacggaggcgatcgatggagatggcgagcggcgctgcacgcatggtgtcaaagccagtggacgacgatctgaaggcggcggcggcggcgccggagccgtggctggggagggagaaggcggggtgcagccgcggggctttgctcgtcggcggcctgctcctcgcgtgcttcgtcctcggccgagagagcgcgtcgtcgatgccctggctgcagatcgatgtcgccaaggccaagctgacagacacgaccaatggaacagcagggcttaccacggacgctccccgtggccgcgacgagctgttcggcgggctactcccagccggcatggaccggcgggcgtgccggagccggtacgaggcgtggcggtactacaagcacttcccgtacgcggcgtcggcgcacctccagagcaagctgcgcgcctacgaggcccggcacaggcggtgcgcgccgggcacgccgctctacgccaaggccgtcgagcagctccggtccggccgcagcgccgagggactggagtgcacctacgtggtgtggctccccttcgacggcctcggcaaccgcatgctgtccatggtgagcggcttcctctacgcgctgctgacgggccgcgtcttcctcgccgccctgcctgccgcgggctcgggcgacctcttctgcgagccgttcccgggcacgacgtggcggctccccgtggaggacttccctgtgcccgacctggtcccgcgggggcagagcatcgagcggtcgtacacgaggctcctcgacgccaaggccgtcgggcccgccgcaaacgcgacggcgttgggcgtgcctccgtacgtgtacctcagcctggggtggcagctcaaggacccgctcttcttctgcggcgagcaccagcaagtgctccgcgacgtcaactggctgctgctgtacagcgacctctatttcgcgccatcgctgtacggggtggcggagttccaggacgagctgcgccggctgttcccctccaaggaaagcgtgagccacctcctgtcccggtacctcctccacccgaccaaccccgtgtggaggctggccaccacgtactaccgctcgtacctggctccggcgaagcggaggatcggcgtgcagatcaggatgttcggcttcggctccatccccgtcgacgacatgtacagccagatcctcgcgtgctcgcggcaggagcacgtactgccagagaccgacgacgacgctactggtggcaacgaggcggcggcggcggcgagcagcgaggatggctccaactccacggccatcctggtggcatctctgtacgccgactactacgagcggctgaggaggaggtactacgagcacccggcgaagggcggcgagagggtggccgtgttccagccgtcgcacgaggagcggcaggcgacggacaacatggcgcacaaccagagagcgcttgcggagatctacctgctcagcttctgtgaggagctcctcacgtccgggaggtccacgttcgggtacgtgagcagcagcctcgccggcgtccggccgacgatcctgctcacagcggacggccacaaggttccggagccgccgtgccggcgggccgtgtccatggagccgtgcaacctcacgccgcccctgcgtgtgcactgccagggcaagcccgtggacaaggaggacttggcacgccacctcagagtctgcgaggattccaaggtctccgtcaagctttttgactaa

SEQ ID NO: 109970 - DNA, 510 bp, Zea Mays
gcgccgtcagccagcatgagccgaggggcggggggcggcggcggcgggaagctgggccagcacgtgagctggctgtggcgtggcccgcgccgggcgctgtgcgcggcgcgcgacctgtacgtgcgcagcctcacgggctgcgcgggccacctgccgggcgacgccgccttcggctacccgaccttcgccgccgcgccgtcgttcggcagcttcgcgtcctcgtcctcgtcgcgccgcgcctcggacgccgaccaggacctgcgggagctcgtccgcgccgcgtcccagcgccgcgccgccgagctggagcgccagcgccacccggccgccgtgccgcgcagccgcagcgtcgccgccgccgccatggcgcgcatcgacgaggacgggccctgcgacttcgcctcctccgccgccgccgtgtttcccaggagccggagcttcgctcccggagctggacgcgtcgtcggtgtcgccggccgcaggggcagcgtggccaccctcgccgcctga

SEQ ID NO: 109971 - DNA, 3178 bp, Zea Mays
gcctctttttctccccgccccgcgcggccgaacaaaaccctagtccccctccccactccctcagtccccattcccacaccgttggtggctcggaaccgccactgaccacttccctgaccccgcgctctctccctctcactacagtcggagggcggcggcggtggcgaaccgacggcgtatgtaaggaatccaactgaacatttgacttgcttgttccgggagatctcttgcctaactgtgagcgagcgagttgtcacagaacagttggctgctcacaatggggacactttcaatgtccgacgccagccctatccctgccaagaactgggatgcttcccctgtcaagctcgaggctcaaggtggtgacgccatcctcggcatgaaggaggaagagcgactactggagctcgtgaaggatgagcaggctgatggaatcttggattcattaccaattgacctggaggccaagaatggcgatgcatcactcatcactgaagccatgaaaaaggaggaggagcagcttgaagacacccggatcaaggtgcaggaagaagaggaagccaggaagagggaagaggctgctagacttgcttttgatcctgagacacagtataacaagttagatgagctgctgacaaagacacaactcttttcggagtttctacttgagaacatggatcggattgccgatgaaagtgttgaaactcaagctgaacagccacaggtagaagagaagaagaaagggcgcggccggaagaggaaagcaaagccacagtacaatgataagaaggctaagacggcagtggctgccatgctcacaagatctcgcgaagaacgtcttgcggaagattctactctctcagaagaagaaaggtgggaaaaggagcaggctaatcttgtgccgttattgactggtggaaagttgaagtcatatcagataaagggtgtcaagtggcttatatcattgtggcagaatgggctgaatggaatactggctgatcaaatgggccttgggaaaaccatccagacaattggatttcttgctcatctgaaagggaaaggcatgcatggtccatacttaataatcgctcctctgtccactctctcaaactgggtgaatgaaatctcaaggtttactccatctctggttagtatcatataccatggaggtaaggctgcccgggcagagatccgaaggaaatttatgcccacaaatgttggccctgattttccgatagtagtgacttcatatgagatggccatgtttgatgctaaatttcttgctgcctataagtggaagtatgttgttgtggatgaggggcatcgtctgaaaaatgctaagtgtctattattgaagcagctgaagcgcataccaatggataataagctccttttgactggaacacccttgcagaataatcttgcagagctctggtcactattgaacttcattttgcctgatatattctcgtcacatcaagagtttgagtcatggtttgatttttctggtggaaatgaagaaactgatgagaagaaaaggctgcatgttgtttcaaagcttcacgctatcttgcgtccattccttctaaggcgtatgaaggaggatgtggaacagatgcttccacgaaagaaagagataatcatatatgccaacatgactgagcaacagaagcaaatccagcatcacttgatcgaaaaaacatttgacaactacttgcacgaggaatcagatattatattgaaaagacctggcattagggcaaggttgcataatctaatgattcagctgaggaagaattgcaaccatcctgatcttttggaatctccagttgattcaactggtttatatccacctgttgagaagcttctggaacagtgtggtaaattccaactttttgacaggttgctaaatttcctgatggcgcaaaagcacaaggttcttgtattctcgcagtggacaaaagtgctggacattattgaatactaccttgattcaaaaggccatgctgtttgccgaatcgatggtaatgtgaaactggaagaaaggaggaggcagatagcagaattcaatgacgtgaatagcagcatgcgtatcttcctcctgagcacaagggctggtgggcttggcatcaaccttactgccgctgacacctgtatcctctacgacagcgactggaaccctcagatggatttgcaggccatggaccgatgccaccggatcggccaaacacgcccagtgcatgtgtataggctggctacgtcacactccgttgaggggcggatgatgaagagagcctttgggaagctgaagctggagcacgtggtgatcggcaagggacagttcgagcaagacagagctaagccgagcgccttagatgaaggtgagctgctggcgcttctcaaggacgagcagaccgaggaggacaggatcgtccagaccgacatcagcgacgaggacctccagaggctgatggaccggagcgacctgatgggcccgccgcctggcgctggcggcgcaaacgcggcctcgcctcttgtaccgctgaaaggcccgggctgggaggtggtggtgccggccaagagtggcggcggcatgctgtcgtcgctcaccagctgagccgtcgtcgctgcggggatctgttgtgcttttggttggtcgcacgcactcagttttggtttgccccccccccccccccccccccccccactggtgctggtggttttggtggcagctgttgcgctgctcaggcgatggctgttgaactggggcgttgcccctgcagaagtagcttttagtttaggatcagcaacaaaacaagcaggactctaggccatgtgtggtcgactctccgtacggtacccaggtcgtttacagtacggaggtcgttgcgttagattacgtgggtgggtgatggcctcatgggggatgggacggttggttgaaccagacacatgccggttgctttgtaaagtttgtatcacgtcgtccgtgatacaatgcggtcctccgtctacaagcgtgctgatcctctcttgtttggctgtcttgtgatgtttgttgagaacgctgaacgaacgcccgtaccgtgacaaagatcggttcctggtcttgttactcttgtacagtctacaaaaggagaaggcgaacgctgcaacaaggttggttcctgtatactat

SEQ ID NO: 109972 - DNA, 877 bp, Zea Mays
gcagcaaacaagtatattttaacagtatgattctgatgcattaaacgacgtaagaatttaacattggtacaagaggggaggggagccagtaacaacttgcagcatgcttttactagtttacaggcgggaggaataggaatcgtaggtaagctggaagaattctaatgatatacttgtcaaccaaagaatctaagtccaagtcgtcttcacagttgcgagttcccaaacaattgttgtactccagtgtcaccattgtagaagtattagtcctgcctcacagaagatggtaggttagtaatttttatgagtatcggaaacatccaaatctatactgaatgcatcaaagcaatatctagagaagcccttgaccaacagttactctaccaatgtataactttagggatacaaaattcatgccattagatttgtattcaaaagcacttatttgtgattgaaagtgtgatatcatagaagggcaaattaagagagtaacagttggccaagggctgttctaacaaaacaaaacatgccttactcacagatggagggagtactactatgcaccagcagttttgccttatctggagcaacctcaagcttaactatgcaccagcaaaaccggatcccaaacagaaaaagggtcctagctcaagttcaagcttcagcttctcatagccagttcagtcgcctcatgacaggatacaattttgcaagataaatcaccacagaatcgcctattaatctataagtttactccacagtcacatgttcggtgcaaggtgcatccatccaatatatacaaaataagttattttggttcagttacttcagtatgctgttatagtaagaaccgactttcatgccaaactatgattcc

SEQ ID NO: 109973 - DNA, 699 bp, Zea Mays
ccttcttgcagctgttgtcccacagcttcagctccatggacggacgggcggacggaccagtcaactagctcgacacggcggcgtgtacgtacgtacctcgtcacgccgcggtactgcgacgtcctctgcccgaacgtgtcgatggacttgcggtggtgcacgggctgcttctgccccgccgcgccgccgcgcttgcgcccgccgtccatcgacgccgccgccgccgcgccgtactcggagctggggtgcgccgtcacgcagctcgacggcgacgacccggagctgatggacagggccagcgcgtgctggtgcggctgcccggcggcggccagcagtgcgccgttctcggcgcgcgccgccacccagctcgccatcgccgtcgccgtcgcggcggcctcgtcgtccgccaccagctgggacccggccgaggccccgccgtacaggtccacgcacggcggctgcaggaacgacccgtggtggtgccccggcccgccgccgcctccgcctccgtagtagtagtagtagaagctggaggcggccgccgggttgtccaggctcagcgccatggcctgcgactgcgccgccgccgcgccaaggaagtcctcgagcttgggccctgagtgaaccaacaatgacgccgatcgatcaacaacaacgaccagcgggccggtcgacgcgaggccatcggctcagtatgga

SEQ ID NO: 109974 - DNA, 2332 bp, Zea Mays
cttacaagttgcctgccgctgctgtagctgtagccgccggccagtcgctgttgtaggtaattcgtcaacgaagaacggagtaaataaggcagactactagcaaaccacaccacagtcattaaaagaaccgagtatcaatctcgatctcgctcgtagtccacagaccctggctcctggatcagcgatgccctccttcctcgtagtagccttcttcgtcctcctctgcctcggcctcaacaaccttccggcgctcggtgacgccggcggcggcaacgagtactccttcgtctactctggcttcggcggcgcgaccggtgccagcctcgtccttgacggcacggccacggtcacccgggaaggcgtcctcaagctgacgaacgacgagcaggccaacctgaaaggccacgcgttccacccgactccagtccagttcagggactcctcctcctcctcctcgcccaataatggcacggcggcggtgcggtccttctccgccaccttcgtcttcgccatcatctccgcctccacctactggagcagcgacggcatggccttcgtcgtctccccggggaaggacctctcgggcgcgtcgtccgcgcagtacctgggcttgctcaacagcacgagcgacggccccggcgccgccgccagcaaccacgtgctcgccgtggagctcgacacggtgatgaacgtggagttccaggacatcgacaacaaccacgtcggcgtcgacgtcaacaccctctcctccgtccactctcgcgccgctgccttctacgacgacgacacggaaggaggaggaggaggtgcgtggaagaacttgacgctcagcagcggcgacgccatgcaggtctggatagactacgacggggaggccaagcagctcaacgtgacgctggctcccatcgccacgagaggggtgaagccatcgcggccgctgctctccaacgtcaccgacctctccgccgtgctcgctgcccaagcgtcgtacgtcggcttctccgccgcgacggggcccatcccttcccagcactgcgtgctcgcctggagcttcgcggtggacggcccggctccgcccatcgacttcagcaaggtcccgaagctgcccgacgacaccgccggccgccgcgaggctctggtcagggagctggagatcgcgctgccggtggcggcgttcgtcttggtcctcgccacctgcgtcaccgtcgtcctgctggtccggaggcacctgacgtacgccgagctgcgagaggactgggaggtcgagttcggcccgcaccggttcgcgtaccgggagctgttccgcgcgacggacgggttcaagagcaagcacctgctcggcgccggcgggttcggcaaggtgttcaagggggtgctgtccaagtccggcacggaggtcgccgtgaagcgggtgtcccacgactccacgcaggggctcagggagttcatctccgaggtcgtcagcatcggccacctccgccaccgcaacctcgtgcagctgctgggctactgccggaggaagggcgagctgctgctggtctacgactacatgcccaacggcagcctcgacaagcacctgcacggcgaggacggcaagccgctgctggagtgggcgcagcggttccagatcgtcaaggacgtggcgtccggcctcttctacctccacgagaagtgggagcaggtggtcgtccaccgcgacgtcaaggccagcaacgtgctcctcgacggcggcatggtggcccacctgggcgacttcggcctcgccaggctgtacgaccacggcgccgacctgcagaccacgcacgtggtcggcaccacggggtacatggcgccggagctctccaggaccggcaaggcgtccccgctcaccgacgtcttcgccttcggcaccttcctgctcgaggtcacctgcggccgccggccggtcgtcgacaccgtgcgccacggccgcaagatgctggtcgaccgggtgctggagtactggcgcaggggctccatcgaggagaccgtggactccaggctgcgcggcgactacaacctcgacgaggccaggatggtgctcacgctcgggctcatgtgctcccacccgttcccggccgagaggcctaccatgaggcaggtcatgcagtacctcgacggcgacgcgccgctgccggagctcacgccggcgggcatcagcttgctcagcctcatgcagagccagacgtcgttcgaccagtctgctctgcagtacccgtggtcggggaccagcatgggcaccatgacgtcgggcatctccgttggaagatgacactagtgtgtaataatctgtattatatcggttgttgttggt

SEQ ID NO: 109975 - DNA, 1843 bp, Zea Mays
cttggtccccaccatcgcgaaactgaaaacgcaccacaccaccagccagccagccagcctttcctctccctctctggccattgcctcgccatcgcgtcggacgggaccgaggaggaggcctgccgtgccgtgccgcgggcgatggacccgtgcccgttcgtgcgggtgctggtcggcaacctggcgctgaagatgccagcatcggcgtcgccggcgaccccgcgcgcgtccggctccggcgtgcacccgaccgcggcgcgctgccactgccgcatccgcctcaacaagatgccctaccagacggcgtccgcgccgctgctgccggccacggaggacggcccggcgtcgtgcacggccgccttcgccgccgccttccacgtctccaaggccgacctggaccgggccgccgccaggccggccgcggcgctgctcctcgccgcgcgccgccgccgcaccgcgcgcctcaaggtggccgtgtacgccggccgcggcgggggcgtgagcgcgtcctgcggcggcggcggcgccacgtcgggtaggctgctcggcaaggtcgtcctcccgctcgacctcagggctgccatggccaagcccgtcgtattccacagcggctgggtcgccgtcggcagccgccgcggcaaggcggcggcggcggcctcctcctccgcgcgcgcgcagctcagcatcaccgtccgcgccgagcctgaccccaggttcgtgttccagttcgacggcgagcccgagtgcagcccgcaggtgctccaggtgaagggcagcatgaagcagcccatgttcacgtgcaggttctcctgccgcagcagcagcgacctgcgctcgcggtccgtgcagtctgatccgggcgcgcgcaactggctggcgaagctggggtcggagcgcgagcgcgcggggaaggagcgcaaggggtggtcggtgacggtgcacgacctgtcggggtcgccggtggcgctggcgtcgatggtgacgccgttcgtggcgtccccgggtacggaccacgtgagccggtccagcccgggcgcctggctcatcctgcgccccgcggacgggacctgggcgccgtggggccgcctcgagtgctggcgcgggcgcggcgacaccctcggctaccgcttcgagctggtgcccggccacgccacggggggcgccggcgtctgcgtcgccgaggccagcgtcccggcctcccgcggcgggcgcttcgccatcgacctcacggcggcggcgcagccgttctggtgcagcagcagcggcgacatgggccacggcatctggcccttcggcggcttcgtgatgtcggcggcggtccagggggaaggccgctgcagcaggcccaccgtggaggtgggcgtcgcgcacgtcgggtgcgccgaggacgccgcggccttcgtcgccctcgccgccgccgtcgacctcagcatggacgcgtgccgcctcttctcgtgcaagctgcgcagggagctgtcgacggcgtcccgcgccgagtttctccggtgaccgggcttctaggtgctttttagagtctagaagcggtggaactcgggtttctgtgcctactgcggaaggattctcaagcgttctctggactctggtggaggagaaagaaacaccgctgatgtgaaccatgtgatgtcttcgtgttctgctcttgttttgttccttttgcgtggagcgaaggcttctgccggagctagctgctatatggaacgaagaagaggccggcatcctaatgtccgtccaccgtccatttcccggcccagcgtctcgttctcgacgacgaagggggagggggagtcagaaaagggtatggagagacggggtggagacccac

SEQ ID NO: 109976 - DNA, 708 bp, Zea Mays
atggatccctacaaggatatcgaatcaatagacaacgagccctttgtttctccgttgcatgaagcgctgagaggcactgtagcaatgccgcccttcgtaggttcaacactgcacaaccaacctagtagtactactgtccacacaccacaagaacctacaaatttcgtctacccataccaagcggttgaaccgacatcgtcgctgccattagcctataaccatactacggccgctactagcgagaacccaatcatctccgccgccggcccatttcattccatgctctcggcaagcagctcatcaacaagcagcaaccatcagaacacactgttgtttccagagccaaatttcgtgacgacgccagtaagcgactacctcagcttatctgattccatgaggatcaggtctatggatccaccaccacccatcacactcttgctccaaggtaaccccctcgcggttctccatgcgcactttaataccgtcgatgaggtaggcgacctcggcccggtcttcgagcgacctgcgcagcagcaggtggtgcagagaatgccgccgcgcaccgcactggagaataatggtagaggaggagggcgacatgaatacgtgtgcaagatctgctccacgaggttcttctcggcgcaagcattcggcggccacatgagccaccacagcaaagtcaaggcgaaggaagctaaattcatatag

SEQ ID NO: 109977 - DNA, 2029 bp, Zea Mays
atgtcctccgatggccccacgccgtcgccaccgtcgtcgcacgctgcgagccgccgcctgtcgaccacgcacagcttcggcagccatggcaagctcctgccttctcccggacacggcgcgacggcgtcgcagatcgccgtcgcggcggccgccgcggcgctgctcctcgccgtcctcgctgcctgctgttgctgctgctgctgcaggagaaggaggaggaagggggacgcggcgcagcgtcagcatcggccgccgcctcacggcggcatgaggttctacgccgactcctccggcttcaaagggaacacctcggggtactactggccgagcggcgcgaggccgccgcagtggcagaccggcggccaggcggtcaccgcggcgatctcgaccatgcagcacggcgcggtgctcccgccgccaccgctgccgccgccgccgccgccgccgatgcccgcggacacggcgacgttcagctacgaggagctggcggcggcgacgggcgggttctcggaggcgaacctgctggggcagggcgggttcgggtacgtgcaccgcggcgtgctcccggggcccggcggccgcgtgaaggaggtggcggtgaagcagctcaaggccgggagcgggcagggcgagcgcgagttccaggcggaggtggacaccatcagccgcgtgcagcaccgccacctggtggcgctcgtcggctactgcatcgacggcgcgcgccgcctgctcgtctacgagttcgtgcccaaccagaccctcgagcatcacctccacgggaaagggctgccggtgatgggctgggcgacgcggctgcgcatcgcgctcggcgccgccaaggggctcgcctacctgcacgaggaatgcgacccacggatcatccaccgcgacatcaagtcggccaacatcctgctggacaacgacttcgaggccatggtcgccgacttcgggctggccaagctcacgaacgtgaaccacacgcacgtgtccacccgcgtcatgggcaccttcggctacctggcgccggagtacgcgtccagcggcaagctcacggagaagtcggacgtcttctcgtacggcgtcatgctgttggagctgctcaccggccgccgacccggcgaccgctcctcctacggccaggacggcctcgtcgactgggcgaggcaggccctgccgcgcgccctggccgacggcaactacgacgcgctggtagaccccaggctgcggggcgactacgacccgacggaggcggcgcgcgtcgtggccagcgccgcggcctccgtccgccacgcggcgcgccgccgccccaagatgagccagatcgtcctggcgctgcaggggggcatgccgctggaggacctcagcgacggggcgccaccgggccgcggcgcatcgttcggccccggctccggctcgctctccggctccgacgacggcgggtccgggtcgtcgtacacggcgcagatggagcggatcaggcgggccgcgcagcccagcccggattacagcaccgactaccccgtatccatcccggagttcggccacccgtcgcccgcgagcagcgccagctcagtcgagcgggatgaccggcggcatcgtggagggcgccggtgagtacgtgatcgacaggtgtaagcgtgatgtgctgacgactaattgactcctgcgcatccctgtcacgtgtgtatagcatatagtcgtcttgctgtaaaagtttatggcatactcccctgtttaaaatgtacaggttaaatttggcttacttcaacaaagattatataataaatttgacttacatctgcattagtggccggagctagctagggggttggatgatttcatggctgccacctgccgaacttaaaaataggaatagcaaggggttgccatggcatgcagatgcaggagcgcggttgtggtaaataaagcaggaaactttgtcctagctttcttgaagaaaaaccttgcttatcattaagtaattcacacgtatagaaactgtaatatgtcaaagttttggtgtttataa

SEQ ID NO: 109978 - DNA, 1032 bp, Zea Mays
tgcaaacagcgcaaacatgacaactggtttcactggtaatcaaggagttcgagcaaagatacacgatcttaggatggggagatcaagagcaaactaagtaggaagaggtagaggattaagagagggaaactctaaccctagaagtgaggaaccagcagctaccgaggaggaagacgatggcgttgggatgagaaatacgatgtggtagttgttctgttcgatttccctgttcgtgtggagtcctccttctcttgtagtaccggccagcccaacagcacaacctagtatacacaaaatctgtatcccaacgatcaagcatgagtttttcatacattacaaagcttgattttcgttcatcgtttccaacaccatcaaaggatgtctaagtcatcctttagagtattgcctgtccccgcgtcgtcctcctctaggcgtcactggcggctccccatcgaccccgtccaactccacccaccgccgccggtcttcacccccgccgtcgccggagcagctcaccggaagttcaacgagcagcgaggagggcagcggcgggactgctctctcactcatttccctcccttcttccacccactccactcctccctcttcctggaggtggtcggcgacctgatccgcccttgggaaggccggatcggcgggctgactggccggatctaggggttggtcgccgcccgccgctcctccctgctggcatgggcgggtggccttgcggccacggccgtggtggctcgcgcggctagcccgcggcggtggtgcccgcgcgctcgcgtggccgtggctggccagcggcgttggcgcccacgcacgcggtcggcccgctgcgacggcggcgtggcttgcttgtgcttgtagctggtgcctgggtcgggggcgttggccgtcggtggatctgtggctgtcagcggtgccttctgcaggtggtgggtcatggtcgtggggctgggggcggatcttgagcctctccgggtagattcatctctccgcctctcgtttcggcctgtggtgtggtgt

SEQ ID NO: 109979 - DNA, 2817 bp, Zea Mays
atgcatctggtggctggggctatcggcaacctggcccccaagctcctccggcttctgcgagacgagtacagcctgcagaagggtgtgaggaagcaagtccagttcctttcagaggagctggagagcatccacgccgccctccgcaaggtggctgctgtgccgccggaccagttggacgagcaggtcaagatctgggcgcgccaggtcagggatgcgtcctacgacatggaggacgccctcgacaccttcctggttcgcgtggagggccgccccgagcccaattgcggccatggcaggctcaagggcgccgcgaagaggatgggcaggctgttcaaaaaggctaatgcccaccgccacgtcgcaagcgtcattgccggcatcaagatgcagctgcaagaggtggccgagcggcgcgcacggtacagagtggacgaggtcgtggcgaccaggcctgctgcagcttcggcgatcgatcctcgtcttgaggccatgtacaaacaggcgacacagcttgttggcgtcgacggggccatgggtgacctggtgctattgctgtccctggaggcagaggaggcctccaactgcaagttgaaggcagtttcgattcttggagttggaggattgggcaagactactcttgccaaagcggtgtacgataacctgaaatcacagtttgattgcggggcttttgtttcggttggtcgaaatcctgacctgaagaaggtctttagggacatccttatagatcttgacaagcacaaatacacggccgaggtaaacctgtcgatattcggcgaaacacaactcatcgacgaaatccgagagctcctggagagcaagagatatttcattgttatcgatgacgtatgggaaaaacaaccctgggaaataatacaactggctttggttgagaataatagaggaagtagaataatgtcaactactcgtaactctgaggtcaccagtggtgaggtttacaggccacgaccactttcagacaagaactccaaaaggttattttacacaagaatatttggtagagacggcaaattccctggcaatcaagttgatgaggtgtctgatagaattgtacagaaatgtggtggtataccattatctatcatcacaatggctagtttattggtggacaagccaagggcagaatggtctgagttatgcagctccactggctttcgcgataaagatattgaacagtggatagctgaagatttcgttcataagaagccaggaacttggttatttgaggttggggaggggtacttcaatgaccttgtcaacagaagcatgatccaagcagtggtgtcaaaacgtgacggcatcatagatggttgtcgtatccatgacatggaaaactttgtcactgtactagacagcgagagtgatgaaggcacatcatcgatgagcagggctcgaagattggcccaccaaaggagctcgatggacgctcattgggacaatcgtcacaagggtatgcagaagatcagatcattcattgcctataggtgccacgatggtaaggagctcccgtttctgagctttaaactcttgcgcgtgctagatttagaggctgtatacatggaaagctggcacaatgctaagcatcttgggaacttacttcatttaaggtacctcaggttaaaaggcacaaatatgcccgagctcccaaaggaaataggagctctgaggtttctgcagacactagacttggtggagaatttcttcaaggaagaactgccatcgaccataggcatgctaacacagctggtatgcctacgtgtttgtgggtggactcaatgggggacgagcgtgccgagtggagtgatcgagaagctaacgtccctagaggagctgcagctgctggtacaatgcgacgtggacgagcttgacgacagcctgtttgatatgaatgaactgggcagcttgagtgaactcagggcgctcacgatcagggccattgagataaaccagagcatgttgtcagatcttctacagtccgtagcgaagctccacaaggtccagagcctaaaactcgagaaccagagccatctttggaacggcctgtacgacgcaacgttcgacgcagcggcgctaccgcgacatctcgagcacctgctcgtgtccgagaactgtttccgtttctctgagctcccctcgtgcatcgacccctcgcgccttatcagactgtcccacttggaactgtacgtgatcgacatggacgagcagggcatgcggacccttggccggttgccagagctccgtcaccttgtgctggcaacggagtccacggtaacagtgactaacattgccaccgatggctgcttccagaagttgaggtcatgcaggttcatgcactcgatggtcctgctcgcgctcaatgccgacgactgcagcgtttccttcaccctatggaacggaagggatgacgtaccgtttggctctagaggggaggaggacgagcgcagaagagcgccgccgccgcccgtcatgccgaccctcgaagagatctcgttccaggtccacgcggagtggtgcctgacgaaacgcgaagacggcagctacggcagcctcggcttggagcacatcgcttcgcttcagagagtcgttgtgaccatcgtctgtgaggggtatgtctttgagctggacctgacggagacggaggcggagctgattcacgcaatcaatgttcatcccaacaaccctactctcacttggacggttcttaacgaaggcatcattagaagctatacgaagatggagtttgaggaggttatattgggtctaggaatcacaaactaa

SEQ ID NO: 109980 - DNA, 171 bp, Zea Mays
ttacttgggtggtcagcctatgttatttttcttacaatgagtcatgacccgtaccgttccatcttttgttggaaggtttttactttggcaaataatttgatgtggctcgttatatgtaaagatggtacaattttagcttgtgcaattttttttaaaccttgttggaaggtt

SEQ ID NO: 109981 - DNA, 1951 bp, Zea Mays
atgactaggcacgacctcttcaacatcaatgctggcatcattaaggggctctacattgccatcgccaagcaccgctccaaccttaaaatggtaggggtagttactgctaaggatattctagaaggtggcaacacggtcatctttggtggggcgggacaacaacagccccgcggcgacaacgcattgggagtggcacaacgaggaggtcaagggcggcgacgacaaggtgcggagctcatgtataggcttgtgagggatttatatgcgatgcttgatgaagtaaattatgaggaagcacctcatgatttgaagaatctgatgatttcgctgctgttggatttgccgagccggagccgccggagattacctatcgacgagctgaagctgcaggcaagggccagcggcggccacggcgctaaggaccagttccccgtcggcatgcgcgtgatcgccgtcgacgacgacccgacctgcctcaagattattcctgatgttgcaacattttcatgtaggttcgaaaggaatcagaaagaaattgcaggaggtgcattttggattctgttggggcaggttcagatgcaagtgcaagtgcaggaggcagagcgatctcaaggtctgcctggcgatgctgaagccggcaaaggtggacaggatgatgctcacagtgatgttgtgttaaaggctaagagcatggctgacaaggttgagtgggcaaataagactaaagttgttattcaaagcaaagggggttctttcaagggtccaagtattgagggtggttcaatgaggcaaatcaattcggatggtgctttagtgaatatggactatggccttgatccaacaatagggaaggccataatacaggcagctgaggaggtcgcagagggaaagttagatgatcacttcccacttgttatctggcaaactggcagtggcacacaaagcaacatgaatgccaatgaggtaattgcaaatagggcatctgagatccttggacacaagggtggtcagaagtatgtgcacccaaatgaccatgtgaataggtcacaatcttcaaatgatacatttcccattatgtttattattcatggcgttgacatttccagagaaaaaggtgtacgagactccagtagcgccagctcttcctgtacaccctatgcgatgcacatagtcctctatcccagtcgggaagtcataattaattaccactctaaaaaaacacattgtgcaatacaaatgagtaacagaaatttgtcagtgttcagtaaggttctaatcattgacgatgacatgccccttgctcaatttgttgttgctttcaatggagcatcatgggtagatcctgattctgttgcactgatggttatgcaatcaatgcttggttcatggaacaagagtgctggtggaggaaagcacatgggttcagagcttgtacagaaagcagcaatcaatgacattgctgcgagtgtaatgtcattcaacatgaattacaaggacactggtctttttggtgtctatgctgttgctaaggctaattgcttggatgatttggcttttgcaattatgcatgagatgagcaaattgtcataccgggttacggaggaagatgttatccgtgcacgtaatcagctgaagtcctcaatccaactccaccttgatggttcaactgctgttgtcgaggacattggccgccagctgctgacctatggacgaagaattcctaccccagagctttttgcaagaatagatgttgttgatgcaagcactgtgaagcgtgttgcaaaccgcttcatctttgatcaggatgttgctattgttgcgatgggaccgatccaaggacttccagactacaactggttcagacgccggacctacatgctccgttactaagatcaatctgccggtgtaccatgtttacggtgtgcaaggacaaagataaaatttgcctctt

SEQ ID NO: 109982 - DNA, 1376 bp, Zea Mays
ccgccctagcgtgtggtatagcagagacaccatgagacgagacagagctggcaaacggagagggggagagagccgtgtgtgtgtgtgtcggccgaaacatcgcgatccgacgtggcccaatggcgcgtcgcggaaccttatcccgcggcgtcgcccctgatccgaactccatccgctgcccggggcgccgcgcaccacaagtaggcgcgccccggcgcgcgaccccaccgccgccccgcctcccatcgttacgttagtcgtccgcccgcgctagtgccatccacactcttctcttctccccggccggaccggagtcaggcagccgaagcaagaaaagcaagcggctttggaagttgggatccatggcgtccacctcgtgcttcctccaccagtccaccgcccgcgtggccgcgccgtcgccgcgcctcgccgccccgccgcgcagcgcgcaactgttcgtctgcaaggcccagaagcagcaggccgccgcggcggagagcgacgtgtcgcgccgcgccgcgctcgcgctcctcgccggcgtcgcggccgtcggcgccaaggcgagccccgccgccgccgcctacggggaagcagccaacgtgttcggcaagaccaagaagaacacggacttcatctcctacgtcggcgacggcttcaagctgctgatcccgtccaagtggaaccccagcaaggagcgggagttccccgggcaggtgctccgctacgaggacaacttcgacgccaacagcaacgtgtccgtcatcatccagcccacctccaagaaggccatcaccgagtacggctcccccgaggagttcctctcgcaggtcgactacctgctcggcaagcaggcctacggcggcaagaccgactccgagggcgggttcgagaccgacgccgtggccaccgccaacgtgctggagagctccacccccgtggtggacggcaagcagtactacagcatcaccgtgctgaccaggacggcggacggcgacgagggcggcaagcaccagctcatcaccgccaccgtctccgacggcaagctctacatctgcaaggcgcaggccggcgacaagcggtggttcaagggcgccaggaagggcgtcgagaaggccgccgcctccttcagcgtcgcgtgaccgacgtaaactattgtttctttgatgcttttcatcagggatgcacatgcacgcaccgtgtgtacgtagagagctaggcatggcctggctcgccatgcttgttgtgtgtttctttgattgtacatgagaggacccgtttctgctgccatccaagttgtttgagaaatcttggtactaatattgcttcgtcttttttttttaaaaaaaaaaacttcctgccatttagccagagattct

SEQ ID NO: 109983 - DNA, 357 bp, Zea Mays
tttactgcaaactacaggatatggggtgatcaaggccaggctgcactggagaaggctagcatatgcttgcttaactgtggtcctaccggaaccgaagcattgaagaatctcatgcttggaggcataggaagtgtgactgttgttgatggctccaaagttgaagcatctgacctggggaacaattttctgttggatgaaggatgtttggggcaaccaagagctaaatttatatgctctttcctacaagagcttaatgacgctgttaaggccaagtttgttgatgagtctccagcgcatttgatagatactaatccttcattcttttcccagtttactgttgttattgctacccaggtg

SEQ ID NO: 109984 - DNA, 770 bp, Zea Mays
atggagtcgatccacacggatctagcgcgcacgcaggaggaggcgctggtgaccgacctcgcgctccacctgctcgaccagatgccccgccgcttcgccgtcgccccctcatacgccggttgtagtggccgcggcgctgctggtggcgtcgctggcggcattctgcggcacggatccgctccggacgggcagcatggtggacttcccggggttcgagtcccacctcgtcgacctccctgatcccgacgagatgccgacgcacgcggacgaacgggagcagctccgcggagccgaggtgcggtttcgcggcgaggtgcaggggcccgaaagcgtcgccttcgacccgcagggctgtacacgggcgtcgtcgatggccgggtcgtctcctgggacggcgagtggtgggtcccattcgcgacggcctccccgcgctggacgcaggagctctgcggcgggcccatggcctcgccgctggagtatctccccagcgagcacatctgcagccgcccgctcgggctctgtttcaataagattggggacctgtacatcgtcgacgcctacttcggtttgctcaaagtcggccccgagggcggctggccacaccgctcgcaacggaggccgaggtcgtgcgcttcaacttcaccaacgaccccgacctcgacgacgagggaaacatctacttcactgactccagaatccactaccagagacggtctgtgatgccatgccctcgctctactctgctcctatttaatctgattgattcgact

SEQ ID NO: 109985 - DNA, 3749 bp, Zea Mays
aggaatctggacgggtttatgtcgatactaggtgctgctgctgctgctgcagagatcaggtgaaagggacaagtgttgtggctgcgcaattagtacccagagtgtgcacagccataccacctcgctgatagctactacccgcctgtgcgcacgctgcctccaatctcctccaagaaatgcgtcctcgtccttgaatcctactaaccatcaaactcccagctcccctcccagaccagtccgtggaggaaagtgagcgatggggcttcgcgcgggtttcctcctcctgccgccgccgccgctcctcctcctcctcctcctcctcctgctgctcatttcccctgcgcgtgggcagctgccctcgcaggacatcctggcgctgctggccttcaagaagggcatcacgcacgacccggcgggctacgtcaccgactcctggaacgaggagtccatcgacttcaacgggtgcccggcgtcctggaacggcgtcgtgtgcaacggcgccagcgtggccggggtcgtgctggacggccacggcatctcgggcgtcgccgacctctccgtgttcgccaacctcaccatgctcgtcaagctctctctggccggcaacaacctctcgggcggcctccccggcaacgtggccagcctcaagagcctcaagttcatggacgtctcccgcaaccgcttctcggggccggtgccggacggcatcggcaacctccggagcctgcagaacctgtcgctcgccgggaacaacttctcgggcccgctgccggagtccgtcggcgggctcatgtcgctccagtcgctcgacgtgagcggcaattctctgtctggcccgctgcctgcagggctgaaggggatgaagagcttggtcgcgctgaacgcgtcctacaatgccttcacgaagggcatcccttctgggcttgggctcctcgtgaacctgcagtccttggatctgagctggaaccagttggatggtggtgttgattggaagttcttgatcgagtccgctgtcgctcatgttgacttcagcgggaacctgctcaccagtaccacgcccaaagagctcaagtttctggccgacatttcagagacggttctgtatctcaacctgagcaacaataagctgactgggtcattgatagacggtgtcgagctctctactttcgggaggctcaaggtgcttgatctcagcaataatcagctatctggtgacctcccagggttcaattatgtttacgatcttgaagttttgcgactcgcaaacaatgcattcactggatttgtgcctagtgggcttctcaagggtgattctctggtcctaagcgagctggacctaagcgctaataacctgacagggcatatcaatatgatcacatcaactactttgcaagtccttaacctgtcctcgaatgccctttttggggatcttccattgcttgctgggagctgcactgtgttagatctttcaaacaacaagttcagaggaaatctatcagttattgccaaatgggccagcgatttggaatatgttgaccttagtcagaacaacctaaccggtccagttcctgatgcgagctcacagttccttcgcctaaactacctaaacctttcccgcaactctctatccgagaccatccctgaagctattgctcagtaccccaaacttaccgtgcttgatctgagctccaatcagttacgtggtcctatgcctgctaatttgctaacttcgtccatgctgcaagaactctacatccgagataacatgctttttggtggcctatcctttcctggttcctcatccaaaaatttgagtctccaggtgcttgatatctctgggaatcgcttcaatggaagcctccctgatgatattgcctccttatctggcctccgagttctcgacatctcaacaaacaatttctctggcccactacctgctgctgtgagtaagcttggagctctcactgatattgatatatcaacgaatcagttcacggggccattgcctgaggatcttccggataacctccaatccttcaatgcatcctataacgacctttccggtgtcgtgccagagaacctgaggaagtttccagaatcttctttccatcctgggaactcaaagttagaatatcctgctagctcgtctggatctggcagttccccatctgggtcagcaggtggaaaatcactcagtacaggtgctaaagcagcaatcgtagcagctagcattgttcttcttgtcatcctcatacttattgccattgtatgccactacaagaggatctcacggcagttttctagctctgaaaaggtttcagacaagagcctccacaggaccactaaagacagtgctgtcatgcaaggaaaggacaacaaaggtggtttggtgtcagcagatgagcttgccactcctcgaaaagggtctacatctgaagcactcagccaggaagagaagtcagccgcggggggcttctcgccgtccaagggcagccggttctcgtggtcaccggactctggagaggcatatgggcaggaagggctggcgcggctggacgtgaggtcgcctgacaggctagcgggggagctgcatttcctggacgagacgatcacgctgacgccagaggagctttcgagggcgccggctgaagtcctaggcaggagcagccacgggacttcgtaccgggcgacactggagaatggcgtgttcctgaccgtgaagtggctgagggaaggcgtcgcgaggcccaagaaggagttcgcgaaggaggccaagaagttcgcaaacatccggcatccgaacgtggttggcttgcgtgggtactactggggcccgaccccgcatgagaagctcatcttgtcggattacgtcgctccggggagtcttgcaagcttcttatacgatcgaccaggaagaagaggtcctccactgacctgggcgcagcggctgaagatcgcggtggacgtggcgcgcggcctcaactacctccacttcgaccgcgcgatgccccacgggaacctcaaggccaccaacgtcctgctggacgggctggacctgaacgcccgcgtggccgactactgcctgcaccgcctgatgacgcagtcgggcgtggcggagcagatcctggacctaggcgtgctgggctaccgcgccccggagctggccgcgtccaagaagccggcgccctcgttcaaggccgacgtgtacgccttcggcgtcgcgctgctggagctcctgacgggccggtgcgccggggacgtcgtctcggggcccgagggcgccgcaggcgtcgacctcaccgactgggtccggctgcgcgtggcggaagggcgggggtccgactgcttcgacgccgccatggcctcggactctgagagcaacccgcaggctgtgaagggcatgaaggaggccctgggcattgcgctgcggtgcatcaggccggtctccgagaggccggggatcaaatctgtgtacgaggatctttcgtcgatctagctagtcggtagcgctagcctcgtcgcgtaggcgtagcttttagattaacactgcgtgttaaaattgtgtgcgtgttcgtcttgaactcgtagaactgcgtagcgaatccaagtgttattatggcctcaccttgatgccagcaatttgaaatgaagaatgtgttgcattgttctttttgtttttttggtaattaaggccggcatccacaagtgaacgagagtataacacactcaatagcgtatgatgatgatcc

SEQ ID NO: 109986 - DNA, 1880 bp, Zea Mays
ccacactgctggcgctgcccgcctcccccctccagtccactctccactcccacactccgttaccaagctgcccgccacgcccccctcccctactcctccgccgccgcctcacagccgcagcagctagggttagggttcgttccgccgcggctgccgtcttccccagggcaggctactcccgccgggcccctcccctcccattgcattccccagttcccctgcaacccccccattaccctttctcccacccattccttccttccgcccctctccaggccgcccggactggtcgcgttgcaaggtttgtttgaaggaatctggacgggtttatgtcgatactaggtgctgctgctgctgctgcagagatcaggtgaaagggacaagtgttgtggctgcgcaattagtacccagagtgtgcacagccataccacctcgctgatagctactacccgcctgtgcgcacgctgcctccaatctcctccaagaaatgcgtcctcgtccttgaatcctactaaccatcaaactcccagctcccctcccagaccagtccgtggaggaaagtgagcgatggggcttcgcgcgggtttcctcctcctgccgccgccgccgctcctcctcctcctcctcctcctcctgctgctcatttcccctgcgcgtgggcagctgccctcgcaggacatcctggcgctgctggccttcaagaagggcatcacgcacgacccggcgggctacgtcaccgactcctggaacgaggagtccatcgacttcaacgggtgcccggcgtcctggaacggcgtcgtgtgcaacggcgccagcgtggccggggtcgtgctggacggccacggcatctcgggcgtcgccgacctctccgtgttcgccaacctcaccatgctcgtcaagctctctctggccggcaacaacctctcgggcggcctccccggcaacgtggccagcctcaagagcctcaagttcatggacgtctcccgcaaccgcttctcggggccggtgccggacggcatcggcaacctccggagcctgcagaacctgtcgctcgccgggaacaacttctcgggcccgctgccggagtccgtcggcgggctcatgtcgctccagtcgctcgacgtgagcggcaattctctgtctggcccgctgcctgcagggctgaaggggatgaagagcttggtcgcgctgaacgcgtcctacaatgccttcacgaagggcatcccttctgggcttgggctcctcgtgaacctgcagtccttggatctgagctggaaccagttggatggtggtgttgattggaagttcttgatcgagtccgctgtcgctcatgttgacttcagcgggaacctgctcaccagtaccacgcccaaagagctcaagtttctggccgacatttcagagacggttctgtatctcaacctgagcaacaataagctgactgggtcattgatagacggtgtcgagctctctactttcgggaggctcaaggtgcttgatctcagcaataatcagctatctggtgacctcccagggttcaattatgtttacgatcttgaagttttgcgactcgcaaacaatgcattcactggatttgtgcctagtgggcttctcaagggtgattctctggtcctaagcgagctggacctaagcgctaataacctgacaggtactaactctacttaacagtcctttcagctatcgtcctttttgctgaatgccatacatcatgaacacatggccgagatttgatgaatgggctgatatgcatttctgtgtttagtggagttggggtagctgatggaatcagataaaacaatgtggacaccatacaaatgtcatgttcagttaaactgccatatgaatttctattgtggtgc

SEQ ID NO: 109987 - DNA, 2402 bp, Zea Mays
gcttcgccgcggccgccgccgccgcctccgcctccgtgtcgccgccgccccgcagaaccctaaaggccgccgccaccatgcgccgcctcccgcccctcccccggcccgcggccgccgtcgcctcgacatccaccccggacatcgtcgcggagctcggccgcgtcctctccacgcgccgctggaacaagggcagcgcctacaagcggctgtccccctccgtgacggccgcgcacgtggccgacctcttccgcgccccggtgtcccctctcgacccggccaccgctctggccttcttcgagtgggtcgcgcgccgccccgggttccgccacaccgccgcctcccacgccgcgctgctccagctcctcgcccgccgccgcgcgcccgccaactacgacaagctcgtcctctccatgattagctgctccggcaccgcagaggacgtgcgcgaggccgtcgacgcaattcaggcaatccgtcgagtgggtggtaagcgactcgtgctgtccccaaagtgctacaacttggcgctcaggtcgctgctgcgattcgacatgacggagtatatggggaagctgtactcgcacctcgtgcaggaggggttgttgccagacacggtgacttacaacactatgatcatggcatactgcaagaagggtagtctcgccatagcacaccggtatttctgcttgttgagggagtctgggatgcagatggatacatacacatgtaatgcactgttgttggggtactgccgaacaagtgacttgagaaaggcttgctggctactcatgatgatgccgctgacgggttgcaggaggaacgagtactcctacaccattttgattcaggggctctgtgaagcacggtgtgtaagggaggcacttgtgcttgtgttcatgatggtacaagatgggtgctccctgaatctgcacacgtatacactcttgataaaaggtctttgtaaggagggcaggattcatgatgccagggggttgcttgatgaaatgcctttgagaggggtggtaccaagtgtttggacttataatgcaatgattgatgggtattgtaagtcaggaaggatgaaggatgcattggggattaaagcactgatggaacaaaatgggtgtaatccagatgactggacatacaacagtctgatttatggcctatgtggtgggaagctagacgaagccgaagaattgctgaatggcgctattgcaaggggcttcacacctacagttatcacattcactaacctgattaatgggtattgcaaggctgaaaggattgatgatgcactcagggtaaagagtaatatgatatcaagcaattgcaagcttgatttacaggcatatggagtgttgattaatgtcctcatcaagaagtgtagattaaaagaggctaaagagacgctgaatgagatgtttgcaaatggtttagctcctaatgttgtcatttacacttctataattgatgggtattgcaaggttgggatggttggtgctgcactagaggtcttcaaattgatggaacatgaaggctgccatccaaatgcctggacttatggttctttgatatatgggttaattcaggataaaaagcttcataaggcaatggctttaataactaaaatgcaagaggatgggataactcctggtgttatcgcttatactactctgattcaaggccagtgcaaaaaacatgaatttgataatgctttcaggttatttgaaatgatggaaaagaatggcttgacacctgatgagcaagcgtacaatgtcctaactgatgcactatgcaagtctggaagagctgaagaagcttattcatttcttgtcaggaagggagtcgtcctcacaaaggtaacatatacatctttagttgatggttttagcaaggcaggcaatactgactttgctgccgtccttatagagaagatggtcaatgagggttgtaaggcagatttgtacacatatagtgtattgttgcaggctttatgtaaacaaaaaaaactgaatgaagctttgtctatactggatcagatgaccgtaagtggagtcaagtgtaacattgttgcttatacaataattatcagtgaaatgatcaaagaagggaagcatgaccatgctaaaagcttgttcaatgaaatgatttcatcaggacataagcctagtgcaaccacatatactgtattcattagctcgtactgcaagataggtcaaatagaggaggctgagcatctaattggggaaatggaaagagacggtgtcacacctgatgtggtaacctataatatattcattaatggttgtggtcatatgggatacatggatcttccattttctactctgaagcgcatggtggatgcatcatgtacgaatcaagctgaatcttcgagtcaa

SEQ ID NO: 109988 - DNA, 1128 bp, Zea Mays
gagattatgttactcttttgcagttgcgactgagtcaccacatgcggtgtttgtctctcgatacggtcatctattcttacatttggttttgtttagaattgtaattttgtgacatcatactatctattgggtaatgactctgttctttcctgacatcttgtagataaattcaatagaattttctcctaagctatttaaaggacaactatggctacaattcaagatataggactctctgcggctatcaacataatgggtgctgtagtgttcctagttgcatttgctttccttcgactgcagccaatcaatgatagggtttacttcccaaaatggtacctcaaaggtgcaagagagagtccaagtcatgggggtacatttgtccggaagtttgtcaatttggacatgcgttcatacttgaaatttttaagttgggtgcctgctgctctcaaaatgcctgaggatgagttgattagccatgctggtctggattcagctgtgtatctgaggatttacttggtcggacttaaaatatttgctccaatctcagttctagctttcattgttcttgtccctgttaattggaccaatgatactctgcaattctcaaagttagagcacagcaatgttgataagctttcaatatcaaacataccagttggatcaaaaaggtttatagcccacttggcaatggcgtatgttttcacattttggacctgctatgtactattacgtgagtatgaagtagttgcaaagatgagactgcgatttctttcatcagagaaacgcagaccagatcagttcacggtccttgtgcggaatataccgcctgatccagatgaatcaattagtgagcttgtggaacatttctttcttgtgaatcatcctggtcactatctgacacatcaggtggtttacaatgcaaataaacttgctaaattggtgaaagagaaagcaaagatgcataattggcttgactactatcagctgagatttgaaaggaatgcatctaaacggcctactactaagactggttttcttggttgttttggtacgaaggtggatgccattgaatactacacatcagaaattgagaggatagaaagtgaagtgagttaatttactgctcag

SEQ ID NO: 109989 - DNA, 1865 bp, Zea Mays
tttgtttacttatgtatgctgcataaaaccaaacattgataggacagtaataaatttgtctttcacaatattacatttccttttgttttcaaacaaagaatacctatcatgaattatcagatttaaaccctcatctaaatgatattcaggaagcagaagagcgtgaaaaaattgtaaaggatcccaaatccattgtaccagcagcatttgtttccttccgatcacgttggggtgcagcagtttgtgctcagacacagcaaaccagtaacccaactgtttggttgacagaatgggctccagaacctcgtgatgtgtactgggataatttgtctattccatttgtctcccttacagttcgaaggctgataattgcagtggcattcttcttcctgaacttcttttatgtgttcccaatagcatttgttcagtctcttgcaaatcttgaagggattgagaaggcagcgccgtttctgaagcctctgattgaagagcatactattaaatcattcatccaaggtttccttccgggaattgctctgaagatcttccttatattgctcccaagcatattaatgtttatgtctaaggttgaaggattgacctcaatatcttcactggagagaagatctgcatcaaagtattatattttcatattcttcaatgtatttctggcaagcattattgcaggatctgctttagagcagctaaaaagctatattcatcagtcagcaaatgaaataccaaggacgattggtgaagcaattccaatgaaggcaaccttttttataacatatacaatggttgatggttgggctggggtagctggtgagatattgagattgaagccactagtgatcttccacctgaaaaactttttcttggtcaagactgagaaagacagggaagaggcaatggaccctggaagtattggttttgactcaagcgaacctcaaattcagctgtatttcttacttggtcttgtctatgcggcagtgacaccatttttgctcccttttgtattgatattctttgggtttgcgtacgttgtataccgccaccagataataaatgtgtataatcaagaatacgagagtgcagcagcattttggccaagtgttcatggacgcataatcacagcgttgattgtatcacagctgcttctccttgggttacttagcacaaaaggcgctggccagtcaacacctgtgctccttgttcttcctgtagtgaccttctatttccacaagtactgcaacaaccgctacaagccgacttttgtgaaatgcccattgcaggaggcgatgaagaaggataccctggaacgtgccagagagccaggatttgacctcaaaggatacctaatgaatgcctacatccacccggtgttcaaaggtgatggggacgacgacaagttctcagtcgttgatcaaccagaagccgagcaagtcctggtggcaaccaagcggcagtccaggcggaacacccccgtgcccagtaaatacaatgggtcggaatcaccttcgcttcctgaaattgtaaatgaccaacggctataaagatgtctacagttttcctatgtatattaaggatacaataatgctttcgaatgcctccagttaatactagtaaaagcagtgatggccaatatattcatgcgtgtggttctttgtcctcttgtgccaattgtcttggattatttctttcgcacttgcgatatatggtcatgcagaatactgttttgcacggtagactgtattgtttatatattgaactaggaacatgtctatgtgttgctacgaaatcaatatgataaaaaatatttatataaaaaaaatagtaatagagatactgctgcgatagtgaaa

SEQ ID NO: 109990 - DNA, 93 bp, Zea Mays
aaaaacgcagtaaattcaatgcgattcgaggaatcgacctcaagatctcaccaagagcagtctaagtctttaaccactacgatacaaagtcgg

SEQ ID NO: 109991 - DNA, 1059 bp, Zea Mays
ccatgagtatccgggacaggtgccaatagctgaaatctctccacggatcgattctcctccctgccgcgcatgcgcgtcaatggcgccgccagtcgccggcgtcgtgcgtcttgccgcggcctcccgcgtattagttctgtccctctacctgctcgcccgcctcctcttgcgcccctacgacacctccgctactctccacccaccctgcctctcctctttctcctcttccccggatcccaacacgcccgtctccgccgctatctcgtcgctggccgtgtgggacggtgtccacttcgcccgccccgctgagtgcggctacgagtacgagcagtccttcgccttcctcccactcctccccgcctccctcgtgctcctcgcacgatctgttcgcgccgctagtaccgatactagggtacagggccgtgctcgtgctctccggctatgtcctcaacaacgtcgcattcgttgctgctgcggcctacttctacagattgtctgtgctgattttgaaggaccagaaagctgcttaccgagcatctgttctgttttgtttcaaccctgcttctgtgttctactcatcattgtattcagaaagtctttatgcacttttttctcttaggggcatcttctacgtgttttccggccttgctacaagcatatgatgctactgtacaaaagaaaaggcccttgttggcaattcaggcccttgtggctggagctttgcgctccattttcatatttctacctttctttgctttccaagcatatggatatttgaacatatgtgtacatgggagctcagacgaattgaggccatggtgcaaagcaaaagttcccctattgtatggcttcatccaaagccactactggtaagtgtttctatatgaaaatagttagaattagaattggcatgataatgtgtcaaaactagcacctcttcatcctttttgcttacctctggaattatacgagggtagtcttgccttactgtatgattaaggctatctgcacttatactactctaaatttctaccctaaaaggaatattctatcctggtc

SEQ ID NO: 109992 - DNA, 1976 bp, Zea Mays
ccatgagtatccgggacaggtgccaatagctgaaatctctccacggatcgattctcctccctgccgcgcatgcgcgtcaatggcgccgccagtcgccggcgtcgtgcgtcttgccgcggcctcccgcgtattagttctgtccctctacctgctcgcccgcctcctcttgcgcccctacgacacctccgctactctccacccaccctgcctctcctctttctcctcttccccggatcccaacacgcccgtctccgccgctatctcgtcgctggccgtgtgggacggtgtccacttcgcccgccccgctgagtgcggctacgagtacgagcagtccttcgccttcctcccactcctccccgcctccctcgtgctcctcgcacgatcgttgttcgcgccgctagtaccgatactagggtacagggccgtgctcgtgctctccggctatgtcctcaacaacgtcgcattcgttgctgctgcggcctacttctacagattgtctgtgctgattttgaaggaccagaaagctgcttaccgagcatctgttctgttttgtttcaaccctgcttctgtgttctactcatcattgtattcagaaagtctttatgcacttttttctcttaggggcatcttctacgtgttttccggtgctaatactgttgcagtgataatgctcgctctgtctggttcagctaggtcaaatggagcacttaatgctggctatttctgttttcaggccttgctacaagcatatgatgctactgtacaaaagaaaaggcccttgttggcaattcaggcccttgtggctggagctttgcgctccattttcatatttctacctttctttgctttccaagcatatggatatttgaacatatgtgtacatgggagctcagacgaattgaggccatggtgcaaagcaaaagttcccctattgtatggcttcatccaaagccactactggggagttggtttcttgaggtacttccaagtgaagcagctgccgaactttctcttggcctcaccagtgctttctctcgcggtttattctattgtccattacgcaaaactgcttcaccggtgtttccagagaactagcgtccacaagcagattatcactgctctagagaaaaggccagttgtgtcgtatagaagatcagatgacgcgacaattttgagtgaacctcctgctggactcaccaagaaagcacaagggagctctaaggctaaacagagaaaaccagttgctaccgagatagctcctgcgacattccatgacagtaccacgccagctaaccaaaacatcgaagaggatcaggacgcgtgctccatactactactcccattcgttctgcatctgggccttcatggcattcacagccttgttcgtgatgcacgtccaggtgtccacacggttcctatccgctagccccgcggtttactgggctgccgcgcacgttctggcttctccgagccgcgccaacagacgatggggctacctgatctgtgtctatttcatcgcgtacattcttctaggtagcctgctcttctccaacttctaccctttcacgtaacgtaagaacggcggagtgggggggtgtccccggatgcgttatccagtagcgagccactcccgcagtggatggctcatctgtttatcaggtggattatctcgaccagctttgcctgaaggtttccctaggttggtaggtgcttcactggttcagtaattgagcgttggctactcgaatcgcttggaatctgcttgcattcggttatgatgtggccacgagctttttcatatgttttcttagaatcagaagttggagagcagaagacataataacatcagtcccaactcccaactcggaagatcacaaacttgttcttctcagagcaacatgtatgcaaacatcttgggggggtcgatcttctccaattattcaaatgccactatctatctccatttgacgaaataa

SEQ ID NO: 109993 - DNA, 2130 bp, Zea Mays
gggacaggtgccaatagctgaaatctctccacggatcgattctcctccctgccgcgcatgcgcgtcaatggcgccgccagtcgccggcgtcgtgcgtcttgccgcggcctcccgcgtattagttctgtccctctacctgctcgcccgcctcctcttgcgcccctacgacacctccgctactctccacccaccctgcctctcctctttctcctcttccccggatcccaacacgcccgtctccgccgctatctcgtcgctggccgtgtgggacggtgtccacttcgcccgccccgctgagtgcggctacgagtacgagcagtccttcgccttcctcccactcctccccgcctccctcgtgctcctcgcacgatcgttgttcgcgccgctagtaccgatactagggtacagggccgtgctcgtgctctccggctatgtcctcaacaacgtcgcattcgttgctgctgcggcctacttctacagtcatttgtagccatttattgattcttcaaacatttcaagactggacaatgcttgagagcagtgcacactggaatgcagtagctgttttccctgcactttattggcgatgccacgccagagtttttgcacagttcaatagctggtgttctttggtggataatattagattgtctgtgctgattttgaaggaccagaaagctgcttaccgagcatctgttctgttttgtttcaaccctgcttctgtgttctactcatcattgtattcagaaagtctttatgcacttttttctcttaggggcatcttctacgtgttttccggtgctaatactgttgcagtgataatgctcgctctgtctggttcagctaggtcaaatggagcacttaatgctggctatttctgttttcaggccttgctacaagcatatgatgctactgtacaaaagaaaaggcccttgttggcaattcaggcccttgtggctggagctttgcgctccattttcatatttctacctttctttgctttccaagcatatggatatttgaacatatgtgtacatgggagctcagacgaattgaggccatggtgcaaagcaaaagttcccctattgtatggcttcatccaaagccactactggggagttggtttcttgaggtacttccaagtgaagcagctgccgaactttctcttggcctcaccagtgctttctctcgcggtttattctattgtccattacgcaaaactgcttcaccggtgtttccagagaactagcgtccacaagcagattatcactgctctagagaaaaggccagttgtgtcgtatagaagatcagatgacgcgacaattttgagtgaacctcctgctggactcaccaagaaagcacaagggagctctaaggctaaacagagaaaaccagttgctaccgagatagctcctgcgacattccatgacagtaccacgccagctaaccaaaacatcgaagaggatcaggacgcgtgctccatactactactcccattcgttctgcatctgggccttcatggcattcacagccttgttcgtgatgcacgtccaggtgtccacacggttcctatccgctagccccgcggtttactgggctgccgcgcacgttctggcttctccgagccgcgccaacagacgatggggctacctgatctgtgtctatttcatcgcgtacattcttctaggtagcctgctcttctccaacttctaccctttcacgtaacgtaagaacggcggagtgggggggtgtccccggatgcgttatccagtagcgagccactcccgcagtggatggctcatctgtttatcaggtggattatctcgaccagctttgcctgaaggtttccctaggttggtaggtgcttcactggttcagtaattgagcgttggctactcgaatcgcttggaatctgcttgcattcggttatgatgtggccacgagctttttcatatgttttcttagaatcagaagttggagagcagaagacataataacatcagtcccaactcccaactcggaagatcacaaacttgttcttctcagagcaacatgtatgcaaacatcttgggggggtcgatcttctccaattattcaaatgccactatctatctccatttgacgaaataa

SEQ ID NO: 109994 - DNA, 111 bp, Zea Mays
ctccctaactttgcagtcgccggtgaggttccccgctgcaccatttttctactgtatatctaaccctatatcggtagcgttctctttacagtttcccactgcggctagcct

SEQ ID NO: 109995 - DNA, 2995 bp, Zea Mays
caaaagccaataagtccagcaatttggctcacatgatgcatccaccatgcgcttcagagtagaaaatgcacgatccatgtatcccatatgaccacaaccattaatgaatatatgataggttaccacatcaggtgtgacaccgtctctttccatttccccaattagatgctcagcctcctctatttgacctatcttgcagtacgagctaatgaatacagtatatgtggttgcactaggcttatgtcctgatgaaatcatttcattgaacaagcttttagcatggtcatgcttcccttctttgatcatttcactgataattattgtataagcaacaatgttacacttgactccacttacggtcatctgatccagtatagacaaagcttcattcagttttttttgtttacataaagcctgcaacaatacactatatgtgtacaaatctgccttacaaccctcattgaccatcttctctataaggacggcagcaaagtcagtattgcctgccttgctaaaaccatcaactaaagatgtatatgttacctttgtgaggacgactcccttcctgacaagaaatgaataagcttcttcagctcttccagacttgcatagtgcatcagttaggacattgtacgcttgctcatcaggtgtcaagccattcttttccatcatttcaaataacctgaaagcattatcaaattcatgttttttgcactggccttgaatcagagtagtataagcgataacaccaggagttatcccatcctcttgcattttagttattaaagccattgccttatgaagctttttatcctgaattaacccatatatcaaagaaccataagtccaggcatttggatggcagccttcatgttccatcaatttgaagacctctagtgcagcaccaaccatcccaaccttgcaatacccatcaattatagaagtgtaaatgacaacattaggagctaaaccatttgcaaacatctcattcagcgtctctttagcctcttttaatctacacttcttgatgaggacattaatcaacactccatatgcctgtaaatcaagcttgcaattgcttgatatcatattactctttaccctgagtgcatcatcaatcctttcagccttgcaatacccattaatcaggttagtgaatgtgataactgtaggtgtgaagccccttgcaatagcgccattcagcaattcttcggcttcgtctagcttcccaccacataggccataaatcagactgttgtatgtccagtcatctggattacacccattttgttccatcagtgctttaatccccaatgcatccttcatccttcctgacttacaatacccatcaatcattgcattataagtccaaacacttggtaccacccctctcaaaggcatttcatcaagcaaccccctggcatcatgaatcctgccctccttacaaagaccttttatcaagagtgtatacatgtgcagattcagggagcacccatcttgtaccatcatgaacacaagcacaagtgcctcccttacacaccgtgcttcatagagcccctgaatcaaaatggtgtaggagtactcgttcctcctgcaacccatcagcggcatcatcatgagtagccagcaagcctttctcaagtcacttgttcggcagtaccccaacaacagtgcattacatgtgtatgtatccatctgcatcccagactccctcaacaagcagaaataccggtgtgctatggcgagactacccttcttgcagtatgccatgatcatagtgttgtaagtcaccgtgtctggcaacaatccctcctgcacgaggtgcgagtacagcttccccatatactccgtcatgtcgaatcgcagcagcgacctgagcgccaagttgtagcactttggggacagcacgagtcgcttaccacccactcgacggattgcctgaattgcgtcgacggcctcgcgcacgtcctctgcggtgccggagcagctaatcatggagaggacgagcttgtcgtagttggcgggcgcgcggcggcgggcgaggagctggagcagcgcggcgtgggaggcggcggtgtggcggaacccggggcggcgcgcgacccactcgaagaaggccagagcggtggccgggtcgagaggggacaccggggcgcggaagaggtcggccacgtgcgcggccgtcacggagggggacagccgcttgtaggcgctgcccttgttccagcggcgcgtggagaggacgcggccgagctccgcgacgatgtccggggtggatgtcgaggcgacggcggccgcgggccgggggagggtcgggaggcggcgcatggtggcggcggcctttagggttctgcggggcggcggcgacacggaggcggaggcggcggcggcggccgcggcgaagcggaacgaaatgcccgactctaattccgctcacagctgctaccgttggatgcgatataaatgtcccaggtttaaaatatgcgtaccctttaagcacaaggatacgttgccaaaaagtatgctcaatcccgtcgactcgtaggattcggtctggcagccggcgaccggcggccctccctccctcacgcagcacgctgcgccgtcgcctccaccccaccctcctctcgcctgccgtcctcccctgccgctgcggcgccgtcgtcgcctcttcctgcaacgccgggaatcgatctgttgcggccgcttccctgacgtcgagaggaggacggctgcgccatcttctccaccacaccgcgcccgtcttcaccttcgcgttcacgcaatgaggatgcccagcggcgggccggtgtggatctgaggccaccaccgcctaagcatcgcccgatcctgtttgtaccctgtcaacggccactagcccaccaccgttatagacccgctcggtttgatcctggccttatcaaaaaaaaagcaacgctagttgccctgtcactgcaaattcacattatgttatgttctacaatttatactgctt

SEQ ID NO: 109996 - DNA, 429 bp, Zea Mays
atgggcatcggcgtcgccatcccactgcgctggcggctgtttattgaagagatagaattaggaggctttggtgctgatcgaaatgcatctaagggaaagtttgatccatctaaggctttggtgctgatcaatttgatgaaatgtatgtctgttcctattgctaactgttttcaatggccaggatcctgcaatcagaatggtggcaagtggataattagattcaaaaggcacttttcagttctaacttcctacttatggatagctgatgtcacatttcatagaattgtcccggtgaactataggaaccttgcttttgtattgttcccttcaatcatgtccaaggtcaagaaccattcaggtcataaacccctacgacaggggccacgagggctcatcttcgccactgcccctactctcaccttctggtaa

SEQ ID NO: 109997 - DNA, 366 bp, Zea Mays
atggattatggaattctggctaagtttgctgcaacccatgttgatatcaaccaatattctaggcgttggatgttggagaggaaactagcagatgcagatgtatctgaagaagaacaaaacaatatactgaaagatttagaaaaaaaggaggcggaatacatgcgcctacgaaggcataaaatgggcgttgatgactttgaattgttcaccattattgggagaggtgcatttggggaggtgagactttatagagaaaaagctacatccaatgtgtatgcaatgaaaaagcttaagaagtccgaaatgttacgaagagggcaggtattccatgatgtttactcctgccaggagactatgtatccctcc

SEQ ID NO: 109998 - DNA, 198 bp, Zea Mays
tttgagtttatgtgacttattttataaaacttgggctcacaaactttctcttatttcgtctctgtatggtggaattatgtcattttataatctctattcgttcagtcagtcgttgtgaactctcttctaatcgctcacttcattgaccgtgttgtaccaagacatattacatggagtaaacaataacatcagttagcc

SEQ ID NO: 109999 - DNA, 369 bp, Zea Mays
atgaacagcttgaattcgttcccaccattcatctcgggcgtgtacgcgcgcaacagggacaaacccagcttcgagccgtcggcagggcaccacctgttcgacggcgacgggacggtgcgcgcggtgcgcatccgcaacggcgcggccgaatcgtacgcgtgccggttcaccgagacggccaagctccggatcgcgtgtttggcgctgttctacgcccgcgagctgtgcgggctcgtcgacccgtcccgtggcacgggggtcgccaacgccggccttgtctacttcaacggccgtctcctggccatgtccgagcaagccctgattgccgctgtcggctctccacttctccagttctgggtgaagaagtaa

SEQ ID NO: 110000 - DNA, 1568 bp, Zea Mays
ctagatccgctttggtctctggaatctggaagtcaccggatccacaactcgcccctctggccgcctccgtcctccgccttatcggccgccgcctcctccttcgtcagtcgcatgtctctcgaggacgagaagcctttcttcgtcgtcgctgtcgtccccaactgggtgatgctagagcgcgtcgtcttccgcagggacgacgagtccttctcggacggaagcgaggccatcgtggcgaccgaccggcatcgcgtcctgtttcgcgtcggcaccatgatgttcgcaagtctggttcaggaattcttcatctacagcacctcaggtgccgacacttcctcttcgctgactgcgctcccgccttgtgccgagcctgacatggattgtagccgccgtgagggccgcctacctcgtaaacgtgcttctcggggatgacgcctactggcggtcaggtccatgggcctcctgtgccgaggcgaagaagagttcgcggtggtagagctgtaggtttacaagcacaactgctacatggcctttgctgacatctacttgttcctgaaatcagctggcaaatgagactccatgcgtttgcccatcctctgcagcaccgaccccaatgtgatctggcaactttgcttatggcagaccgacacggttatcctggtcgaccgctggctttgctgggttgactatgagcgaggcatccttttctacgatatgtttggggagcccagccctactgttatcttcagccagttccctctggacaagttccctgacaacaacactcgcaacaaggactgctgctggttgtaccgcagcatgtcgaccacccgtgaggggggtgcgctcctgttcaccaacggctggtgctggcttcactatcaggtgccactccctcatgttatgcaacatcacggagccgaacacggttgggtgtgtatgggaagaggactacacggtcacctccgatgagctttggtctgccaaccctgagtgcctaccgcatgacattctcatgttcccccaagctgacatggacaggccacatgtagtgcactttgtcatcagcgagttcggatacgtgagaaagaatatgtagctggtcaccattgacatgagcaccaggagagtggagtcattttctcagtataccaatgggaggcagtatgccattggaaccgagggcgcttacttgaccaaaataaggtccggctgtcccatgtccttcctcccctctgagttctccaagtacctctgttaggttggtgcacaagttgtgtactcgaaatatgcaggcacagaattgaaattcaatgacgccgaccatctcattttgaaataagatgacataattggtattcttgacagtgatgatgtgaaggatatgaaaccaccgaatgatcgcattctgattaaggttgctgctggtggtttgctattgacgcaggcaactaaggagaaaccttctgttggatcagtgagtattttaggtttagtatatgctggatttgcagtaatttattcgattatctgtttattatgaaaaactcggtcggggagggaaagag

SEQ ID NO: 110001 - DNA, 548 bp, Zea Mays
tttcttcatatgcatttggactttggagatcattaccagtgcctgcttttggcaattctttcctaagtaaatatggcacaactactttctcttatttgtagaagcaagcttgatttgaacatcatctgtctagatcatttttgtcgcactatttgcctattgcaggaagacttcatcggacttgttaattatgtttatgtcttcctggccaaccattttgctttcttgtaaatatcagatggttccacaagaaaggcttttgtcgtgttggtcaggaaaattgggtgagctatttactaagttgtggcctaggaaagatcttatgttcttactaatatgatgtacgaacgctggataagttgtgtaagttggtggtgtgctcagtaggttggtagaaaaggttgtggtgtgttggacttttaagcagagtctcaaattatgttatttgagcatgtgtcacttggtccttgaacttgcctgtgatgtaccaagtttgcatgtgaaatttaatctctaaagagatgaaactgtgcactgccggatgaaaa

SEQ ID NO: 110002 - DNA, 375 bp, Zea Mays
atgggagcttcggatcgcgcgcgcaccgagacgcgcgccttcctcatgctggcctcctgctgctgcgctagctgccttgctgttgtcgacggatccgccgggtccgggctgtcgccgcgctccgccgcctgttgctgttggtcctgccgcctgcctgcggacgacgacggccgcgggctgcccacctccgtggacgagtttgacgtctcctcggcagccgccgctggtcctaggccgaggaactgtctcggcgatggcatgacagcagcggcgtcggtcaccggcagtgtctgggccactgcaggaggcatcatcggctggccgtcggcccgcgcctgcatgagcgccacgagatgcatctggagcgcctggtag

SEQ ID NO: 110003 - DNA, 855 bp, Zea Mays
atggcttccgacgccccggcggagcaaccggcgacgcagcagaagcccaccagggtctcgctgtcctatgaggagatctccaagctcttctccctccccatcgctgaggcggcctccatcctcggagtctgcaccagtgtcttgaagaggatctgccgcacccacgggattgttaggtggccatatcgtaagcttgtttctgggaaagctggggatgacacaaaaggtcctgatagcgacaaagccaacgaactccttgaggtatcaaaaatcgcgaaacaaaaggctcccagtgcatcaggcccatcagtagtgtcatcaagcacttcccaaggagcggcaaagtctcaacagggcaattctaaggcaggacagttttcagtttcgccaccaacaggtaaacataacgcatcactaagtttgacccatagccaagccaaggccatcccttgctatatggatgatttcaagtacggattcccgtcatctggcttgtcttgtgaaactatgaaatggtggggcacaagcagcgacacagactatgtgcctaccaaagatggaagccatgaaccccatgaatcaacaacacatgagccatcaaagggcatgactgatgatgacgagttggactggggagcagatgaagcggaagctgaagctgatggcactgttacggcagaggcatcggcacagctgtgctcgctgagaaggaaagcagtagatgacgggcgcaaactattgaatggtcacaaccgcaggggccaagaattctctaggctgaacaaaaggcagaagacagcgctagcccaggtatttggggcttcactgccagaatgttgtattactcgtgtctag

SEQ ID NO: 110004 - DNA, 900 bp, Zea Mays
ccagtgagtgttgttcccttccctttataaaccagagaacctgcagtgcagtgcaggcagagtactccgtctgatctcggtgatctgtctccacgacaaggagtgcactgtcagctctagcttgctgcagaacaagggcaagatggcaagaggtggtcggctactgatcctctccctggggcttgtgctcctctacttcgtctcaggtatacctttttcctatgctcttctccttgttccatttcattcttaagattgccgtgctgtgtgtcaactgttgttgattggaacaagaagaagaaggaatgaaagctgttttgtaggaagtgttgctgctgctgctgcacagaaaacgtggtgcgttgccaagccgtcggcgtccaacgatatcctgtctctgaacctcaactacgcgtgctcccaggtgagctgcggcgtgatccagaagggcgggccgtgctactacccggacaacctggtgtcgcgcgccgccgtcgccatgaacctctactatgccgccaatggcaggcacccctggaactgctacttcaacaactcggcgctcgtggtgcagtccgatcccagctatggatcctgcacctactactgatgtctgtctgatgctcttttgtagcagagatcggtcgatgaaaggaaatataatccctgtgtatgctgtgctgtgttgtgtctagagatgacaatagggacctgattcccccgtggggaatttcctattgctatccctagttgcgtcctagtagaagtgtctcttgttccatccagttgatatgcatgataacatttggagatgcatgcatgtgattttgtattcgaggatatggtgtgatcgcaaatgaacaaagtgatgcaaggcagcaatcattcataaatttgtca

SEQ ID NO: 110005 - DNA, 824 bp, Zea Mays
ccagtgagtgttgttcccttccctttataaaccagagaacctgcagtgcagtgcaggcagagtactccgtctgatctcggtgatctgtctccacgacaaggagtgcactgtcagctctagcttgctgcagaacaagggcaagatggcaagaggtggtcggctactgatcctctccctggggcttgtgctcctctacttcgtctcaggaagtgttgctgctgctgctgcacagaaaacgtggtgcgttgccaagccgtcggcgtccaacgatatcctgtctctgaacctcaactacgcgtgctcccaggtgagctgcggcgtgatccagaagggcgggccgtgctactacccggacaacctggtgtcgcgcgccgccgtcgccatgaacctctactatgccgccaatggcaggcacccctggaactgctacttcaacaactcggcgctcgtggtgcagtccgatcccagctatggatcctgcacctactactgatgtctgtctgatgctcttttgtagcagagatcggtcgatgaaaggaaatataatccctgtgtatgctgtgctgtgttgtgtctagagatgacaatagggacctgattcccccgtggggaatttcctattgctatccctagttgcgtcctagtagaagtgtctcttgttccatccagttgatatgcatgataacatttggagatgcatgcatgtgattttgtattcgaggatatggtgtgatcgcaaatgaacaaagtgatgcaaggcagcaatcattcataaatttgtcattctcagattaatcatgagcaaataaagccgagtaagtgtc

SEQ ID NO: 110006 - DNA, 861 bp, Zea Mays
cacgctctacgctctgctctgctcctgcgtgcgtggtctctttcctcccctcttcatccagatccggacccgaccgccgatccatccaaatcacccttccccttccccttctcttccaccaccaccaccaccaggccgccgcctcgtcgtcctcaattctcctttcgaatttagaatccccgtgctgagagttgagtgccgccttggttgctccgtactggactcgattcctcatcgcagcagaagcatcccgtcccctccgcttctccttgctctgctctgacaaaaaaatagcatcatgtcggaggtgaaggactccaatgtgcctgctgcacttgatggaaatcctcaacctatggaccaaactgaagacaattctatgccctcagcacagcaacaggaagaagcaatcaagaagaagtttggaggactaatgcccaaaaagcccccactcatctcaaaggatcatgagcgggcctactttgattctgctgactgggctctagggaagcaaggtgttgccaaaccaaaaggaccgctggaggcacttaggcccaagcttcagccaacacgccaacaacagcaacaacgtgcaaggcgccctatttacacttcgtcagaaaacgaggacggagacggggctggtgctgaggatatgaacatcaattgaagtggactagtggagtggaatgcctgctcagattggttgatgagcaagtcgtcactatatgtcaagtgttgtagtttgctttgcaattattggaggaattaaatgatcgtctgctgggttcatgagtcgaacatttgatatatatggcctattatttactaatatatatttttattatctgtggataaaca

SEQ ID NO: 110007 - DNA, 872 bp, Zea Mays
cacgctctacgctctgctctgctcctgcgtgcgtggtctctttcctcccctcttcatccagatccggacccgaccgccgatccatccaaatcacccttccccttccccttctcttccaccaccaccaccaccaggccgccgcctcgtcgtcctcaattctcctttcgaatttagaatccccgtgctgagagttgagtgccgccttggttgctccgtactggactcgattcctcatcgcagcagaagcatcccgtcccctccgcttctccttgctctgctctgctaacaaacagacaaaaaaatagcatcatgtcggaggtgaaggactccaatgtgcctgctgcacttgatggaaatcctcaacctatggaccaaactgaagacaattctatgccctcagcacagcaacaggaagaagcaatcaagaagaagtttggaggactaatgcccaaaaagcccccactcatctcaaaggatcatgagcgggcctactttgattctgctgactgggctctagggaagcaaggtgttgccaaaccaaaaggaccgctggaggcacttaggcccaagcttcagccaacacgccaacaacagcaacaacgtgcaaggcgccctatttacacttcgtcagaaaacgaggacggagacggggctggtgctgaggatatgaacatcaattgaagtggactagtggagtggaatgcctgctcagattggttgatgagcaagtcgtcactatatgtcaagtgttgtagtttgctttgcaattattggaggaattaaatgatcgtctgctgggttcatgagtcgaacatttgatatatatggcctattatttactaatatatatttttattatctgtggataaaca

SEQ ID NO: 110008 - DNA, 1744 bp, Zea Mays
  misc_feature (1184)..(1283): n is a, c, g, or t
cacgctctacgctctgctctgctcctgcgtgcgtggtctctttcctcccctcttcatccagatccggacccgaccgccgatccatccaaatcacccttccccttccccttctcttccaccaccaccaccaccaggccgccgcctcgtcgtcctcaattctcctttcgaatttagaatccccgtgctgagagttgagtgccgccttggttgctccgtactggactcgattcctcatcgcagcagaagcatcccgtcccctccgcttctccttgctctgctctgacaaaaaaatagcatcatgtcggaggtgaaggactccaatgtgcctgctgcacttgatggaaatcctcaacctatggaccaaactgaagacaattctatgccctcagcacagcaacaggaagaagcaatcaagaagaagtttggaggactaatgcccaaaaagcccccactcatctcaaaggatcatgagcgggcctactttgattctgctgactgggctctagggaagcaaggtgttgccaaaccaaaaggaccgctggaggcacttaggcccaagcttcaggtaccactctgctagttatatgtgatgtacccatggtctcttattttattttgctttctctctttctggtttattgtttcagccaacacgccaacaacagcaacaacgtgcaaggcgccctatttacacttcgtcagaaaacgagggtatgtacttttatttggctttttggttatggtccttgtgcacatgaaaagcagagctaagcttatgtaagcggtggttagttctctacttctttgtatgtatggtcctcggagtttgtttgtttgttatataaaaaataaagtcttccaatgttaaaaaataaagaaagaaagaaaggttctctgtatcctttttaacataatagtgactgcagacggagacggggctggtgctgaggatatgaacatcaattgaagtggactagtggagtggaatgcctgctcagattggttgatgagcaagtcgtcactatatgtcaagtgttgtagtttgctttgcaattattggaggaattaaatgatcgtctgctgggttcatgagtcgaacatttgatatatatggcctattatttactaatatatatttttattatctgtggataaacatttgatatgcatgaggtggccgagcnnnnnnnnnnnnnnnnnnnnnnnnnnnnnnnnnnnnnnnnnnnnnnnnnnnnnnnnnnnnnnnnnnnnnnnnnnnnnnnnnnnnnnnnnnnnnnnnnnnnaagcttatgtaagcggtggttagttctctacttctttgtatgtatggtcctcggagtttgtttgtttgttatataaaaaataaagtcttccaatgttaaaaaataaagaaagaaagaaaggttctctgtatcctttttaacataatagtgactgcagacggagacggggctggtgctgaggatatgaacatcaattgaagtggactagtggagtggaatgcctgctcagattggttgatgagcaagtcgtcactatatgtcaagtgttgtagtttgctttgcaattattggaggaattaaatgatcgtctgctgggttcatgagtcgaacatttgatatatatggcctattatttactaatatatatttttattatctgtggataaacatttgatatgcatgaggtggccgagctgtgagtgaccgcttggtcaggttgccgtgctcagtggattttacaa

SEQ ID NO: 110009 - DNA, 1442 bp, Zea Mays
caattggatgggtccccttgtttaatttaacctatgtaggcatgcgtgcacatccatatggatcggattggatccccttgttttagctaaccaaactctttctgcctctcccttttccacattcagcaaaaacaggcaacttcacatgcatgttccaagtcgaagccatgtcatactggccggtttcctttactacttgttactctgttccttctctcgatcgtactaactgatgagtgaacacagtcacggacccagggcagtcgagaatatatattgtgtataatttggtactacatatatctaattttcgtccgttcggtacatcatcggaacattattagaaaataatcaaaatgtctcataataggattgtaagctgcatagatctgtttctatggatctaaacactcaaatgtagtatgtttttagactaaattttagggtagtcggaggcctatccatataccctttgggtccgccactggagtgaacatcacacacacagctccttcagacatccatcacatggccatggctttcttaatgatgataaccaatgcagcacacaacctgagtcctgagggtggggggtagaccaaataaatcatacatgatctgtttcttcactactcccgggaaaaaagaaaaagtcatcacaccaaaattcagaaacagcaagcaaaaacattatcagctactgctactggtgatggtggagtaatttgttcagcacctaaagaacacgaacatattagtctgcctttttacccatgatgatgcatgcctttttacatctgaacgctgacattggcttttcttgtttcccatctgactaatatacagctaacaaacagacaaaaaaatagcatcatgtcggaggtgaaggactccaatgtgcctgctgcacttgatggaaatcctcaacctatggaccaaactgaagacaattctatgccctcagcacagcaacaggaagaagcaatcaagaagaagtttggaggactaatgcccaaaaagcccccactcatctcaaaggatcatgagcgggcctactttgattctgctgactgggctctagggaagcaaggtgttgccaaaccaaaaggaccgctggaggcacttaggcccaagcttcagccaacacgccaacaacagcaacaacgtgcaaggcgccctatttacacttcgtcagaaaacgaggacggagacggggctggtgctgaggatatgaacatcaattgaagtggactagtggagtggaatgcctgctcagattggttgatgagcaagtcgtcactatatgtcaagtgttgtagtttgctttgcaattattggaggaattaaatgatcgtctgctgggttcatgagtcgaacatttgatatatatggcctattatttactaatatatatttttattatctgtggataaacatttgat

SEQ ID NO: 110010 - DNA, 1203 bp, Zea Mays
aagttcctgtctacgagcttcctccttcctagcctcagaccttgcgtttctctgaacctcaaaaattagagcagcaacagcgacctatgacaataacaagaagtaaacagtgtaccattagctgagagttcctgcagatgtacatgatttatgaatggtttagagaagcaccgagaagataaaggcttccccgatgagatctgtagcagcttgaacagctttctgctcatccaaaggcctgatcgccacatctgtggcatgcccataaatgcgcctttgtatctttgtggtgatctggtggtttgcctgtgacaatgcttataccatcaatatgaatgaaccactagcgctagaggagaagcaaggatcttgagtgctcccacgtacgtagcttacacagaattggacaacgttaaattgaataacaagtcgaagagtgggttgtagccacagattatgtgtccaagttagatccctcccaccttattgagttgtaagatgcggcggacagaaatggaagtgggtcgaccctgatcccgatttgatttgagtagccctaccctaggttgttggtacaagtagataattgaccgaaaggaggaagaggatacctgggcgatggcgatgatgaagttgcggaacttggggtggacggcggcctggctcttgaggcggctggcgatgggcttggacagcgtccgcagcgctagggtccccagcttcgccaccggcagcgccatttacggcggtccttctgctgctgagtgctgagtgcttcccttcccttggcctcgcgagggccagaggtgtgtgtgggattccctccctctgtcccttggtaatccaatccaatcgaaatatcgaagcgaggcactagggaagacggggaattccgcagggaaaaagaaaaagaacggaacaggaaagagagagaagaggcctgctcataactactgcttgtactaccaccctaggttttagtattttgcgtataatcacatcatccctctatcttcttcttgctagacaaggctactcttcttcttcttcttggcatccaaggatttgaccagctactacttctagccacacacacaaaaacaattatttttcaatagtttggtcaattgctccaaattgttggctctaatatgttggctgccctttaagttgagttgaacatacaaatagattattagataa

SEQ ID NO: 110011 - DNA, 1005 bp, Zea Mays
gatgagacctcccccgatccccatcctgttcctaccataccaggatcagctaagctggtggacaagacttgaaagagacgagagagagagcatcaggcatcatcatgagctgcagctcgccgccgccgctggagcatcatcacgacgccgcccggccgacgatagccccggcgctggacctgctggacgagcactggttcttcggcaacaccctcgtcaccaatagcagcgccaagaagaagaagaagccgccgccgcacctgcccaggtcgccgtccacagccacagccacagccacaggggagaaggcctcgggttcggcggggccgccggccaggctaggaggccggcagctactccggacgccgtcgctcccgtcgtctcgcgtcgggatgacgacggagttgcccttgcccaccaacaacaacaaggatgacgacgacgacctcaactggagctccatctacgagggcgtcctgcgaacaaggctggcggagggaggcagatcggcgctgcgccgggcgccgtccatgcccgtccccacgtccgccacggccatggggctgctcaggcactcgcacaaggccgaggctgagcagaggacgcccggcggcggcagtagtggaaatgagccgcggcgcagcaagaagcagacgaccagtccccggcgtccttacctgtcggaggcgtggcagcggccagcgctagtgagggtgcagtcggcagcggagatgaaggacctgctcaggatgtgggcacaggccgtcgcgtgcaacgtgcgacacgacaccgtctcaaatcacaagccgttttagctattctttctttctttctttttgggaggtatacattgatcgattcattcattattttattcatcatggagataataacgcagtatactggtacgcttgcttgagctacagccaacacaacgtaaagattcttgagccctgcatcagttatatgtgagtgtgtcaatcgaatcgagcaatggagatggcc

SEQ ID NO: 110012 - DNA, 2435 bp, Zea Mays
gtgtatacagcgacacgacacgagacgagagggagggtgaactgaaagagagacccggctagagctataaagcaagtgggggaagagagagagagaggagaaggagaaggagaggtttttatgtatgtgtggtggacatgcgtcctcctgtcgtctcgagagagcggaggccctaatactccaatcaccacgcaccaaactagctagctagcagtcgtcttgcattgtagctagtccattgctctcatcttctcttcttcttcccccagtcctccccccctttcccctcttcggcctctctcgctcagctcactcttcattaagcgagctcacgtcgttcctcccttcttcttcttcttatccgttgttcaattcgttcagctagccggccagagatcgagcatcatctccatcatcgattcatccatctcatctttctcttcttctattctatgtcgtcgtcgtcccagattagatcgaagctgctagcagtctatccagtctctagctagctagctagatcaagcccgcagactatacaatataatacaagctagctacgtgcttattattgctttattagtctagaataatcttgatatatacgatcgaacatatatctcgatctccaccgatacacacccggccctatccatgcttgaggtgtcgacgctgcgcggccctactagcagcggcagcaaggcggagcagcactgcggcggcggcggcggcttcgtcggcgaccaccatgtggtgttcccgacgtccggcgactgcttcgccatggtggacgacaacctcctggactacatcgacttcagctgcgacgtgcccttcttcgacgctgacggggacatcctccccgacctggaggtagacaccacggagctcctcgccgagttctcgtccacccctcctgcggacgacctgctggcagtggcagtattcggcgccgacgaccagccggcggcggcagtagcacaagagaagccgtcgtcgtcgttggagcaaacatgtggtgacgacaaaggtgtagcagtagccgccgccagaagaaagctgcagacgacgacgacgacgacgacgacggaggaggaggattcttctcctgccgggtccggggccaacaagtcgtcggcgtcggcagagggccacagcagcaagaagaagtcggcgggcaagaactccaacggcggcaagcgcaaggtgaaggtggactggacgccggagctgcaccggcggttcgtgcaggcggtggagcagctgggcatcgacaaggccgtgccgtccaggatcctggagatcatgggcacggactgcctcacaaggcacaacattgccagccacctccagaagtaccggtcgcacagaaagcacctgatggcgcgggaggcggaggccgccacctgggcgcagaagcgccacatgtacgcgccgccagctccaaggacgacgacgacgacggacgccgccaggccgccgtgggtggtgccgacgaccatcgggttcccgccgccgcgcttctgccgcccgctgcacgtgtggggccacccgccgccgcacgccgccgcggctgaagcagcagcggcgactcccatgctgcccgtgtggccgcgtcacctggcgccgccccggcacctggcgccgtgggcgcacccgacgccggtggacccggcgttctggcaccagcagtacagcgctgccaggaaatggggcccacaggcagccgccgtgacgcaagggacgccatgcgtgccgctgccgaggtttccggtgcctcaccccatctacagcagaccggcgatggtacctccgccgccaagcaccaccaagctagctcaactgcatctggagctccaagcgcacccgtccaaggagagcatcgacgcagccatcggagatgttttagtgaagccatggctgccgcttccactggggctcaagccgccgtcgctcgacagcgtcatgtcggagctgcacaagcaaggcgtaccaaaaatcccaccggcggctgccaccaccaccggcgccaccggatgacatactatctcgtcgacaatacatgcatgtacaatagacggatgtctagtagtatagtagattgctgctagctagctagccgctagagtgtagtagcatatgcatgccttttttttcttcttctttttttgcccttattattaagctggctaatagcgattgagatggagcttgacacagatctgctagctagctatttgagggtttctcttgtatgctacctattgctgctgcttgctgctgagacaagtaatgtacgtacgcctgtgcaaacgacacatcggattgtattgtattactagttatatgaacaacaacaataataataggcacatgcatgcctgcctagtatgtgagctgctagctagctacatgcatgttgcgcattcctttcc

SEQ ID NO: 110013 - DNA, 2515 bp, Zea Mays
gtgtatacagcgacacgacacgagacgagagggagggtgaactgaaagagagacccggctagagctataaagcaagtgggggaagagagagagagaggagaaggagaaggagaggtttttatgtatgtgtggtggacatgcgtcctcctgtcgtctcgagagagcggaggccctaatactccaatcaccacgcaccaaactagctagctagcagtcgtcttgcattgtagctagtccattgctctcatcttctcttcttcttcccccagtcctccccccctttcccctcttcggcctctctcgctcagctcactcttcattaagcgagctcacgtcgttcctcccttcttcttcttcttatccgttgttcaattcgttcagctagccggccagagatcgagcatcatctccatcatcgattcatccatctcatctttctcttcttctattctatgtcgtcgtcgtcccagattagatcgaagctgctagcagtctatccagtctctagctagctagctagatcaagcccgcagactatacaatataatacaagctagctacgtgcttattattgctttattagtctagaataatcttgatatatacgatcgaacatatatctcgatctccaccgatacacacccggccctatccatgcttgaggtgtcgacgctgcgcggccctactagcagcggcagcaaggcggagcagcactgcggcggcggcggcggcttcgtcggcgaccaccatgtggtgttcccgacgtccggcgactgcttcgccatggtggacgacaacctcctggactacatcgacttcagctgcgacgtgcccttcttcgacgctgacggggacatcctccccgacctggaggtagacaccacggagctcctcgccgagttctcgtccacccctcctgcggacgacctgctggcagtggcagtattcggcgccgacgaccagccggcggcggcagtagcacaagagaagccgtcgtcgtcgttggagcaaacatgtggtgacgacaaaggtgtagcagtagccgccgccagaagaaagctgcagacgacgacgacgacgacgacgacggaggaggaggattcttctcctgccgggtccggggccaacaagtcgtcggcgtcggcagagggccacagcagcaagaagaagtcggcgggcaagaactccaacggcggcaagcgcaaggtggactggacgccggagctgcaccggcggttcgtgcaggcggtggagcagctgggcatcgacaaggccgtgccgtccaggatcctggagatcatgggcacggactgcctcacaaggcacaacattgccagccacctccagaagtaccggtcgcacagaaagcacctgatggcgcgggaggcggaggccgccacctgggcgcagaagcgccacatgtacgcgccgccagctccaaggacgacgacgacgacggacgccgccaggccgccgtgggtggtgccgacgaccatcgggttcccgccgccgcgcttctgccgcccgctgcacgtgtggggccacccgccgccgcacgccgccgcggctgaagcagcagcggcgactcccatgctgcccgtgtggccgcgtcacctggcgccgccccggcacctggcgccgtgggcgcacccgacgccggtggacccggcgttctggcaccagcagtacagcgctgccaggaaatggggcccacaggcagccgccgtgacgcaagggacgccatgcgtgccgctgccgaggtttccggtgcctcaccccatctacagcagaccggcgatggtacctccgccgccaagcaccaccaagctagctcaactgcatctggagctccaagcgcacccgtccaaggagagcatcgacgcagccatcggagatgttttagtgaagccatggctgccgcttccactggggctcaagccgccgtcgctcgacagcgtcatgtcggagctgcacaagcaaggcgtaccaaaaatcccaccggcggctgccaccaccaccggcgccaccggatgacatactatctcgtcgacaatacatgcatgtacaatagacggatgtctagtagtatagtagattgctgctagctagctagccgctagagtgtagtagcatatgcatgccttttttttcttcttctttttttgcccttattattaagctggctaatagcgattgagatggagcttgacacagatctgctagctagctatttgagggtttctcttgtatgctacctattgctgctgcttgctgctgagacaagtaatgtacgtacgcctgtgcaaacgacacatcggattgtattgtattactagttatatgaacaacaacaataataataggcacatgcatgcctgcctagtatgtgagctgctagctagctacatgcatgttgcgcattcctttcctgtcaggatcccatatatgaatcttacagcagtgaagttcatgggctctctggggttccagcatactgaattgcaccttagcttgt

SEQ ID NO: 110014 - DNA, 885 bp, Zea Mays
aattgcttactacctactgtgattcattcattgacttgtcttccgcctcccgccccatgcaggctgccaggaaatggggcccacaggcagccgccgtgacgcaagggacgccatgcgtgccgctgccgaggtttccggtgcctcaccccatctacagcagaccggcgatggtacctccgccgccaagcaccaccaagctagctcaactgcatctggagctccaagcgcacccgtccaaggagagcatcgacgcagccatcggagatgttttagtgaagccatggctgccgcttccactggggctcaagccgccgtcgctcgacagcgtcatgtcggagctgcacaagcaaggcgtaccaaaaatcccaccggcggctgccaccaccaccggcgccaccggatgacatactatctcgtcgacaatacatgcatgtacaatagacggatgtctagtagtatagtagattgctgctagctagctagccgctagagtgtagtagcatatgcatgccttttttttcttcttctttttttgcccttattattaagctggctaatagcgattgagatggagcttgacacagatctgctagctagctatttgagggtttctcttgtatgctacctattgctgctgcttgctgctgagacaagtaatgtacgtacgcctgtgcaaacgacacatcggattgtattgtattactagttatatgaacaacaacaataataataggcacatgcatgcctgcctagtatgtgagctgctagctagctacatgcatgttgcgcattcctttcctgtcaggatcccatatatgaatcttacagcagtgaagttcatgggctctctggggttccagcatactgaattgcaccttagcttgt

SEQ ID NO: 110015 - DNA, 540 bp, Zea Mays
aagtagaccggaaaaccccatctcccccgccgccccaccacgcacgatggccgccgtaaggtcgctgctccgctcgtcggcctcccttcttcgcgccgcccccgccctcgcgagatcctcggctaccacgcgtccgtctcttcggcgcgcattggctgctcctcctcgccttctccggtcgcccgtcgagtcgagcttctgcgtggagtcgcttctgcctctgcacaccgccaccgccggtgcacgcatgacgtccatgctcgccgctcctggccaaggcctcggctggctcacccaaggaaccaggacatcaattgtgcttcgagttcttctgtgcctggaggaaacaggaagagttgattggaaaaagaaaaaatgggatgtgtttttctttttgttcatgtgaactgagatacgacttaataaactagatcttcgaatgatgctctgacccccccccccccctttttttaatgttttttcattgactaaaacggttatgtaatgataactatgtgacacttgttttgtttggtgtga

SEQ ID NO: 110016 - DNA, 1599 bp, Zea Mays
aagtagaccggaaaaccccatctcccccgccgccccaccacgcacgatggccgccgtaaggtcgctgctccgctcgtcggcctcccttcttcgcgccgcccccgccctcgcgagatcctcggctaccacgcgtccgtctcttcggcgcgcattggctgctcctcctcgccttctccggtcgcccgtcgagtcgagcttctgcgtggagtcgcttctgcctctgcacaccgccaccgccggtgcacgcatgacgtccatgctcgccgctcctggccaaggcctcggctggctcacccaaggtaaaaaaaaacagttacttcgatctactacaatgacactttaaattcagactcagaggctgctctgcttttggcaagctccgcagtgtaaatgtgtaattacctggttggcatagctgatgccgcttcgtttgtgcttccatcatttcggttattgtgtgtaattccatgattgcatcgttcgccagtcctgtttctagtttgtctatttggaagagagtcatttcctatatttctttttcatttctttctgtaggatctgatgaaactagatgaagagcagccggggaaaggtgaccactagaatacctccaacagtttcgtttaattgctatttgctatggagttgaatcttacaccacaaataaccttagatgactacgaaccctattctgacttgtgaatatgaaatagcccaaccaattaataaaattgttcaacgggatacctggttttcaaaagtaggcataggtggaggataaccgttgccccacaaacatatctaccaatgacctttcagagtgttgtgtccccaagaaaggatggtatccgtatgcattaccagaagatgtgctgttaaatacagtgtgtaagactcccagatggctaaatccattttgaagaatgcattgacatcatttataaaattgggtctagtacaaaattgaataaaatggttttatagatgttccaaattaactggtaagatgaaggaatattgatgtgagaaatactgcaaggattgaactatatgctaaagcagtcttgaagaaaaatgttttctatagatgtttttaatacttcgtagcactttcctttgatgtaagagtccttgaattgttttctatgttttatcagttattttattagaatattagtgaatagtgcagttagctttgaaaaatcgaatgtgctaaagttggtggtactgcataagttttctagaatcttagagaagctttgatgaattaatctttttttttgtactacagctgaaactgacggagtataacgccccctgtgggtgctcccctttaggaaccaggacatcaattgtgcttcgagttcttctgtgcctggaggaaacaggaagagttgattggaaaaagaaaaaatgggatgtgtttttctttttgttcatgtgaactgagatacgacttaataaactagatcttcgaatgatgctctgacccccccccccccctttttttaatgttttttcattgactaaaacggttatgtaatgataactatgtgacacttgttttgtttggtgtgattcttcagcgtagcctggtga

SEQ ID NO: 110017 - DNA, 644 bp, Zea Mays
aagtagaccggaaaaccccatctcccccgccgccccaccacgcacgatggccgccgtaaggtcgctgctccgctcgtcggcctcccttcttcgcgccgcccccgccctcgcgagatcctcggctaccacgcgtccgtctcttcggcgcgcattggctgctcctcctcgccttctccggtcgcccgtcgagtcgagcttctgcgtggagtcgcttctgcctctgcacaccgccaccgccggtgcacgcatgacgtccatgctcgccgctcctggccaaggcctcggctggctcacccaaggatctgatgaaactagatgaagagcagccggggaaagctgaaactgacggagtataacgccccctgtgggtgctcccctttaggaaccaggacatcaattgtgcttcgagttcttctgtgcctggaggaaacaggaagagttgattggaaaaagaaaaaatgggatgtgtttttctttttgttcatgtgaactgagatacgacttaataaactagatcttcgaatgatgctctgacccccccccccccctttttttaatgttttttcattgactaaaacggttatgtaatgataactatgtgacacttgttttgtttggtgtgattcttcagcgtagcctggtga

SEQ ID NO: 110018 - DNA, 522 bp, Zea Mays
atggcgtgcgtgaaaaagaagaaaggggggcagaaacgcttcgacggttattcagccacgttaaccaattcatactctacaagggacaagttgttgtcttccttcactgtgaagctggctggctctgtagcctcaatccgcccccatttgtccactgcaagcctcattgatcctttgaacatgtcgattttggcattgcgcaagatcaccgtggcatcgggcttcagcaaatcaacttggtcgttgcgggcggtgaatacgatgacgccggtctcgtctccgacgaggcactcggcgatgcgcggcgcgcgggacgaggcggcggcgggtgcgcccgggcgcgcgcggcccggcacgggggtggcgctgacgaccttgacggtgagggtgtgcccgttagtgcccggcttgagctggtcgaccttggtgaagacgggcttccggagcgccggcttgtcgctaccgccctgtgccgccgcggtggccatcgccggtagtggggtggggtgggtggaggactag

SEQ ID NO: 110019 - DNA, 1068 bp, Zea Mays
atggcttcgccttcgctcaggctactgcttgtatggaacggggatcctgtcgggaccggacttcatgtcctcccacagcagatcagacagcgccggcatcagcttcccaaccttcccgtctccgatgggtttgccgtcccactcgacgacgggcagcacggggaggccgctgccgacgaacgccatctcggcgctgcgcttggcgtcctcggctgtgatgtccctggtgctgacgcccgcgagcaggccggcgtccacgaggcgaggcgccagcgcgagcatcctcttggccgtgcacccgctgaggatcttgtcgaaggccgggagcacgagctcccgctcgggcgtcacgaacgccacgttcaccatggggccctcggccacgtacccttggtcgtccacccacacggacgcgaaggcgccgcggtcctcggcgtccatgatggacagcacgttgggaaggtagttcacgttcttcacggtcgcgaactgcggcggcttcatgggcaccgtggccgtgaccgcgcgcaccccggtgccgtccaccccgcactgctcgtactccgacgcgatcaccacgccgtagaacgccggcgacgggcagcccctggaggacagcaggaagtcgccgggcccggagctgagccagtagcggatggagcccatgcggcagcccgaggcggcggtcatctggatcaggatgcgccgcagcgcctcgcgcgggaacggggccgtgcccacgcgcgccgccgcggccgaccggaggaagcggtccaggtgcgcgtccagctcgtacagggcgccgtccaggatcatggccgtgtcgaacacgccgtggccccggtggaccatgtggtcgtcgatggggagaaccatcatggccgggtccaggatgatgccgccgaacacgctcgagtacatggccgggtagggaggaggccgcgatgccgccgccgccgcccatttctcttgcaccttcgcaagcacctcggcgcccgactcgtacacagggacctcatcatctccttggatgtaggaacccatctgtcagcgaatgggatcttctag

SEQ ID NO: 110020 - DNA, 2145 bp, Zea Mays
gacgctgatcgtgtcgagagggacaaccacacacacacactgacacaattccctctgccgcacgctccggcgggaaggcgccttctccctccctcctctactcttctgtctttctccaatggcggcgattaccgcgccgccggcccctcccccggcctccacctcatgccgcctcctccgccgccgcgcgccactcacccgcttcgccgcctcctcgtccccgtcctcccgcttccgcccgtcctcctcctccttccctgccgcagccggcagcagcagcggcggcgggggcgagatcctccacgtgtcgccgcctcccccgcccgccgcgcccccgggggttcccgtctacgtcacgctccccgccgacgccgtcgacccggggggccgcgtcgcgcgccgccgagccatgggggcctcgctcgccgccctggccgccgccggtgtcgcgggcgtcgccgtagagctctggtggggcgtcgtagagcgccgcagccccggggagtatgactgggccggctacctcgagctcgccgccatggcccgacgccacggcctccgcgtgcgcgccatcctcgccttccaccagtgcggcgccggcccgcatgacctgccctggattcctttgccgcaatgggtgcttgaggagatggataagattccggacttgtcatataccaatagataccagaagagaaacaaagaatacatatcactgggatgtgatattcttcctgttctgaaaggaagatcacctatgcaagcttactccgacttcatgagaagcttccacaatacttttgaagattaccttggggacacaataacagaagtacaagttggaatgggtccaggaggtgagcttaggtatccgtcatacccaactgagaagctaaatcagccaggcagttcatctgaacttggggaatttcaatgttatgataagtttatgcaagcttcgttgagtgctcgtgcacagatttttgtgttacaacagtggggcaatggcggttcaactggcacagatggttcacagcagaaccttgaagaaacgagtttttttcgcaccgatggaggctattggaatacaccttatggtcacttttttcttaagtggtattcaggaatgcttctcctccatggagagaggttatgcatgatagctgatgcaatcttctctggtactggtgtgaccatctcagggaaggttgctggaatacattggcactattatacttgttcacatccatctgaactgacatctggctactacaatactctattaagagatggctatcttcctatagctcaaatgtttgccaaatacaaagctacattgtgctgcagttgtttcgacctgagggacgcagaaagaacaaattctgagagcagtcccgaaggtactctccggcagcttgcaggtgctgctaaaatgtgcaaccttcctcttaatggtgagaattctgcgacaaggctggatgatgcatcactgaatcaagtgataagaagctcaaggctctactcaggccgtacttcaggaacatctttttcctttaactatgttaggatgaacaaaagcttgtttgagtttcacaattggaatcgatttacaaagtttgttaggcagatgtcagatgccaggacctttctagcaagactgtatgtcaggagagggcagcaatacttgtcttcaatgtcagttgtttgggtggttagtcgggcttgtgcatatacatgaaagttgtcaaaagctattgcggataatctcagccataaatggttccaccactgtggatggaaaaggtttgctcagtatatggctcatttttagttgccagaagggcaggcaggcttatatgctgaaggctgtactgatttcatgcatatgcatgtattagtttcatgcatatgtcatcgctgaacaaaagtttatagttatttgttgtaaagtggcagactggcagtgttttgctgccaacaatattgaatcgcacgagggtcctgtttagccattttagaaataattagatggagcttcatgttttcccgttacaatatgaatgctttcaaactatatctgcctatgaaaatatgtatacttcctcttgtcacaaatgtcaaatataagtccatcttagtttatcc

SEQ ID NO: 110021 - DNA, 926 bp, Zea Mays
caagatatggacaggacaacacgcccgtacagtagcacagtgtgtgattgagatactagatggatggatggatagacctacaaaatctttgtgattgacatggacagccaagcgcacagggaaacccggaaatggggcattttttttttggtgtgaacaccggcaggcaggcagcaatcaaggaatgcaatccggtttcttccgcaggcgcacgagttagatccacaggaacaacaagtaggggggaaaatggagtctttcgtagatgagaagagggaggtgctagatagtagtaccttgagggtgtcggagaagaggaggccttcctgcaaggacatggcctcggtgacggaagcggcgtcgtggtcgtcgtgggtgtgggaggagacggttgacggcgacattgagaccgcctccatgcgcaaacaggacggcttccctcacctgttgccaagatagattcgtcctcccaggcccagctgttgtagcagcaagacccctcccctctccgtggctccgaccttgtgcgggaaccaaaacccccaagaaagcaggagtttttgaaggggggggaggagacgaagaagccccaatgccctgggtgggcggcggtggttcacctatgagcccatgaacatgggagggagttgaaccaccacagccctactctactctactctactctacctgtgtttgggtggagcagtggtgttgccaagatctggtttgggtcccctccctttctctgtccgtccaagagtagagcagagatttggaagcttgctggtgcgcaaggcgctagagattggtggagcaggggtgatgggccatgggagaggagggggcggatcggatgaatgcgacggacggggaagatgatggacggagtagttagagagaggctatttgtttggggaacgtatcat

SEQ ID NO: 110022 - DNA, 786 bp, Zea Mays
tttttttttggtgtgaacaccggcaggcaggcagcaatcaaggaatgcaatccggtttcttccgcaggcgcacgagttagatccacaggaacaacaagtaggggggaaaatggagtctttcgtagatgagaagagggaggtgctagatagtagtaccttgagggtgtcggagaagaggaggccttcctgcaaggacatggcctcggtgacggaagcggcgtcgtggtcgtcgtgggtgtgggaggagacggttgacggcgacattgagaccgcctccatgcgcaaacaggacggcttccctcacctgttgccaagatagattcgtcctcccaggcccagctgttgtagcagcaagacccctcccctctccgtggctccgaccttgtgcgggaaccaaaacccccaagaaagcaggagtttttgaaggggggggaggagacgaagaagccccaatgccctgggtgggcggcggtggttcacctatgagcccatgaacatgggagggagttgaaccaccacagccctactctactctactctactctacctgtgtttgggtggagcagtggtgttgccaagatctggtttgggtcccctccctttctctgtccgtccaagagtagagcagagatttggaagcttgctggtgcgcaaggcgctagagattggtggagcaggggtgatgggccatgggagaggagggggcggatcggatgaatgcgacggacggggaagatgatggacggagtagttagagagaggctatttgtttggggaacgtatcat

SEQ ID NO: 110023 - DNA, 221 bp, Zea Mays
taatcaaattgacgccaaacagacggaacatgccgggctccttcttttcctcttcgacggcattggaaaatcttggagccacctcctcggtctggtagctgcacagagcagtgttgcaggacagcttggaagagggctcgtcagcatgataagcggagagcccaggccaaggaggaaccctcgcgtcgttgctggtgacctgaaacagtttctgggagatc

SEQ ID NO: 110024 - DNA, 624 bp, Zea Mays
atgcagctgaatccccggcagactgcgagccaggcggcgaagaggattgtgaggaggaggagatccgcaaggatgaccatccagagctgccgcctccacgtccagctgggtccggcccgcccccggtgcgaggctcggtccctcttgggcgtggtccgcgcggctaggtcagcgtccctccgcgcggcctcctcctccgcgtgggcctccgcggcggcgacctcgttcgcctcgcgcgcgtcgtcgcccggcgggagtggcaagcgcagcgctaggcgcggcatctcgtcccgcatccgggcctcggggaggcatcgcaggcggcggaggaagagcaggagctgcgatgccgggaggtggggcgcccgcgagacggcggcgagtgcgagcggcggggacaggagcagcgcgtgcgcacgcccggcggctgtgtgtgtgaggtggcggtggtgcggcggagcggcggcgacgagcgcagcggcgagcgccgggaggtcgtcgtcaggggcgggggagggggcgtcggaagcgacggggtcggcggaggtggcggtgctctgggagtgggagtgggcgtggtcgagctcggcgacgaggtgggtgtcgcggaagacgcaggcgtag

SEQ ID NO: 110025 - DNA, 1533 bp, Zea Mays
atataatgcagagatttgaacgaattcatcaatcctcatttaaatttgcacaaccctacaaccatacattgtgacaacatgcatcgtacgtgtacaatatatatatatacacatatactataacaaggatacgtccaaatcttgttgtacgcacgtcgtgctgtgtataaataaaactgcaactgatggactgatcgtggtttgaagttgaacaatatacgtttgatttttgcatcggatccatggaatccaatgcaaacgaaacgagcatgcaatcagtggcagatggggcacatcatgaggccgttctcgttgcacttggcgcacctctccgtggtggtggttggtgtccctccgtccggcggcggcagcagcaccctgcagctgccgccgcactcccagcacggcacgaaccgcgcgccgccacagccctcgcagccgcggccgtccttggccgcgcacgcctcgccgcgggccttgacccagcgcatcatctcccgcagcgtgccggactcggccagcctggcgcactcctcggcgccgcccacgtagcgtcccatcacgaacagccgcggcggaggcgccgcgccgccgtcgccgggcagcagctcccgcagctcgcggaggtactccccgtgcagcgacacgtcgcgctcgtccacggcctccacgcccgccgccgcggcgcacgcctccaccgcctcccgcgcgcgctcgcagtcctcgaacgtgcgccgcacgccgcggagcgtcgtcgtgtacagcaccacgccgccgcccgcggcgcccgggggccggcgctcggggcagccctcgaacgggtcccgccgcttccaccgtgggccgccgtcaccaccggcgcccttgttgctctcgcggtcgcgcgtcaggaacgggttgtccttcacgacgcgccgacccgcgagctccggcggcgcgggcctgctgctgtctgcagcagcgtcgccgtcgtccgtggcagcaggcaccacgggctgcatcggctgctgctgctgctgcttcgtcttagtcttcttcttcttcttcttcttagtctttttcttcttgggagaaggagcaggagcaggcggcgacttggagtcgaggacgggcttcatgtcctccagggccttgctgacctcggaccacgacgccggagcgagctcgtagccctcgagcttgtcgaggagagggagcggcaccacggtcttggcggcgggctgcttttcgtcgtcgtcggtcgtctcttcctcctcctcctcctcctcgtcgtcgtcgtcgtcatcagcggctttgttctgcttggcgatgagccagggctcctcgacggcgctgatgtcgaagagggaaacgctggtgggcggcgggcggtagacgtcggccaccgcgacgtcgccgctggccttggagctcgcgcaccccatgggttacctctgtggctgtggaggaaagtacgtgctctcctctggtggagaagctagcagagtttttgagtggctgccttgctttctgataagaggatgagactaggta

SEQ ID NO: 110026 - DNA, 2612 bp, Zea Mays
cgcaaacgcagcagcagcagcagccgcggcacggcccgaggtcagaggtcgggtcgccccgcgaaatcccctcgcgcaccacagaaaatcctccagccacctccaccgccggcgctacgctctctctccgctcgccgcactttggccggcttcgcgctcgcggtagggggatacagagggagatctgggccccgcgacttggatttccgcccctcccctgcccgcccgccgcgctggattccgcggcctccgcctcgatcccgccgcagggcccccactctggtattatggtcatgaagatggagcttgaggacgatggtgccttgggaggaactgctggcacgtggacagaggaggaccgaggtctcggcgctgccgtgcttggagccgatgcctttgcatatctaacgaaaggaggtggtgccatatccgagggccttgtctccgcgtctttgccggatgacttgcagaacaaactccaggagcttgtcgaatccgagagccctggtaccggttggaactatgccatcttctggcagctctcgcgcacaaagtctggtgatctcgtccttggatggggggacggctgctgccgtgagccccgagttggggaggtgggagctgctgcttctgcaggcagcgatgataccaagcagaggatgcgcaagcgtgtgctgcagcggttgcacatagcattcggggttgctgacgaggaagattatgcccatggtattgatcaggtcactgacactgagatgttcttcctagcatctatgtactttgcttttccccgttgtgctggtggccctggccaagcatttgcagcagggatccccctctgggttcccaatagtgagcgcaaggtatttccggccaactactgttaccgggggttcctcgcaaatgcggcaggatttaggactattgttttggtgccatttgagagtggtgtccttgaactggggtcaatgcagcacatagctgagagttctgatactatccagaccatacggtctgtatttgcagggacaagaggtaataaggctgcagtacagagacacgagggaaatggtcctgctccccctgaaaggtcacccagtttggcgaagatctttgggaaggatttgaaccttggccggccttcagttggtgtacctaaggtagatgaaaggatatgggaacagaggagtgctggtggtggtacctcattgctgccgagtgtccagaaaggattgcagaatttcacttggagtcaggctcgtggcctgaattcacatcagcagaagtttggcaatggagtgttgattgtgagcaatgaggctggacaccgcaacaacggagcagtggacagccctagcacagcccagtttcagcttcaaaaggtgcctcagcttcagaaactgcaactccagaaattgccggttgttcagaagacaccgcagctagggaaccagcagcctatgcagacacaggtacctaggcaaattgactttagcgctgggagcagttccaagcctggtgtgttggttacaagggcagctgtcctggatggagagagtgcagaggtggatggcttgtgcaaagaggaaggggcgccgcctgttatagaggaccgacgaccaaggaagaggggaagaaaacctgccaacgggagggaagaaccacttaatcatgtcgaggctgagcggcagaggagggagaagctcaaccagcggttctatgcgcttagagctgttgtgccgaacatatcgaaaatggacaaggcgtccctgctgggcgatgcgataacgtacatcactgacctccagaagaagctgaaggagatggagacagagagggaaaggctcctggagtctggtatggtggacccaagggagcgtgcgcctaggccggaggtggacatacaggtggtgcaggacgaggtccttgtacgagtgatgtctccaatggagaaccatccagtcaagaaggtcttccaagcgttcgaagaggcagaagtccgcctgggcgagtcaaaggtgacgggcaacaacaacaacgggacagtggtgcattctttcatcatcaagtgtcccggcactgagcagcaaacgagggagaaggtgatagcggcgatgtctcgtgcgatgagcagttgagcagagcagcgtaggatcagattgtcgcggtagagatgtggcagttgatcctgtttggttgcgagcgaaaacaagaggcggcggcggacagcagcccttgacatggtcgataggagatctgtaggtggagagaagcaagatgagattcttctgacttttttagcaacgcaacaacaaaagatggggctcgagttaagcagccgttgtactttaggtttcttttggttggtaatagtgttcctagtgtaagcttgatgatgcagcagaacaatgaacagcagtacatgtttttttcccttattttcatgcgtgatttggaaattaaatttattgcgatctttcttttacttctctgtctgtgacgatggtagtttagtattatgtttaagaggagcgatgtattagtttgaaggaagacagaagaatgtactccctatgttgcaaaatagtaccaaaaaagtagtcattttagct

SEQ ID NO: 110027 - DNA, 2294 bp, Zea Mays
cgttcttctccctctcctcccgtcgccgccacatctggaccggcgaatcatccgccgcgaacctgtaacaccctagacggcgacagccctcccctcccacggcggcacaccctagccagacgcctcacctagtcacctccacctccgggggatcgcgacgccgacgccccaccgagcctgcagcgtccccacctccgcagcggcggcccccaaaccccagccaaggtcacagaaagccagacctatggacttccacaacatcgatgattattttcatgaaaacagcccggcacaagggggcgaaggagctgcagaggctagcgccgaggcaattctggaaagggtgtaccgtgacaccgcgtttggatctgagaagctgctcaatctagacatgctggtcatggagatcgctcgccgagcctctgatatcgagcctctcatgtgggaccctcgttccatttcttccgagtcagttggcaaggctttcgaattcgatgtcctgcacggtattgtagattcggaagtcagcgagttggagaagctagctgcctctattcagacagatattggcaatgctgaaaccaaggcattggggggagaacccgggagcagagtgaccgatgagctgtgcgcgcggaaggagtccttgaagcagatgcaagatgtaatttctgatattagaacacagcttgcaacctttgagaatgccatacaaccttcacatggcaaacaaggaaatagtgagggtatgggatatgaaaatggtcatatatcaggtcacactgctatgcaggctgaggaccagagaaatgtactgcagatgttacaacagtcgatagcaagcaagctagatcttgaaaataagctacgtgattcgcagtctgttgtggaagacctcaaaatgaagctgcatcacgcagaacaagaatcatgtttcttggaggaatccatcaaagagctttatgaaagaacgttgtcggcagaaaatgcttcccaattgcttcttggaacttcaaaggaactcgttgccaaatttaataccacccagtcctatttaagtgcttcaattcgcagggaagatgatcttaaatcaaagttagacgaaaacttgatgaagctaagtggcaacaagagcaccagggagacagtgcttggagacagtgacaacaatgctaaccaggagcctgtgcagatgcgggtgctatcacgtcctgagttccagaatttatggaataaggttcagcagctggaggaattgttgagggactctggctctcaactgcagcaatcatctctttcaagaggggcagatgaagaagagcaggatacagcgcaatctgggataagcgcgtttgggaatgttatcgctgatttcaagcttgccatttccaatgcagaaagtagagcacaaaatgctgagacaaggtgtacacagctcactcgaacgaatgttcagcttaatggggagttgaacactcttaaaagtcagggatcagatagggctggcttattggagacgaaacttaaggaatcagacactcagttagagcatgcaagagcatcggttgatgctattgttgaacaacagggtatgttaagatcctccatgtctgatatggaactggtgattgaagatatgaaggaaaagtacttgaaagctgaaaccagggccgagagtgctgaatcaaaatgtgcattgttgacagataccaatttagaactcagtgaagagctgtcatttctgagaggccgagtagaaaggctagaaaactcactgcatgaagctaaccaactaaaggtgtccagtgcaaaagacattgctagtaaaactaagactatcatggacttggttgcaaaactttccttggaaagagaacgccttcatgttcaggttgttacgctggcgaaaaagaacggggcgttggctcaaaagtgcaaagaaaatgttagcgagcgcacattgctgtgcaagaatgttaccacaggcgaaggtgtacttaggcccgttcaagtaaaagaggaggttgaagccgatgaggtggtgattccagacgaatgcacagtgcgatctatcgagccgacgacgatgacgatggtaaactggaagtacatttccgcggcagtcctggccttgctggctgccgccgtcgtgttccagctattacgtgccaatctgatgatgacgacggcggttaacgattgctgaggcaatttgtaggctaggagtaagagatggaataaagcaggacagcttgtgttttacatgcaaattattattatccatcacatctggc

SEQ ID NO: 110028 - DNA, 4294 bp, Zea Mays
gaaagaactaaaatcttcttagtatttaatacatttgactccttcaatcttctctaatcctcttgttctcaaaccagccctagcccctagaacatctcaaatctatctcgctctccctaggaaggtcctgcaaccccgccgccctctgctcccgcggccatggcaccaagattagtggtcacatagttcgtcttcctgcgacggctcaattcgcggaggcgcggcatggcgactccgtcgctgccgacgcagattgtggagttcaattacaaggcgatagaggacaagctcaagagactggctctcgaagtgagccaccatgagaacaacattaggttcctcaaatcccaactcaatactgttgaagaggcgtgcgtcgacctgggaattaaacttgggaattaccattcatccgtggccgctgttgtaaataatgatacttctgctcaagaggctgaacagcgcactattcgaagtatacttgatcagggcaagacagcagctgggattatatgccaactgaaagtccgtcatcatgagctagcatctaagatgccactgatgaaagatatacttggttttgtggctacattgggaaaagtaaataatgataacctcagcaggcttctcacagagtacttgggaatggataatatgcttgctcttgtttgcaagacttatgatggtgttaagggtcttgagaaatacgacaaggatggcatcattgataacaccagtggcattcatggacttggtcgctctgttggaaaatttctggatggaagatttactgtcttttgtcttgaaaacttgaggccattttccggtgatgttatcattgacgatccacaaagaaagcttattttacatagaccaaggttgcctggaggggagtcgcctcctggttttctggattttgcagtaaatatgatccacctggaccgagcacacttgaggttcctcacagccagtggccatggtcttagggaaactttgttttatactttgttttcccatttacaagtttataagactagaactgacattcaaagtgcccttcctctgataaaagatggtgctgtttctctagatggtggtctactgagacccaatggctcattctgccttggccatagcaagaatcttgaagtgaaatttcctgtaaccactgatgtttcaagtttacctgaaaatgtcgctgaaatggaggaacaagttaaacgtaagaattgggagaaggaaatggttcttgaagatatgaaaagggaggaagatctgctgaaacaagttaaggaattatacaggaagcagaagcaagagctcatggattatgtcactcaaccagcagtgacacagatgtcacgtgattcgccagcaactcattcacccgcgactcctgggagcaatccgtttggagccaagctctccaacaagtggcgataacattttggtggcgtacatccctattttgttggggcttattgcctgctcgggcatcagcacaaagtaactagcttttgccacaagcttggtgttagtttgtgagggtgataggccagtgaaattgttctgctgcttagcatagttggatgccaattgatgtatagggttagaatgctttttagcttttcctatgctaatcaaattgccaactgctaatcttgattcttggctgttgatagcacaaacaaattggaagcagcagctggttgtcgttttagttgcttcttcaacatgcacattcttattgcgatgtgccaatatgtatatgcctgctcaacgtgcttgactgatttttcatgaatggtgtgctgtttctcaggtctgatgtttacttgcctttctgtcaacactgaaacatacatgtttcttcaatctgtctaccatgtaaaatatgggggcgaattgatatttctttcatttgaagaatttgtgcatgcacttaaccaactattatatcatctgaactctattgcgaactatgatgaacacgacaacgctgctttcacgcgtgtcactgttgaccggtggctctaagctctgtgagctcaaaggacatgagcatgacccagccaagttctacgaggtcaaaggccatgacacaaccgatcctcacctgcacaccacctttcttgacaccacgcaagaattgtgtcgccaccaccaacatgccttcaccttcctcgcgtggcccaatgccaagacctccggtcgtctcttcaaatgccaacgcagcgcccttccttcagctccatacccacaaccaccaccaccagcagcagctgaggatgggcgacgcggccatcgccgccgtgcatttgcatgagtctgaggaggagcacatcttccggagccggttcccgcccgtggccgtaccagacgacgtcaccgtgccggagttcgtgctggcggacgccgaggcctacgcggacaagacggcgctcgtggaggccgcgccgggtggccggtcctacacctacggcgagctggtccgggacgtggcgcggttcgccagggcgctgcggtccatcggcgtccgcaggggccacgtcgtggtggtcgcgctcccgaacctggcggtgtaccccgtggtgagcctcgggatcatgtccgccggagcggtcttctccggcgtgaacccgcgcgccgtcgccgccgagatcaagaagcaggtggaggactccgaggccaggctcgtggtcgccgacgcggtggcctacgacaaggtgaaggacgctggcgtgccggtgatcggcatcggggacgtggcgcggcttcccggcgccataggctgggacgagctcctcgccatggcggaccgcgcgggcgcgccggtggtggcgcttgagccggcgcagcagtccgacctgtgcgcgctcccctactcgtctggtacgacgggggtgtccaagggcgtgatgctgagccaccggaacctggtgtccagcctctgctcctccatgttcgccgtcgggcaggagctggtcgggcaggtggtcaccctgggcctgatgcccttcttccacatctacggcatcaccggcatctgctgcgccacgctgcggcacaagggcacggtggtggtgatggaccgcttcgacctgcgcgcgttcctgggcgcgctgctgacgcaccgcgtcatgttcgcgcccgtcgtgccgccggtcatgctggccatggtgaagagccccgtggccgacgagttcgacctgtccggcctggccctcaggtccgtcatgacggccgccgcgccgctcgcgccggacctcctggcggcgttcgagcgcaagttcccgggcgtgcaggtggaggaggcgtacgggctcacggagcacagctgcatcacgctgacgcacgccagcggcggcggcgaggacgtggggtcggcggtgcaggtcgccaagaagaagtcggtcggcttcatcctgcccaacctggaggtgaagttcgtggaccccgacacggggcggtcgctgcccaagaacacgccgggggagatctgcgtgcggagccaggccgtgatgcagggctactacaggaagaaggaggagacggagcgcaccatcgacgccgcggggtggctccacacgggcgacgtcgggtacatcgacgacgacggcgacgtgttcatcgtggaccgcatcaaggagctcatcaagtacaagggcttccaagtcgcccctgccgagctggaggccatcctgctgtctcacccgtccgtcgaggacgccgccgtcttcgggctgccggacgaggaggccggcgaggtcccggcgtcgtgcgtggtgcggcgacgtggcgcgccggagagcgaggcggacatgatggcgtacgtggcggggcgcgttgcgtcgtacaagaagctccggctgctgcgcttcgtggacgccatccccaagtcggtgtccggcaagatcctgcggaggcagctcagggacgagttcgtcaagaagacggcagcagcgtaataatgcacatcatcctgtgggtgggtgcttgcttataccagtgcaagatcctgcattcgccacttgatgaagacaataatacaattagggtacagtcagatgttccaagctactgatacaattgttgtttctgcaaacagtactccaaactagtgcatatacattggcgttgtggacccaaaaaaaactgctgttcctgaataacttgagcttcccccagttccctcccatcttgggtagattctgaattcacctgatgaacataaactagctagaggggttaagcttgttttttggcgggagagggtttctttttccccctgccg

SEQ ID NO: 110029 - DNA, 2237 bp, Zea Mays
agcgccgccgccttcgtattcgctaccttatttctcttccaccgtttctaccatccctgtgtttcgctgtgctgtgttccatggtctcgattcctctccctcgacactgtctcggcgctgccagtttgactcctgcttcttctttacgcggcgcagattagtggtcacatagttcgtcttcctgcgacggctcaattcgcggaggcgcggcatggcgactccgtcgctgccgacgcagattgtggagttcaattacaaggcgatagaggacaagctcaagagactggctctcgaagtgagccaccatgagaacaacattaggttcctcaaatcccaactcaatactgttgaagaggcgtgcgtcgacctgggaattaaacttgggaattaccattcatccgtggccgctgttgtaaataatgatacttctgctcaagaggctgaacagcgcactattcgaagtatacttgatcagggcaagacagcagctgggattatatgccaactgaaagtccgtcatcatgagctagcatctaagatgccactgatgaaagatatacttggttttgtggctacattgggaaaagtaaataatgataacctcagcaggcttctcacagagtacttgggaatggataatatgcttgctcttgtttgcaagacttatgatggtgttaagggtcttgagaaatacgacaaggatggcatcattgataacaccagtggcattcatggacttggtcgctctgttggaaaatttctggatggaagatttactgtcttttgtcttgaaaacttgaggccattttccggtgatgttatcattgacgatccacaaagaaagcttattttacatagaccaaggttgcctggaggggagtcgcctcctggttttctggattttgcagtaaatatgatccacctggaccgagcacacttgaggttcctcacagccagtggccatggtcttagggaaactttgttttatactttgttttcccatttacaagtttataagactagaactgacattcaaagtgcccttcctctgataaaagatggtgctgtttctctagatggtggtctactgagacccaatggctcattctgccttggccatagcaagaatcttgaagtgaaatttcctgtaaccactgatgtttcaagtttacctgaaaatgtcgctgaaatggaggaacaagttaaacgtaagaattgggagaaggaaatggttcttgaagatatgaaaagggaggaagatctgctgaaacaagttaaggaattatacaggaagcagaagcaagagctcatggattatgtcactcaaccagcagtgacacagatgtcacgtgattcgccagcaactcattcacccgcgactcctgggagcaatccgtttggagccaagctctccaacaagtggcgataacattttggtggcgtacatccctattttgttggggcttattgcctgctcgggcatcagcacaaagtaactagcttttgccacaagcttggtgttagtttgtgagggtgataggccagtgaaattgttctgctgcttagcatagttggatgccaattgatgtatagggttagaatgctttttagcttttcctatgctaatcaaattgccaactgctaatcttgattcttggctgttgatagcacaaacaaattggaagcagcagctggttgtcgttttagttgcttcttcaacatgcacattcttattgcgatgtgccaatatgtatatgcctgctcaacgtgcttgactgatttttcatgaatggtgtgctgtttctcaggtctgatgtttacttgcctttctgtcaacactgaaacatacatgtttcttcaatctgtctaccatgtaaaatatgggggcgaattgatatttctttcatttgaagaatttgtgcatgcacttaaccaactattatatcatctgaactctattgcgaactatgatgaacacgacaacgctgctttcacgcgtgtcactgttgaccggtggctctaagctctgtgagctcaaaggacatgagcatgacccagccaagttctacgaggtcaaaggccatgacacaaccgatcctcacctgcacaccacctttcttgacaccacgcaagaattgtgtcgccaccaccaacatgccttcaccttcctcgcgtggcccaatgccaagacctccggtcgtctcttcaaatgccaacgcagcgcccttccttcagct

SEQ ID NO: 110030 - DNA, 2107 bp, Zea Mays
atgacggaaaatgattttagcaaaatcgtggtcgactcggccatcaccgacagaaaccggcttggacccgcccgcatgaaagccttgtgcggcttcagcttcaggtcgaagcgtatccctctgccctcccggctccctcaagcgctaatacggctggctgcgcgtcattctcttcctcttccggtgctcgtgctcgtgctcgtgctctccgccctccccctccgccacttcgcgcggaacggaacccaggccgccgccgacccagccaccgctaggcgtctaggcgaccgcgcggcatggtggcgcttttacactacctatgctagtttgcctgatgctacatttccacgatggttaagctgactatgatagcgcgtgtcactgatggccttccattgtcggagggattagatgatagtcgggatctcaaagatgctgacttctacaagcagcaagcaaaactgttgttcaagaacttgtccagagggcagcatgaggcgtcaaggatgtcaattgagacaggaccgtaccttttccagtatcctaagacctttttctcatttgcaaaattctttgttccacaattaatcatttcgaaatatgtgatgtgattcttcatcatgatcctaaattagagtttttgtgaactggcaagtttaggcagcctaaccatataccgtaaacttgaccagtattgtgtatatattggattcaatattaagtagttcaagttcctttgacaagcaccggcttatgcatatcatatgattatcatctatctccatttacacattgatgtgtggattacaccaagtaagcgctatcactaatgacgtatggtatgaaaatgatcattttctgcactaaaatgcttctggtgctctagttgtaccttaattcaataaaaacagctacatcattgaaggccgtgtttgctatttgactttgtgtgaccgttcttatcccaagaaacttgcattccagtatctcgaagatctcaaaaatgaatttgagaaagtcaatggcagccaaattgaaactgctgcaaggccatatgcatttattaaatttgatgcattcatacagaagaccaagaaactgtatttggataccagaacacagaggaaccttgctaagctgaacgatgagctctatgaggtgcaccagatcatgactcgcaatgttcaagaagttctcggtgttggtgaaaaactagaccaggtgagtgagatgtcaagtaggttgacttcggatactagaatctatgcagagaaggcgaaagatctcaatcgccaggcattgattcgtaaatatgcccccgttgctattgtgattgggatagtagtgatgctcttctgggtgaagaacaagatatggtgactggtgccatcttgcgttcacagttatcatgctggaaccagctgagttgtcttgtcttccctcgtgcaaccatatgtttgatcgtggttccaaaaagaaaagaaagatggctcgatggtttatcccgcatctgccgattcaagcgactactttagctatcaaaagcaaaaccacggtagtagagatagccttggaactgcacatttctattaactggacatgtataatagttctcgtgagcgcacaccatgtaatcgtcgaaattcatccatgtgttgtgacattttttgagcacagttgaacatgtggtggagcctggaggcaggtcattctcagcccaatctgacgtaataggtgagagggctattgcataacaggtggacctagctaggagaaacacaacatgaccccattatgggtcttgttcaatcatcatcatcgaagagacaaaggtcctgtttggggttctttctgcttctctcctctctctctctctctctctctctctctctttcataacttggttgcaaatgattgagtatcctaggatgtggtggtttatgttcatgaagcatgtatggcgcttgtgttgttgctcttgtaactaatactcatgtagtggaactagcgagtagtgctaatacaacactagtattgcttagtctttgcacacttttattgatagtatgtgaggaacttctagtgttcaaactcagcaccttagtaa

SEQ ID NO: 110031 - DNA, 1734 bp, Zea Mays
atgacggaaaatgattttagcaaaatcgtggtcgactcggccatcaccgacagaaaccggcttggacccgcccgcatgaaagccttgtgcggcttcagcttcaggtcgaagcgtatccctctgccctcccggctccctcaagcgctaatacggctggctgcgcgtcattctcttcctcttccggtgctcgtgctcgtgctcgtgctctccgccctccccctccgccacttcgcgcggaacggaacccaggccgccgccgacccagccaccgctaggcgtctaggcgaccgcgcggcatggtggcgcttttacactacctatgctagtttgcctgatgctacatttccacgatggttaagctgactatgatagcgcgtgtcactgatggccttccattgtcggagggattagatgatagtcgggatctcaaagatgctgacttctacaagcagcaagcaaaactgttgttcaagaacttgtccagagggcagcatgaggcgtcaaggatgtcaattgagacaggaccgtaccttttccactacatcattgaaggccgtgtttgctatttgactttgtgtgaccgttcttatcccaagaaacttgcattccagtatctcgaagatctcaaaaatgaatttgagaaagtcaatggcagccaaattgaaactgctgcaaggccatatgcatttattaaatttgatgcattcatacagaagaccaagaaactgtatttggataccagaacacagaggaaccttgctaagctgaacgatgagctctatgaggtgcaccagatcatgactcgcaatgttcaagaagttctcggtgttggtgaaaaactagaccaggtgagtgagatgtcaagtaggttgacttcggatactagaatctatgcagagaaggcgaaagatctcaatcgccaggcattgattcgtaaatatgcccccgttgctattgtgattgggatagtagtgatgctcttctgggtgaagaacaagatatggtgactggtgccatcttgcgttcacagttatcatgctggaaccagctgagttgtcttgtcttccctcgtgcaaccatatgtttgatcgtggttccaaaaagaaaagaaagatggctcgatggtttatcccgcatctgccgattcaagcgactactttagctatcaaaagcaaaaccacggtagtagagatagccttggaactgcacatttctattaactggacatgtataatagttctcgtgagcgcacaccatgtaatcgtcgaaattcatccatgtgttgtgacattttttgagcacagttgaacatgtggtggagcctggaggcaggtcattctcagcccaatctgacgtaataggtgagagggctattgcataacaggtggacctagctaggagaaacacaacatgaccccattatgggtcttgttcaatcatcatcatcgaagagacaaaggtcctgtttggggttctttctgcttctctcctctctctctctctctctctctctctctctttcataacttggttgcaaatgattgagtatcctaggatgtggtggtttatgttcatgaagcatgtatggcgcttgtgttgttgctcttgtaactaatactcatgtagtggaactagcgagtagtgctaatacaacactagtattgcttagtctttgcacacttttattgatagtatgtgaggaacttctagtgttcaaactcagcaccttagtaa

SEQ ID NO: 110032 - DNA, 182 bp, Zea Mays
tttttaatttatctatctttccttgctttactgatcccaatattagggttgaaaacggacggaaaaaaccccgtcccgacctgtaccgttttctatatttgacccgaccgtttccgtatttacggaaaaatatggaaacgggacggaaacgggagagagcttattccgtccgtttttgcggg

SEQ ID NO: 110033 - DNA, 1442 bp, Zea Mays
tgtgccgtgtgcgcggaggcttcctccgcgctcaacccgccccactgccctctgcccctcctcgcctactaaaactaaaaccctcttcttcctcggcacactggccaccctcccaaaggtgcattttgtgtgaggatccagacgcaggaggatggctctcaagaagttgctgcagctcttttgtgtcggaaagaaggattccaagaagaaaggtaaattcatcgatccactctggcaagcctctgcctcccgctcctctgtgaatgtcactgcaaacaagactcatttggatccctgttcaagtgggaatgacactgtaagcgtgcaaaaccatgaagttgaatcctcaagtacggtttcctcgtgggcaaggacagagcaaggaactgagattgctcatcatacgccctttagtcaatttgatgttgtccaagatttctcggatcaccactatgcaaagacttcagcaggaaaggtcacaaaggattgggtgaaggcaatccaaagtgaatgggatcttctacagaaaaacctacctgaatctatatacgttagagtctatgaggacaggactgatctgctgagggctgccatagtcgggccagcaggaactccataccatgatggtctgttcttcttcgatgtccgttttccttgcgaatacccaaagtgcccaccaaaagtatactaccattctggcggacttcggctgaacccgaacctgtacgagagcgggaaagtgtgcctgagccttctgaacacctggtggggcaaggggtgcgagaagtggggcaagtcgagctccagcatgctgcaggttctggtctccatccagggcctcgtgctgaatgacaggccatacttcaatgagccaggatccaagaactcggctgaaacgacaggtggtgagaggtgttccctggcttacaatcagacggccttcgtcagatcatgcaagacgatgctgtattcactccggaagcctccaatgcattttgagacccttgtgttgtggcacttccacgagcatgagcgtgccatcctcgacgcttgcagggcttacatgtctgggacagtcgttgggtcgtctgctgggactgggagcaaccgcagatacgtccatgacaagtgctttgcagaattccacaagtcgctgacgctctacactgaacatctcagggctgagtttgctgcaaacacaagacgagtgatggagctggaaacagaagacgagatcgtgcctagcatagcagctagcgtgaaatcgtgttgaaggcaaatgccccacggtgttgtatgttgctctcatcatcagatatttgctggcttagctatttctagcctcattctacttcattcatgtcacttgaataatctaattcatggcaattgtacctgtccctatacctagatggcttaaaatctgaaggtttattacagtt

SEQ ID NO: 110034 - DNA, 2148 bp, Zea Mays
tgtgccgtgtgcgcggaggcttcctccgcgctcaacccgccccactgccctctgcccctcctcgcctactaaaactaaaaccctcttcttcctcggcacactggccaccctcccaaaggtgcattttgtgtgaggatccagacgcaggaggatggctctcaagaagttgctgcagctcttttgtgtcggaaagaaggattccaagaagaaaggtaaattcatcgatccactctggcaagcctctgcctcccgctcctctgtgaatgtcactgcaaacaagactcatttggatccctgttcaagtgggaatgacactgtaagcgtgcaaaaccatgaagttgaatcctcaagtacggtttcctcgtgggcaaggacagagcaaggaactgagattgctcatcatacgccctttagtcaatttgatgttgtccaagatttctcggatcaccactatgcaaagacttcagcaggaaaggtcacaaaggattgggtgaaggcaatccaaagtgaatgggatcttctacagaaaaacctacctgaatctatatacgttagagtctatgaggacaggactgatctgctgagggctgccatagtcgggccagcaggaactccataccatgatggtctgttcttcttcgatgtccgttttccttgcgaatacccaaagtgcccaccaaaagtatactaccattctggcggacttcggctgaacccgaacctgtacgagagcgggaaagtgtgcctgagccttctgaacacctggtggggcaaggggtgcgagaagtggggcaagtcgagctccagcatgctgcaggttctggtctccatccagggcctcgtgctgaatgacaggccatacttcaatgagccaggatccaagaactcggctgaaacgacaggtggtgagaggtgttccctggcttacaatcagacggccttcgtcagatcatgcaagacgatgctgtattcactccggaagcctccaatgcattttgagacccttgtgttgtggcacttccacgagcatgagcgtgccatcctcgacgcttgcagggcttacatgtctgggacagtcgttgggtcgtctgctgggactgggagcaaccgcagatacgtccatgacaagtgctttgcagaattccacaagtcgctgacgctctacactgaacatctcagggctgagtttgctgcaaacacaagacgagtgatggagctggaaacagaagacgagatcgtgcctagcatagcagctagcgtgaaatcgtgttgaaggcaaatgccccacggtgttgtatgttgctctcatcatcagatatttgctggcttagctatttctagcctcattctacttcattcatgtcacttgaataatctaattcatggcaattgtacctgtccctatacctagatggcttaaaatctgaaggtttattacagtttctttctgatgaatctgtcctctcttatgaaagtaattgctgactagttagttatctgtgcgttgcgacggaaaacgaacaccgctgataaaagtattagtagtaattaattttggatcacttcatgagatgtgctctttcggcatgaggaaaaggaggaaagactcattcatttttattcatcaatttaaacaaagtagaagaagcaactaaacaccatacatgttcatatatcaaacccatatattgtcatatatcaaactcatatattgtctaatagctatacctgtggtcaacaagatgttattaatcaattacgagatttcttatgaatacgcgatgtgtcaatactaatacgctattttttcctcaaaaacaatgatataaggatatgctattttgtaaacattagtaaagatttgtaaatagtttatattggctaattattgatactagttgtcggaggatattctgtatcgtgccccttggccctgacatagtagtcgacggcctgctacatgggtaggcccttgtactccatgacagtggtcatgtccacttgagtgtgcccgacacggcgcacgcgccacatgtgcatgtgctgaacctgatcagcggtgaatccccaatgcgcccgagcatcttgctcatcaaccgtatgtggacatggccgccgcacaccccaacatctccgatgcgtacacac

SEQ ID NO: 110035 - DNA, 1472 bp, Zea Mays
cctctgcccctcctcgcctactaaaactaaaaccctcttcttcctcggcacactggccaccctcccaaaggtgcattttgtgtgaggatccagacgcaggaggatggctctcaagaagttgctgcagctcttttgtgtcggaaagaaggattccaagaagaaaggtaaattcatcgatccactctggcaagcctctgcctcccgctcctctgtgaatgtcactgcaaacaagactcatttggatccctgttcaagtgggaatgacactgtaagcgtgcaaaaccatgaagttgaatcctcaagtacggtttcctcgtgggcaaggacagagcaaggaactgagattgctcatcatacgccctttagtcaatttgatgttgtccaagatttctcggatcaccactatgcaaagacttcagcaggaaaggtcacaaaggattgggtgaaggcaatccaaagtgaatgggatcttctacagaaaaacctacctgaatctatatacgttagagtctatgaggacaggactgatctgctgagggctgccatagtcgggccagcaggaactccataccatgatggtctgttcttcttcgatgtccgttttccttgcgaatacccaaagtgcccaccaaaagtatactaccattctggcggacttcggctgaacccgaacctgtacgagagcgggaaagtgtgcctgagccttctgaacacctggtggggcaaggggtgcgagaagtggggcaagtcgagctccagcatgctgcaggttctggtctccatccagggcctcgtgctgaatgacaggccatacttcaatgagccaggatccaagaactcggctgaaacgacaggtggtgagaggtgttccctggcttacaatcagacggccttcgtcagatcatgcaagacgatgctgtattcactccggaagcctccaatggtgaactgaacaaatatgaatggatacttcatctcttgattgattgattgattgattgatatagcttcatctccttccctgcagcattttgagacccttgtgttgtggcacttccacgagcatgagcgtgccatcctcgacgcttgcagggcttacatgtctgggacagtcgttgggtcgtctgctgggactgggagcaaccgcagatacgtccatgacaagtgctttgcagaattccacaagtcgctgacgctctacactgaacatctcagggctgagtttgctgcaaacacaagacgagtgatggagctggaaacagaagacgagatcgtgcctagcatagcagctagcgtgaaatcgtgttgaaggcaaatgccccacggtgttgtatgttgctctcatcatcagatatttgctggcttagctatttctagcctcattctacttcattcatgtcacttgaataatctaattcatggcaattgtacctgtccctatacctagatggcttaaaatctgaaggtttatt

SEQ ID NO: 110036 - DNA, 919 bp, Zea Mays
cgccgatttccggattctttccttttcccctccgccgccggggattgtggttgtggttgtggcttccatatcctcatcctcatggcgtgatagaaggttgcttcgtttctttgattggccatggacgtacgtctttcgttttctcggtgggggatgggagggggttcttgatagtgatgcgctgctgctacagtgctcctgctcctgctcctgctgctcgacgctgacggctcgagcttatccctccggcctccggggtctcgctctctggattattcctacttctttttctttctttttgtctcatcttgaattgaaaaacttggccctgcggtgtctcgcctccactggtcactggagcactggaccgatgtatatagagagagaccgaccgacctggcgtcacgcacgcaccgcactgattgggctccaagatcggccgctgccaactgggggcctcaccgccacccgttcttggaaaacagcacgctacttgcttgaaagcaaagggagatacttgccgcgttgggattctccaactccaactccaaccaagacgaacgatttcatcccagaaattagattatcaggtgcttctatttgtttgtgcatctcttgtttgcgcctgcgatctggacctttgtgggctcgtcaacaaaagagaagaggagcctttcttgttggtagttacaaccggtggcgtctcttgtggtgcaggtgcattttgtgtgaggatccagacgcaggaggatggctctcaagaagttgctgcagctcttttgtgtcggaaagaaggattccaagaagaaaggtgctgcatctcagcctggttttcagaattcagaacaactactctcattcgtcttcttgaatttccagtttctctctcttccctgtttcctctaagcactggttttcc

SEQ ID NO: 110037 - DNA, 2338 bp, Zea Mays
cgccgatttccggattctttccttttcccctccgccgccggggattgtggttgtggttgtggcttccatatcctcatcctcatggcgtgatagaaggttgcttcgtttctttgattggccatggacgtacgtctttcgttttctcggtgggggatgggagggggttcttgatagtgatgcgctgctgctacagtgctcctgctcctgctcctgctgctcgacgctgacggctcgagcttatccctccggcctccggggtctcgctctctggattattcctacttctttttctttctttttgtctcatcttgaattgaaaaacttggccctgcggtgtctcgcctccactggtcactggagcactggaccgatgtatatagagagagaccgaccgacctggcgtcacgcacgcaccgcactgattgggctccaagatcggccgctgccaactgggggcctcaccgccacccgttcttggaaaacagcacgctacttgcttgaaagcaaagggagatacttgccgcgttgggattctccaactccaactccaaccaagacgaacgatttcatcccagaaattagattatcaggtgcattttgtgtgaggatccagacgcaggaggatggctctcaagaagttgctgcagctcttttgtgtcggaaagaaggattccaagaagaaaggtaaattcatcgatccactctggcaaggtacccatgatgtccaatatcaagcttagcatatgttcttctttcccctgatgttttagctcataattgcatgagagtgtgacctggacacatttattataatttattttggtactggtgcagattatttattaaataacgagttatttagggacctaggagttggttgtgtagattcagctcaactgagctcaccatatcagggcttgataactattattgtataacttatatttaacaaataactcgttaacttcagttgaagtaagcactcaaaattcaaaactttgaaaggatcgagtaacttcttttcatttggagtatggtaggcctgactgaacctatgggttaaaacttcattatataaatgatgtcacatatctctgctctaagcctgaattatctatttgcctacatcctggatcccagcctctgcctcccgctcctctgtgaatgtcactgcaaacaagactcatttggatccctgttcaagtgggaatgacactgtaagcgtgcaaaaccatgaagttgaatcctcaagtacggtttcctcgtgggcaaggacagagcaaggaactgagattgctcatcatacgccctttagtcaatttgatgttgtccaagatttctcggatcaccactatgcaaagacttcagcaggaaaggtcacaaaggattgggtgaaggcaatccaaagtgaatgggatcttctacagaaaaacctacctgagtctatgaggacaggactgatctgctgagggctgccatagtcgggccagcaggaactccataccatgatggtctgttcttcttcgatgtccgttttccttgcgaatacccaaagtgcccaccaaaagtatactaccattctggcggacttcggctgaacccgaacctgtacgagagcgggaaagtgtgcctgagccttctgaacacctggtggggcaaggggtgcgagaagtggggcaagtcgagctccagcatgctgcaggttctggtctccatccagggcctcgtgctgaatgacaggccatacttcaatgagccaggatccaagaactcggctgaaacgacaggtggtgagaggtgttccctggcttacaatcagacggccttcgtcagatcatgcaagacgatgctgtattcactccggaagcctccaatgcattttgagacccttgtgttgtggcacttccacgagcatgagcgtgccatcctcgacgcttgcagggcttacatgtctgggacagtcgttgggtcgtctgctgggactgggagcaaccgcagatacgtccatgacaagtgctttgcagaattccacaagtcgctgacgctctacactgaacatctcagggctgagtttgctgcaaacacaagacgagtgatggagctggaaacagaagacgagatcgtgcctagcatagcagctagcgtgaaatcgtgttgaaggcaaatgccccacggtgttgtatgttgctctcatcatcagatatttgctggcttagctatttctagcctcattctacttcattcatgtcacttgaataatctaattcatggcaattgtacctgtccctatacctagatggcttaaaatctgaaggtttattacagtttctttctgatg

SEQ ID NO: 110038 - DNA, 1760 bp, Zea Mays
cgccgatttccggattctttccttttcccctccgccgccggggattgtggttgtggttgtggcttccatatcctcatcctcatggcgtgatagaaggttgcttcgtttctttgattggccatggacgtacgtctttcgttttctcggtgggggatgggagggggttcttgatagtgatgcgctgctgctacagtgctcctgctcctgctcctgctgctcgacgctgacggctcgagcttatccctccggcctccggggtctcgctctctggattattcctacttctttttctttctttttgtctcatcttgaattgaaaaacttggccctgcggtgtctcgcctccactggtcactggagcactggaccgatgtatatagagagagaccgaccgacctggcgtcacgcacgcaccgcactgattgggctccaagatcggccgctgccaactgggggcctcaccgccacccgttcttggaaaacagcacgctacttgcttgaaagcaaagggagatacttgccgcgttgggattctccaactccaactccaaccaagacgaacgatttcatcccagtgcattttgtgtgaggatccagacgcaggaggatggctctcaagaagttgctgcagctcttttgtgtcggaaagaaggattccaagaagaaaggtaaattcatcgatccactctggcaagcctctgcctcccgctcctctgtgaatgtcactgcaaacaagactcatttggatccctgttcaagtgggaatgacactgtaagcgtgcaaaaccatgaagttgaatcctcaagtacggtttcctcgtgggcaaggacagagcaaggaactgagattgctcatcatacgccctttagtcaatttgatgttgtccaagatttctcggatcaccactatgcaaagacttcagcaggaaaggtcacaaaggattgggtgaaggcaatccaaagtgaatgggatcttctacagaaaaacctacctgaatctatatacgttagagtctatgaggacaggactgatctgctgagggctgccatagtcgggccagcaggaactccataccatgatggtctgttcttcttcgatgtccgttttccttgcgaatacccaaagtgcccaccaaaagtatactaccattctggcggacttcggctgaacccgaacctgtacgagagcgggaaagtgtgcctgagccttctgaacacctggtggggcaaggggtgcgagaagtggggcaagtcgagctccagcatgctgcaggttctggtctccatccagggcctcgtgctgaatgacaggccatacttcaatgagccaggatccaagaactcggctgaaacgacaggtgggcttacatgtctgggacagtcgttgggtcgtctgctgggactgggagcaaccgcagatacgtccatgacaagtgctttgcagaattccacaagtcgctgacgctctacactgaacatctcagggctgagtttgctgcaaacacaagacgagtgatggagctggaaacagaagacgagatcgtgcctagcatagcagctagcgtgaaatcgtgttgaaggcaaatgccccacggtgttgtatgttgctctcatcatcagatatttgctggcttagctatttctagcctcattctacttcattcatgtcacttgaataatctaattcatggcaattgtacctgtccctatacctagatggcttaaaatctgaaggtttattacagtttctttctgatgaa

SEQ ID NO: 110039 - DNA, 1542 bp, Zea Mays
acgcacgcaccgcactgattgggctccaagatcggccgctgccaactgggggcctcaccgccacccgttcttggaaaacagcacgctacttgcttgaaagcaaagggagatacttgccgcgttgggattctccaactccaactccaaccaagacgaacgatttcatcccagtgcattttgtgtgaggatccagacgcaggaggatggctctcaagaagttgctgcagctcttttgtgtcggaaagaaggattccaagaagaaaggtaaattcatcgatccactctggcaagcctctgcctcccgctcctctgtgaatgtcactgcaaacaagactcatttggatccctgttcaagtgggaatgacactgtaagcgtgcaaaaccatgaagttgaatcctcaagtacggtttcctcgtgggcaaggacagagcaaggaactgagattgctcatcatacgccctttagtcaatttgatgttgtccaagatttctcggatcaccactatgcaaagacttcagcaggaaaggtcacaaaggattgggtgaaggcaatccaaagtgaatgggatcttctacagaaaaacctacctgaatctatatacgttagagtctatgaggacaggactgatctgctgagggctgccatagtcgggccagcaggaactccataccatgatggtctgttcttcttcgatgtccgttttccttgcgaatacccaaagtgcccaccagtacgtgaccactagacatccatcatcctgcctctgcctctcttgtatagtttcttccattcaaagtgagcagcagtacttgattgatgtcgtgtgttcagaaagtatactaccattctggcggacttcggctgaacccgaacctgtacgagagcgggaaagtgtgcctgagccttctgaacacctggtggggcaaggggtgcgagaagtggggcaagtcgagctccagcatgctgcaggttctggtctccatccagggcctcgtgctgaatgacaggccatacttcaatgagccaggatccaagaactcggctgaaacgacaggtggtgagaggtgttccctggcttacaatcagacggccttcgtcagatcatgcaagacgatgctgtattcactccggaagcctccaatgcattttgagacccttgtgttgtggcacttccacgagcatgagcgtgccatcctcgacgcttgcagggcttacatgtctgggacagtcgttgggtcgtctgctgggactgggagcaaccgcagatacgtccatgacaagtgctttgcagaattccacaagtcgctgacgctctacactgaacatctcagggctgagtttgctgcaaacacaagacgagtgatggagctggaaacagaagacgagatcgtgcctagcatagcagctagcgtgaaatcgtgttgaaggcaaatgccccacggtgttgtatgttgctctcatcatcagatatttgctggcttagctatttctagcctcattctacttcattcatgtcacttgaataatctaattcatggcaa

SEQ ID NO: 110040 - DNA, 958 bp, Zea Mays
aatttcttggttcggttcttgatcacccgttcttccttatccaggaaattagattatcaggtgcattttgtgtgaggatccagacgcaggaggatggctctcaagaagttgctgcagctcttttgtgtcggaaagaaggattccaagaagaaagcctctgcctcccgctcctctgtgaatgtcactgcaaacaagactcatttggatccctgttcaagtgggaatgacactgtaagcgtgcaaaaccatgaagttgaatcctcaagtacggtttcctcgtgggcaaggacagagcaaggaactgagattgctcatcatacgccctttagtcaatttgatgttgtccaagatttctcggatcaccactatgcaaagacttcagcaggaaaggtcacaaaggattgggtgaaggcaatccaaagtgaatgggatcttctacagaaaaacctacctgaatctatatacgttagagtctatgaggacaggactgatctgctgagggctgccatagtcgggccagcaggaactccataccatgatggtctgttcttcttcgatgtccgttttccttgcgaatacccaaagtgcccaccaaaagtatactaccattctggcggacttcggctgaacccgaacctgtacgagagcgggaaagtgtgcctgagccttctgaacacctggtggggcaaggggtgcgagaagtggggcaagtcgagctccagcatgctgcaggttctggtctccatccagggcctcgtgctgaatgacaggccatacttcaatgagccaggatccaagaactcggctgaaacgacaggtgggcttacatgtctgggacagtcgttgggtcgtctgctgggactgggagcaaccgcagatacgtccatgacaagtgctttgcagaattccacaagtcgctgacgctctacactgaacatctcagggctgagtttgctgc

SEQ ID NO: 110041 - DNA, 1228 bp, Zea Mays
gggctcgtcaacaaaagagaagaggagcctttcttgttggtagttacaaccggtggcgtctcttgtggtgcaggtgcattttgtgtgaggatccagacgcaggaggatggctctcaagaagttgctgcagctcttttgtgtcggaaagaaggattccaagaagaaaggtaaattcatcgatccactctggcaagcctctgcctcccgctcctctgtgaatgtcactgcaaacaagactcatttggatccctgttcaagtgggaatgacactgtaagcgtgcaaaaccatgaagttgaatcctcaagtacggtttcctcgtgggcaaggacagagcaaggaactgagattgctcatcatacgccctttagtcaatttgatgttgtccaagatttctcggatcaccactatgcaaagacttcagcaggaaaggtcacaaaggattgggtgaaggcaatccaaagtgaatgggatcttctacagaaaaacctacctgaatctatatacgttagagtctatgaggacaggactgatctgctgagggctgccatagtcgggccagcaggaactccataccatgatggtctgttcttcttcgatgtccgttttccttgcgaatacccaaagtgcccaccaaaagtatactaccattctggcggacttcggctgaacccgaacctgtacgagagcgggaaagtgtgcctgagccttctgaacacctggtggggcaaggggtgcgagaagtggggcaagtcgagctccagcatgctgcaggttctggtctccatccagggcctcgtgctgaatgacaggccatacttcaatgagccaggatccaagaactcggctgaaacgacaggtggtgagaggtgttccctggcttacaatcagacggccttcgtcagatcatgcaagacgatgctgtattcactccggaagcctccaatgcattttgagacccttgtgttgtggcacttccacgagcatgagcgtgccatcctcgacgcttgcagggcttacatgtctgggacagtcgttgggtcgtctgctgggactgggagcaaccgcagatacgtccatgacaagtgctttgcagaattccacaagtcgctgacgctctacactgaacatctcagggctgagtttgctgcaaacacaagacgagtgatggagctggaaacagaagacgagatcgtgcctagcatagcagctagcgtgaaatcgtgttga

SEQ ID NO: 110042 - DNA, 834 bp, Zea Mays
cgtggctctgcctggtgatcacaactccacgtcacacacctcacagagctgcagcagcatcagctgccacctcctgcctctcctccttccttcctgcctgcataggttgctacacgtatatattctgaagaagagatcgagatgaccagcgtgtggaagaccaaggttctgcctggcctcaacaagatctttgacaaggatggcaagaaggctgcagctgcaggcttcttgaagtccttcaacaaggaggagtttgacaaggagattgaggacaagaagacagagctggagcccaaggtcgtggaggcctacgaagcatctcctcctgaggtcaaggctctcttcaaggataagaagccagtcaaggtcagcaagaagaactcggctgcagtcaccaagttcctcgatgagctggctaagattggtaagcatgttagttctttgtatgtatgtatgcctcagtagtttccatgcatgacaactgaagttaataggtttcctttgcttcctagtatattatatgctgttctaggatttcaactgcatcagctcctctaacccttccagtgctatagaacagaagagcaaaactgagaaaaaaacacaactaagggtaaaaatgagcacaccagcaaacccgagagcaccaccataaaaacacctatattattaggttcgttgtaagtagtacactatttttttttgttaacaaactgtgtcacttcatcttatcagaacatcaaacctgtttttttttcaccctggcgaaaatgaagtgtaaccaaataaatatacatatttgtcataattctgtttttctgtttattgtgaact

SEQ ID NO: 110043 - DNA, 1258 bp, Zea Mays
cgtggctctgcctggtgatcacaactccacgtcacacacctcacagagctgcagcagcatcagctgccacctcctgcctctcctccttccttcctgcctgcataggttgctacacgtatatattctgaagaagagatcgagatgaccagcgtgtggaagaccaaggttctgcctggcctcaacaagatctttgacaaggatggcaagaaggctgcagctgcaggcttcttgaagtccttcaacaaggaggagtttgacaaggagattgaggacaagaagacagagctggagcccaaggtcgtggaggcctacgaagcatctcctcctgaggtcaaggctctcttcaaggataagaagccagtcaaggtcagcaagaagaactcggctgcagtcaccaagttcctcgatgagctggctaagattgacttccctggagccaaggtggtgagcgaggcggtggccaagtccggcacctcgcccctgcttccggcgatcaccttcatcttggacaaggtcgcaccgtttatccccaaggaggagcccaaggaagagccggcggcggaggccacctcccgggaagtcgccgtggaggagaagaaggaggaggccgagccagctgcagcgacggaggcggcaccggcgccggcagagacaccgtcggaggcggcggtggtagaggagaagaaggaagaagagaagaaggaagaggaggataagccggctgccgaagaggcggcgccgccagcagcagctgctgctgctgctgaggagaagtgatcctgtcgacggatcgagcatgcaaagcgctccctcctcgctcccttgcttgctgctggtaaattaaattaagttgccgtgatacttaagcgtagccgcacggagtgaaaagttatcaagtaaaagcagacaaacacttggcatgcatggacattaatttgttattctttgtaccgtcgtcgtctcgatgaaccgcgtgtacatttgtagtgtggggttttctttgtttccgatttgggggtgatcattacaagaatgtgtaattatttatgttcatatgtttgttgatgatggaaggacatatttaagaagacaactcttttgtgtatatatatttcttgttattttcaaaggattaaagtggataatccaattgttaatttgttgttgatctttttaccttattattaagtacattattaataagaattttttataaaatgttttgtacattatttactctctacaaaaaacgaaaaaa

SEQ ID NO: 110044 - DNA, 1899 bp, Zea Mays
tgtgctgttctgtgcagccgtgcagggacgccaacgactccgagctctcctccatccaactctcatggcgggctaccgcgggggctcctccgtctccgcctccaccggcggcgggggcagcgcggtggccgcagccttctccacccggctgctgctactcctcacgctgctgccgctcgcgctcgccgccttcgccttcgcgctccagtggcgcggcggtatgcgggacccggcaggtgcagcctggcccgccgacgcgcagcgcttcccgggcatggagaacagccccctctcctcctcccacggaggagcaggctcctacttcgccgtctcctcctcctcctcctccccgggagccgactgcgccgagatccttggccggagcgccgcgtcctccaatggaatctcgctctaccgcgggtggagcttcgactccgaatctgctataacccccaagatctgtatcacgggaagcacatctgctagcctacaccagattcttccatggttgtattatcacaaggtcattggtgtttcccatttctttctttttgttgaaggagaggctgcaaagccagctgtcacctctgttcttgaatctattcggggtgtaaaaattatttacagaactaaagaactgaaagagaaacaggagaaaagccgcatttggaatgagacgtggctagcaggtttcttttacaagccgtgtaattacgaactatttgtcaagcaatcactaaacatggaaatggctattattatggcaagggatgctggaatggattggatcattcacctcgatactgatgagttgattcatccagctggtgcccgagagtactccctgaggcgattgcttttagatgttcctgacaatgttgacatggttatcttccccaattatgagagcagcattgaacgtgatgacattaaggatccttttactgaggtttccatgtttaagaaaaattatgaccatcttccaaaggatacatactttggcctgtacaaagaagcaacacgtggtaatccaaactacttccttacttatggtaatgggaaatcagctgcaagggttcaggagcatttgcgaccgaacggtgctcatagatggcataattacatgaaatccccaaatgaaatcaaattggaggaggctgctattctgcattacacctacacaaagttctcagacctaacctcaaggagggatagatgcggctgcaaaccaactaaagaagatgtgaagcgatgttttatcttggaatttgaccgtttggcctttataattgcatcaacagctactgaggaggagatgaggaactggtacaaggaacatgttgtatggaccgatagagacaccaatttgaaacttttaaggaagagtgtcttgacacgcatatatgcgcccatggctattatccgtggcctcaaggaatctggcgtctttaccaatgcagtaacatcagcgaaagcacagtcaaaaacgaagtcatcaaacatgggtctcggaaacaaggatcctatccagccaaacggaactgctggtcagtccacactggaaggcagtcatggaaagttgcaggcaaccgtgagaaagatcctggaaatggttgacacacaggaagaagcagcgatgccaccaatgtcgcccccgggttttcttgagctgactgaaagtgtcactgccttttcatgacgctttggtttaaccatgcgtgatgcatgcagccttgagcatacgaatagcattggcttgtttggtcgtcgtcgtatcttgcaaccccagaatgaccagatgtatcgtgctgatgtaaaattgctagttatcaccatgcaaagagctttaaatcaacttcagaaggtattataaagttggtgcaaattataacaaatcca

SEQ ID NO: 110045 - DNA, 693 bp, Zea Mays
agatttagattggcgataaatagtgccgagagagaactctctcagcactccacccctaaaccatactctctactacatgtgagcaagcaagttccaggtcctagatatcaccaccaagaccagttatacctacaaaagctttgcctgcaagcatgttcctcaggcggctgcagatcttcgtacagcaccttcaagcttggattgaatgagctgcgtctcttcgtagggattgccttgatcactcctagctctggtgcactacccgatgctccagcatcaccgctcttgtgttctgatgactcttcctcctcctcctcctcctcctcctctggcaccactgacccaatatcattacccgccatgtagtgcttgcatgccgcgagaatcgtgtgcccatgcacccgaaagtggccagcgacaagatctgcaaagtgctgtgaggacaacacacgccaaagctggatcagttcggctaggcagcagaagcccaaattcaaattttagaaacaaattacctctggaggcctccgaagtgagtataacatagtcttgcatgagtgcagaaaggtgttgtcattatagtccaaagccaaccgctctccattcggagtgttggcataggactcatatcctggctcgttgtaatatggcttgtcattcaaaatcagagcttgaatggagacaagaacttgc

SEQ ID NO: 110046 - DNA, 468 bp, Zea Mays
atggtgctggcgactctggcgaaagaagatacacttcctctgatttttcagaaagaagatacacagatcatacctttttttggtggatcagaaattgtgcatatgcgtgtcatggttctgctgctcctgccattgcttgcccaactgcaaaaggtcatgctgcttggattgctcctgttgctcatgcccagacgtgccatgctgcaagcccagcatgcaacaaaccatgctttgggtccaacagttgttcatgatgcaagccagattgcccatcctgtagttcgagcagcagctcgtgctgcaatcagtcatattgcaacccaaactgcagctgcaatccaccacgccgtaaaccaaactgtagctcttactacaatatgtcatgctgcaaaccgaactacagctcatgttgtaaaccgaaccgagctgcttcatggccctcgccacgttctaattgctggcgcctag

SEQ ID NO: 110047 - DNA, 270 bp, Zea Mays
ttaatgcagcaacagggcatggcaacaaattttccaccgccaccacaatggagccagtttgcaaacacaccagctctgccaccacagttcaacacccctccgacacatatacctgcactaggagatagggttacgcccgaagcgggtggtagtgggtctgatcccgcagcagggactggatttgttgactccctcttcgcgttccctcctcctagtggtggtggcggcagcggtcaaagctctaaccacccaagtggtggttatctctaa

SEQ ID NO: 110048 - DNA, 894 bp, Zea Mays
gtcaaggcgtggcggctctccgacggttcctgcgtcgactccttcgcggcgcacgacgggcccgtcaacgccatggtggtgaacgaggcggacgggtgcgtcttcacggggtccgccgacggcaccgtcaagatgtggcggcgcgtgtacggcggcacggcgcacgcgctcatcatcgtgctccgctccgagctgtctcctgtgaacgcgctggcgctgtgccacgcggtgggagggagcggcggcggcgcaacaaggcggtgctgcttcctctacgcggggtgttcggacggctacgtgaacgtgtgggagaaggaggccaccgtggggcggccgacgcacgccggatacctcaagggccaccgcctggcggtgttctgcctcgcgtccgggtgcggcgggcgggtggtagtgagcgggtcggaggacgcaacgatgcgcgtgtggaggcgggaggggatcagcaaaggcggcggcggggcggtgcacacgtgcctggccgtgattgaggggcaccgggggcccgtgcggtgcctggccgtgggcggcggcgaggccggggaggtggaaggcagcatggtggtgtacagctccggtctagataagagcgtgaaggtgtggaggatacgtgtggtggggaaggaggaggaagaggacgatgacgaggagctagacgaggacggcgtcgaggacaacgatcaccccgaggcagcggtggcgggggagatatttatggaaggagggaagggtgatggcctcgacgcgcatgcgatccccgtcgcgatggacgacgtggtggatggcacggaggacgaggaggccgagttcgtgggctcgacgccggtgctgtcgccggtgtgggtggagaagcggcggcacacgagccgtgggtga

SEQ ID NO: 110049 - DNA, 481 bp, Zea Mays
caagcgcaatataaacatcgcgccttgcgctgggcgcataaaaccctactaaccgcgtctcctctccagcgcccgccgtcgccgccgccctcctcttggtcccgccgtccgtcgaggtcatcatggtgagggtcagtgtgctcaacgatgcgctcaagtccatgtacaatgcagagaagaggggcaagaggcaggtcatgatcaggccgtcgtccaaggtgatcatcaagttcctgacggtcatgcagcgtcatggttagttctcaatctcgtgccccatttcaattggcagcattccgaggatacgtacctgattagtgctatattattaggatacattggcgagttcgagtacgtggatgaccacagagctgggaagattgtggtggaactgaacggcagactaaacaaatgcggtgtaattagcccccggtttgatgttggggtaaaggaaatcgaaggctggactgcgaggctgctt

SEQ ID NO: 110050 - DNA, 775 bp, Zea Mays
caagcgcaatataaacatcgcgccttgcgctgggcgcataaaaccctactaaccgcgtctcctctccagcgcccgccgtcgccgccgccctcctcttggtcccgccgtccgtcgaggtcatcatggtgagggtcagtgtgctcaacgatgcgctcaagtccatgtacaatgcagagaagaggggcaagaggcaggtcatgatcaggccgtcgtccaaggtgatcatcaagttcctgacggtcatgcagcgtcatggatacattggcgagttcgagtacgtggatgaccacagagctgggaagattgtggtggaactgaacggcagactaaacaaatgcggtgtaattagcccccggtttgatgttggggtaaaggaaatcgaaggctggactgcgaggctgcttccgtctcgccagtttggctatatcgtgcttacaacctctgcgggaattatggatcacgaggaggcccgacgcaagaacgtcggaggcaaagtccttggtttcttttattaattaaagggtcgtccgagtttcttctattaaatggtgggtcgaccgagtttttgtttttgtttttggtctgaattgaatagagtgtttgcttcgttaagactggaatgtgttatgtgcctttgttaagactggatcactggaatgtgggaatctttatgagtgattcggcatgtaactaactggaggccacgagacagtttggcgcaaggcctatgaccccctaggaggagtgtcgatcaactagattctcacatttttta

SEQ ID NO: 110051 - DNA, 1017 bp, Zea Mays
acgcctctttccctccgtcccctcgaaagatgtcagatccgggttttggttcggtttcctcgatgaggcggtagagcgggtcaggtgctgcggatggggctggctgaggaggactacggtggcgttgcgcgcgcgcgcgcctcgttagcttcatagtttatccctacctcttgcgtgctcaagccaggaacggtggcgttggctttgatgcgccttctgcttttacaccattgtattgattgctgtgttcagcttgtctgcaattctgatcagcaagtctgtttaagtacaccagatagcaggtgtttggtgcagagagatcccatactttgcgagtctgtagttggcagcactttgggtcatcatggtgagggtcagtgtgctcaacgatgcgctcaagtccatgtacaatgcagagaagaggggcaagaggcaggtcatgatcaggccgtcgtccaaggtgatcatcaagttcctgacggtcatgcagcgtcatggatacattggcgagttcgagtacgtggatgaccacagagctgggaagattgtggtggaactgaacggcagactaaacaaatgcggtgtaattagcccccggtttgatgttggggtaaaggaaatcgaaggctggactgcgaggctgcttccgtctcgccagtttggctatatcgtgcttacaacctctgcgggaattatggatcacgaggaggcccgacgcaagaacgtcggaggcaaagtccttggtttcttttattaattaaagggtcgtccgagtttcttctattaaatggtgggtcgaccgagtttttgtttttgtttttggtctgaattgaatagagtgtttgcttcgttaagactggaatgtgttatgtgcctttgttaagactggatcactggaatgtgggaatctttatgagtgattcggcatgtaactaactggaggccacgagacagtttggcgcaaggcctatgaccccctaggaggagtgtcgatcaactagattctcacatttttta

SEQ ID NO: 110052 - DNA, 726 bp, Zea Mays
gtcatttatacctttggtcgtgctacgtagatgtaaatggctatttcgaatgctactcactccagcacagcatgtgatccttacaattgcatctttttgttcacgcaaggtcatcatggtgagggtcagtgtgctcaacgatgcgctcaagtccatgtacaatgcagagaagaggggcaagaggcaggtcatgatcaggccgtcgtccaaggtgatcatcaagttcctgacggtcatgcagcgtcatggatacattggcgagttcgagtacgtggatgaccacagagctgggaagattgtggtggaactgaacggcagactaaacaaatgcggtgtaattagcccccggtttgatgttggggtaaaggaaatcgaaggctggactgcgaggctgcttccgtctcgccagtttggctatatcgtgcttacaacctctgcgggaattatggatcacgaggaggcccgacgcaagaacgtcggaggcaaagtccttggtttcttttattaattaaagggtcgtccgagtttcttctattaaatggtgggtcgaccgagtttttgtttttgtttttggtctgaattgaatagagtgtttgcttcgttaagactggaatgtgttatgtgcctttgttaagactggatcactggaatgtgggaatctttatgagtgattcggcatgtaactaactggaggccacgagacagtttggcgcaaggcctatgacc

SEQ ID NO: 110053 - DNA, 1044 bp, Zea Mays
ttttgcttctcccttgctgttgttttctccctctagagactagagaccccatctctagaaagagaaagcaggacaagcaaagctaccggccagacagcagctagctatagctctaaagattgccctgacctgatcagatgatatgagctttttgcaagatggtggctatagcagctagagtagtatttctgttgtgatgtgctcaagccaagcatgatatgggtggagaattcaggagctctttgatgcagcagatggtgtggagtagtagtggcggcggtacagacagcaagaatatgatgagtagtagtttgatgccttgtgccgaggagcaagaagaagagggctccaacaagatgccccctttatcttctccttccatgctcctcctcccgcagcaccacctccaaatcttctcgggcctgcctctgcctctgcctcctgaggtgctgaacgacagctctgctacttctgatctgcatgatggccgggaaagcagcatgccggagtcatggagccagctgcttcttgggggattagtcggagatcacgagagatacaacgctgccacagctttactgtcaaaaggattagaggagcgacctgcagcttacaattgctatgaccctggacatggtggtggtgaggagatccagacatcggggaccaacattaggtctcatcaggtgagccaggcgctcttagcgtcgtcctctcctaggtcctgcatcaccacaagcctcggcagcaacatgctggacttctcaaacaccaccgtgccgccggcaccggatctgaagaatcatcactccgataactcttctgagggtaacagcgctggaagtggttcggctccaaagaaggctagggttcagacctcttcttcagcacagtctaccctaaaggtaagaaaggagaggcttggggatagaatcactgcacttcaccagatagtgtccccatttggcaaggtatatatacacggctagctctgcttacctagctaactatatactacatcaattgtaaagattaaagaatata

SEQ ID NO: 110054 - DNA, 1845 bp, Zea Mays
ttttgcttctcccttgctgttgttttctccctctagagactagagaccccatctctagaaagagaaagcaggacaagcaaagctaccggccagacagcagctagctatagctctaaagattgccctgacctgatcagatgatatgagctttttgcaagatggtggctatagcagctagagtagtatttctgttgtgatgtgctcaagccaagcatgatatgggtggagaattcaggagctctttgatgcagcagatggtgtggagtagtagtggcggcggtacagacagcaagaatatgatgagtagtagtttgatgccttgtgccgaggagcaagaagaagagggctccaacaagatgccccctttatcttctccttccatgctcctcctcccgcagcaccacctccaaatcttctcgggcctgcctctgcctctgcctcctgaggtgctgaacgacagctctgctacttctgatctgcatgatggccgggaaagcagcatgccggagtcatggagccagctgcttcttgggggattagtcggagatcacgagagatacaacgctgccacagctttactgtcaaaaggattagaggagcgacctgcagcttacaattgctatgaccctggacatggtggtggtgaggagatccagacatcggggaccaacattaggtctcatcaggtgagccaggcgctcttagcgtcgtcctctcctaggtcctgcatcaccacaagcctcggcagcaacatgctggacttctcaaacaccaccgtgccgccggcaccggatctgaagaatcatcactccgataactcttctgagggtaacagcgctggaagtggttcggctccaaagaaggctagggttcagacctcttcttcagcacagtctaccctaaaggtaagaaaggagaggcttggggatagaatcactgcacttcaccagatagtgtccccatttggcaagactgacactgcctccgtcctacaggagactattggctacattagattcctcctgagtcaaatcgaggctctcagcttcccttacttgggccatgacaacggggactccatgcaacaacataatactaataacttgctgctaaaccatagcactagcgatgccatggtacaagttcaaggtcctccgatgaccaatcaggagggggaggtctatggcaatggcattgaggagggcagcaggaaggatttgaggagcagggggctgtgcctggtgccagtgtcgtgcacgtcgcacctcgccgacgacaacggcccctcagacttctgggcggtgtccgcggcgccgtccccgcctcctccgcctccgccattcgccggcatcatctggcgatagagtcgtgtccagaccggcgtcgatccacccatcagtcgcatgcattattcatgcatgcatgacgtaaatatatacatatagtatcatgcatcactataccattggtttttttttaaaaaaaaatgtttggttgcttgccagggttgctagctagctatagctttgtttgaccgatgagctgaggtatccatcgagcatggagctacctgcagcctataccaggctgctgtatactgtacgtatgtagtacaccgtagtatatgtactgtacgttgagatgcaggagtgcatgcacatatcatcaggagccgtcattctgtcggacgagctgcctgcagtgtataggcagctaggctgattgctcttgatggtatgacgatgcgtcgtgtatgtaacactgctactatatatataccatttttatatgcaattgtttgctggtcacatatgagctgcaactgattccagaattggataattg

SEQ ID NO: 110055 - DNA, 1821 bp, Zea Mays
ttttgcttctcccttgctgttgttttctccctctagagactagagaccccatctctagaaagagaaagcaggacaagcaaagctaccggccagacagcagctagctatagctctaaagattgccctgacctgatcagatgatatgagctttttgcaagatggtggctatagcagctagagtagtatttctgttgtgatgtgctcaagccaagcatgatatgggtggagaattcaggagctctttgatgcagcagatggtgtggagtagtagtggcggcggtacagacagcaagaatatgatgagtagtagtttgatgccttgtgccgaggagcaagaagaagagggctccaacaagatgccccctttatcttctccttccatgctcctcctcccgcagcaccacctccaaatcttctcgggcctgcctctgcctctgcctcctgaggtgctgaacgacagctctgctacttctgatctgcatgatggccgggaaagcagcatgccggagtcatggagccagctgcttcttgggggattagtcggagatcacgagagatacaacgctgccacagctttactgtcaaaaggattagaggagcgacctgcagcttacaattgctatgaccctggacatggtggtggtgaggagatccagacatcggggaccaacattaggtctcatcaggtgagccaggcgctcttagcgtcgtcctctcctaggtcctgcatcaccacaagcctcggcagcaacatgctggacttctcaaacaccaccgtgccgccggcaccggatctgaagaatcatcactccgataactcttctgagggtaacagcgctggaagtggttcggctccaaagaaggctagggttcagacctcttcttcagcacagtctaccctaaaggtaagaaaggagaggcttggggatagaatcactgcacttcaccagatagtgtccccatttggcaaggagactattggctacattagattcctcctgagtcaaatcgaggctctcagcttcccttacttgggccatgacaacggggactccatgcaacaacataatactaataacttgctgctaaaccatagcactagcgatgccatggtacaagttcaaggtcctccgatgaccaatcaggagggggaggtctatggcaatggcattgaggagggcagcaggaaggatttgaggagcagggggctgtgcctggtgccagtgtcgtgcacgtcgcacctcgccgacgacaacggcccctcagacttctgggcggtgtccgcggcgccgtccccgcctcctccgcctccgccattcgccggcatcatctggcgatagagtcgtgtccagaccggcgtcgatccacccatcagtcgcatgcattattcatgcatgcatgacgtaaatatatacatatagtatcatgcatcactataccattggtttttttttaaaaaaaaatgtttggttgcttgccagggttgctagctagctatagctttgtttgaccgatgagctgaggtatccatcgagcatggagctacctgcagcctataccaggctgctgtatactgtacgtatgtagtacaccgtagtatatgtactgtacgttgagatgcaggagtgcatgcacatatcatcaggagccgtcattctgtcggacgagctgcctgcagtgtataggcagctaggctgattgctcttgatggtatgacgatgcgtcgtgtatgtaacactgctactatatatataccatttttatatgcaattgtttgctggtcacatatgagctgcaactgattccagaattggataattg

SEQ ID NO: 110056 - DNA, 2486 bp, Zea Mays
ccttgctgttgttttctccctctagagactagagaccccatctctagaaagagaaagcaggacaagcaaagctaccggccagacagcagctagctatagctctaaagattgccctgacctgatcagatgatatgagctttttgcaagatggtggctatagcagctagagtagtatttctgttgtgatgtgctcaagccaagcatgatatgggtggagaattcaggagctctttgatgcagcagatggtgtggagtagtagtggcggcggtacagacagcaagaatatgatgagtagtagtttgatgccttgtgccgaggagcaagaagaagagggctccaacaagatgccccctttatcttctccttccatgctcctcctcccgcagcaccacctccaaatcttctcgggcctgcctctgcctctgcctcctgaggtgctgaacgacagctctgctacttctgatctgcatgatggccgggaaagcagcatgccggagtcatggagccagctgcttctgtaaatactgcatccctttcttgttatctttccctagctaccgcgctctgagttctcttcaatttggttcttccatgtatgaattcatgtctgcaattaaccacaaaattgaacagtgggggattagtcggagatcacgagagatacaacgctgccacagctttactgtcaaaaggattagaggagcgacctgcagcttacaattgctatgaccctggacatggtggtggtgaggagatccagacatcggggaccaacattaggtctcatcaggtgagccaggcgctcttagcgtcgtcctctcctaggtcctgcatcaccacaagcctcggcagcaacatgctggacttctcaaacaccaccgtgccgccggcaccggatctgaagaatcatcactccgataactcttctgagggtaacagcgctggaagtggttcggctccaaagaaggctagggttcagacctcttcttcagcacagtctaccctaaaggtaagaaaggagaggcttggggatagaatcactgcacttcaccagatagtgtccccatttggcaaggtatatatacacggctagctctgcttacctagctaactatatactacatcaattgtaaagattaaagaatatatatcactatatgcatgttgatagattaaaaaaggaccataccactagatcgaattaagagctcggttatttacctcgtcatatcaaactaaaggatatatatcactgcatgcatatattttcttctctagcagatgtcagcatgcatgatcctattgtcactgctgtctgtcactcatagatgcatacaaatgtggatgcttttgcccatgcattctgctgctacgacgccatgcattcattcgtttcttctccttctagctgctccgccccctttaattctcccgtttcttttcagcccatgcatacaaatgtggatgcttttgcccatgcattctgcatgcagtttctttcgctttagggtttaggaggtgcgcggagtgacaatcactgaaaacaagcaagtccctgacatgcatatatgcatattacttgttgttgttgttgtttttttttttttgcagactgacactgcctccgtcctacaggagactattggctacattagattcctcctgagtcaaatcgaggctctcagcttcccttacttgggccatgacaacggggactccatgcaacaacataatactaataacttgctgctaaaccatagcactagcgatgccatggtacaagttcaaggtcctccgatgaccaatcaggagggggaggtctatggcaatggcattgaggagggcagcaggaaggatttgaggagcagggggctgtgcctggtgccagtgtcgtgcacgtcgcacctcgccgacgacaacggcccctcagacttctgggcggtgtccgcggcgccgtccccgcctcctccgcctccgccattcgccggcatcatctggcgatagagtcgtgtccagaccggcgtcgatccacccatcagtcgcatgcattattcatgcatgcatgacgtaaatatatacatatagtatcatgcatcactataccattggtttttttttaaaaaaaaatgtttggttgcttgccagggttgctagctagctatagctttgtttgaccgatgagctgaggtatccatcgagcatggagctacctgcagcctataccaggctgctgtatactgtacgtatgtagtacaccgtagtatatgtactgtacgttgagatgcaggagtgcatgcacatatcatcaggagccgtcattctgtcggacgagctgcctgcagtgtataggcagctaggctgattgctcttgatggtatgacgatgcgtcgtgtatgtaacactgctactatatatataccatttttatatgcaattgtttgctggtcacatatgagctgcaactgattccagaattggataattg

SEQ ID NO: 110057 - DNA, 1846 bp, Zea Mays
aagagaaagcaggacaagcaaagctaccggccagacagcagctagctatagctctaaagattgccctgacctgatcagatgatatgagctttttgcaagatggtggctatagcagctagagtagtatttctgttgtgatgtgctcaagccaagcatgatatgggtggagaattcaggagctctttgatgcagcagatggtgtggagtagtagtggcggcggtacagacagcaagaatatgatgagtagtagtttgatgccttgtgccgaggagcaagaagaagagggctccaacaagatgccccctttatcttctccttccatgctcctcctcccgcagcaccacctccaaatcttctcgggcctgcctctgcctctgcctcctgaggtgctgaacgacagctctgctacttctgatctgcatgatggccgggaaagcagcatgccggagtcatggagccagctgcttcttgggggattagtcggagatcacgagagatacaacgctgccacagctttactgtcaaaaggattagaggagcgacctgcagcttacaattgctatgaccctggacatggtggtggtgaggagatccagacatcggggaccaacattaggtctcatcaggtgagccaggcgctcttagcgtcgtcctctcctaggtcctgcatcaccacaagcctcggcagcaacatgctggacttctcaaacaccaccgtgccgccggcaccggatctgaagaatcatcactccgataactcttctgagggtaacagcgctggaagtggttcggctccaaagaaggctagggttcagacctcttcttcagcacagtctaccctaaaggtaagaaaggagaggcttggggatagaatcactgcacttcaccagatagtgtccccatttggcaagactgacactgcctccgtcctacaggagactattggctacattagattcctcctgagtcaaatcgaggctctcagcttcccttacttgggccatgacaacggggactccatgcaacaacataatactaataacgtacggtacgtgtgcgtgcgaataaaggtgcatgcgcaggcacgtcacgtgcgaataaagttgctgctaaaccatagcactagcgatgccatggtacaagttcaaggtcctccgatgaccaatcaggagggggaggtctatggcaatggcattgaggagggcagcaggaaggatttgaggagcagggggctgtgcctggtgccagtgtcgtgcacgtcgcacctcgccgacgacaacggcccctcagacttctgggcggtgtccgcggcgccgtccccgcctcctccgcctccgccattcgccggcatcatctggcgatagagtcgtgtccagaccggcgtcgatccacccatcagtcgcatgcattattcatgcatgcatgacgtaaatatatacatatagtatcatgcatcactataccattggtttttttttaaaaaaaaatgtttggttgcttgccagggttgctagctagctatagctttgtttgaccgatgagctgaggtatccatcgagcatggagctacctgcagcctataccaggctgctgtatactgtacgtatgtagtacaccgtagtatatgtactgtacgttgagatgcaggagtgcatgcacatatcatcaggagccgtcattctgtcggacgagctgcctgcagtgtataggcagctaggctgattgctcttgatggtatgacgatgcgtcgtgtatgtaacactgctactatatatataccatttttatatgcaattgtttgctggtcacatatgagctgcaactgattccagaattggataattg

SEQ ID NO: 110058 - DNA, 1620 bp, Zea Mays
acaccatatacgagctctctagcacaccataccgacacacacagctggtgcccgcccggtcgaaccacgctagctgtacactagctagacgatcaccacgccagttagttagcgcagcgccatggccggcggcggtactcagcatctgctgcaggtcgcggccgtgctcgcggcggcggtggtgctcatggcaacggcgtcggagggcttcatctccaagaagacgtggagcgccatccggcgggcggaccgcgacgggcccttcgtggggctggtggtgcccaacgcctacgagatggtccccgtcctcaactcgccggacttcaaacccagcagcaacatacccatcctagacgtccaagggcgacgattccgcttcggaactattggaagccaaaacgttgtcatggtcatgaccgggctcagcatgctgaacgccgggctcacgacccagctgctgctgagcctgttcagagtgaaaggcatcgtgcactggggcatcgctggcaacgccaacgaggacctccagatcggcgacgtgaccatccctgagtcctgggcccacctgtccctgtggaactggcagaggcacggcgacgggcctgagaacgagctgccgctagagaacgccggcgactacacgagggagtacggcttcctcaacttctccgactacacggtggggcaggacgccggcaacccggagctggcggcgaacacgctcaacagcgtgtggtaccagccggaggagatcttccccatctccggcacgccggaggagcggcagcacgcgttctggtgcccgtgaacaagcgctactacgcgctcgccgggaagctggaggggctggagctgccggcgtgcgtgaacgcgacgacgtgcctgccccgcgcgccccgggtgacgcgggtgcccaggggctgcagcgccaacatctacaccgacaacgccagctaccgccagttcatccgctcccacttcgggtgcacccccgtggagatggagagcgccgccgtggccctcgtcgcgcaccagcacggcgtccccttcatcaccatccgctccctctccgacctcgccggcggcggctcctccatcagcaacgaggcagccacgttcctcgacatcgcggcgcagaacgccgtggacgtcatgctcaagttcgtgcccctcatcgcgcgccgcggtggcgaacaggagcacgccgccgacatgtaatgtaaggcgggatcggatacagatccacgaccacgacgctgagacgaagtgcacctgcatgcgtgccaccgacacaacacaatgcgtgttttcgtcctccaagtttttacttaattttccacgagcccacgatcgatcgaataaatatagcatgtatcgctatactatcttgcaaattaacctatcttgggtggaataaatgaaattggtcatcgtggccaagttatataaactgacatcatgttgcaaactcgcgctcaattcaattattacattatctagctatgcacatttaattttaaagcagccaataaaaataagatcatttttttggtaaattccaacatcacgctataacagaaacagaaagtatggtcttcaaacattataaaacaaaataaa

SEQ ID NO: 110059 - DNA, 1722 bp, Zea Mays
catatacgagctctctagcacaccataccgacacacacagctggtgcccgcccggtcgaaccacgctagctgtacactagctagacgatcaccacgccagttagttagcgcagcgccatggccggcggcggtactcagcatctgctgcaggtcgcggccgtgctcgcggcggcggtggtgctcatggcaacggcgtcggagggcttcatctccaagaagacgtggagcgccatccggcgggcggaccgcgacgggcccttcgtggggctggtggtgcccaacgcctacgagatggtccccgtcctcaactcgccggacttcaaacccagcagcaacatacccatcctagacgtccaagggcgacgattccgcttcggaactattggaagccaaaacgttgtcatggtcatgaccgggctcagcatggtataaattcatcttttccacgctacgtatacatgcgaaattttatttgacggtttttttttataaaaaatgagtctgactagatcgtctgtggcgtgcgttgcagctgaacgccgggctcacgacccagctgctgctgagcctgttcagagtgaaaggcatcgtgcactggggcatcgctggcaacgccaacgaggacctccagatcggcgacgtgaccatccctgagtcctgggcccacctgtccctgtggaactggcagaggcacggcgacgggcctgagaacgagctgccgctagagaacgccggcgactacacgagggagtacggcttcctcaacttctccgactacacggtggggcaggacgccggcaacccggagctggcggcgaacacgctcaacagcgtgtggtaccagccggaggagatcttccccatctccggcacgccggaggagcggcagcacgcgttctggtgcccgtgaacaagcgctactacgcgctcgccgggaagctggaggggctggagctgccggcgtgcgtgaacgcgacgacgtgcctgccccgcgcgccccgggtgacgcgggtgcccaggggctgcagcgccaacatctacaccgacaacgccagctaccgccagttcatccgctcccacttcgggtgcacccccgtggagatggagagcgccgccgtggccctcgtcgcgcaccagcacggcgtccccttcatcaccatccgctccctctccgacctcgccggcggcggctcctccatcagcaacgaggcagccacgttcctcgacatcgcggcgcagaacgccgtggacgtcatgctcaagttcgtgcccctcatcgcgcgccgcggtggcgaacaggagcacgccgccgacatgtaatgtaaggcgggatcggatacagatccacgaccacgacgctgagacgaagtgcacctgcatgcgtgccaccgacacaacacaatgcgtgttttcgtcctccaagtttttacttaattttccacgagcccacgatcgatcgaataaatatagcatgtatcgctatactatcttgcaaattaacctatcttgggtggaataaatgaaattggtcatcgtggccaagttatataaactgacatcatgttgcaaactcgcgctcaattcaattattacattatctagctatgcacatttaattttaaagcagccaataaaaataagatcatttttttggtaaattccaacatcacgctataacagaaacagaaagtatggtcttcaaacattataaaacaaaataaa

SEQ ID NO: 110060 - DNA, 3376 bp, Zea Mays
gcccaaacttgcgcttgcgcttgcgcttgcgcttgcacagcatgcttccagccgtccagtgtgtgatttgagttaccaatgccgtctgccttgtctcgtaggaaaagatcgcggcgtcgccactgtcctccaagcagccacgtccacgcgccgacgccggccagctgtcaccggagccagcgagcttcccagtacgctgcgacgccgccgccgtcgacccgctgcagccgctgccgacgcccaaggacttcgtgtgcccgatcacgagccaggtgttcgacgacccggtgacgctcgagaccgggcagacgtacgagcggcgcgccatccaggagtggctggaccggggcaacgccacctgccccatcacccggcagcgcctccacggcgcgcagctgcccaagaccaactacgtcctcaagcgcctcatcggcgcctggcgagaccagcggcggacgccgtccccttcctcctccccttccccttcgccgccgccggccacgcctccccccgctcccgcgaccgccatggcgggcgacagccccgcgccgccgttccccctccccgtcaaggctgccgccgcctcgtcgccgtccccggacgccaacaccagcgccagcgcgccgtcgcccaccagcgtcatcgcgcaggcctcgctcgagagcgccgtggccgagctccgcgccgccgtgtcctgcctctgcacgtccgaggacctggcgcagtcggagcggtcggtgctcaagatcgagcgcctctggcgtgacgcaaccgccggcggagccgacgccgagccggccatcctcgccgcgctcgccaggcccgccgtcctgaacggcttcgtggagatcctcttcaactccgtcagcgcgcaggtgctgcgggtcgccgtcttcctgctcgccgagctcgcgtcccgggatgacgccgtcgtgcagacgctgaccagggtcgactccgatgtcgactgtctcgccgcgctctttaagaagggactggcggaggccgccgtgctcatctgcctcctgtcgcccgcgcccgagcagctcgtcgagatggacctggcggaggcgctcgtcgccacaatccgccgcggcggcggcgacgaggacccgctcaagatgtgcgtcagccccaaggccgcgtcggtcatcctcctcagccagatcctcgtcgaggacgccgctgccgccgccgacgatgacagctcctccacgccgccggtgccgaggtctgcgctgatgtccgagaggttcattcggagcctcgccgccagcctggaggccgagccggtggaggagaggctagccgccatgcgcatcctcctcaggtgcatctgggaggacggccactgtcggagaagcatcgccgagaaggcgtccctcggggccgtcctcgacgccttccacgccgtcggcgacgccgacaagatcgacatcgtgcgcttcctctacgagctgctcaagctgaaaaagcgatcggcggcggagcgtcttcttcgcacaatcaaggagggtggctcgttcagcatgatgcacacgctgctggtgtaccttcagtcggcgccgccggagcacagccctgtcgtggcggggctgctcctccagcttgatctcctggtggagccgaggaagatcagcatgtaccgcgaggaagccctggactgcctcatccagtgcctgaagaacgccgacttccctcggtgccagctcctcgccgccgagaccatcatgtgcctcccggggaggttctcgtcgtcggggaggccgctcgcccgttccacgctgctgaagctggccagggtgaaggaaaggtaccggcagtcgcaggacctgagcgccgctcgcgccgacggcgaggacgagatggaggaagggaaggccgcgtcggagtgggagaggaaggcggcgtacgcggtggtgagccacgagttcgggctggtgttcgaggccctgtccgagtgcctgaggaccaagaacgcggagctgttcacgacgagcctcgtgtgcgccgcctggctcgtgcacatgctctccctgctccccgacaccggcgtcctcggggcggccagggtctgcctgctccgccagttcgtcgtggtgctccgctccgccaagcacggcagcgaccgggtcctcgccatggtggcgctcaggagcttcatgaacgaccgcgaggggatgcacgacatcacgacgtacatcaaggacgtgctcaggacgctgagggagctgaagaaatcgtccggcctcgcgttcgagatgctcaagctgctatcagacggccaggaatccagcgtcgacatgtggagccacaaggagatcaatcaggtagactgcagcgcgaacggcgaggtcacgtcggtcgtttacctcaacaactacatcttctccggccactccgacggcacccttaaggtgtggcaagggagcgaaaacatccttgcccttgtccacgaggcccaggagcacagcaaggccatcaccagcttgtcggtcctgcactcggagtcggaggagaagctctacagcggctcactggacagaagcataagggcgtggcagctccgggacggcgtgctccggtgcgtggaggtccacgacacccgagaccccgtgcagagcctggccgtggccagcgccgtggcctgcttcgttccgcagggcgcgggcgtgaaggtgctgagctggggcagcggcagctccagggtcgtgaacgccaacaagtacgtgaggtccatggcgctggtgcacggcaagctcttctgcggctgcagcgacggcagcgtccaggagatcgacctggcgagcggcacgctgggcgtgatccagcccggcagcaagcggatcctgggcaaggccagccccgtctacgcgctgcaggcccacggcgggctgctctacaccggcggcacgccgtcgtcgtcgtcggcggcgtccgcggacggcggcggcggtgcggccgtcaaggtgtggagctgcgccaactacggcctcgtcgggtcgatggccacggcggcggaggcgcgctcactggtcgtcagcgccgacctcgtctacgtcgcctccagggccgccgccgtcgagatctggtccagggagaagctcgccaggatcggcacgctgcaggcgggcggccgcgtccagtgcatggccgtcgacgccgacggcgacgtcctcgtcgtcgggacgtccgacggcaagatccaggcgtggggattgacttgacaagacgcagaagaactattgggtgtagagaggaggcatgaagggacacaccgcgagtggcgtatatatggcgatgtttctttaattgcttatttttttcgtcacatactcacatctggcacggatttttcaccatctactaattgtaa

SEQ ID NO: 110061 - DNA, 1967 bp, Zea Mays
gacggcccacgtagcaagcagcccgcaaaaccccatctctctctcacaaacaaagccaaagccacagcgagcaagcaaaacccgcatctcctccatcccaccccgcgccgccgccgccgccgcatcccgtcccgaaccctaaccccactccatcatggcggccgcccactacgatcgcgaggacggcctgcctccatcggcgccgccgcacgcggcggcggacgcgtacgaccccaactacgtgccggactccgtcaagaccttcgtggtgcacctgtaccgccacatccgggacaagaacgtgtacgagatccaccagatgtacgagggcggcttccagcgcctctccgaccgcctcttccgcgacgtgttctggccctccgcggaggccgtgtctccctactgcgacggcgaccacgtattcctcctcctctaccgcgagctctggtaccgccacgcccacgcccgcctctccccgctcaccgccgcgcaccgcgccgagtcgtggaccaactactgcgacctctttagcgtcgtcctccacggcgtcgtcaacatgcagctgcctaaccagtggctctgggacatggtcgacgagttcgtctaccaatttcagagcttctgccagtaccgagccaagctcaagaccaagacggaagacgagctcaaccagctcaagcagttcgacaaggcgtggaacgtgtacggggtcctcaactacctgcaagcgttggttgagaagtccatgatcacgcagatcctcgagaaggagaaggagggcctggagcagttcactgccaccgatggctacgactacgagggtggcagcaacgtgctcaaggtgctgggctactacagcatgattggcctcctaaggatacactgtctcctcggggattaccacaccggcctcaagtgcctcacgcccatcgacctcaaccagcaaggggtctacaccattgtcattgggagccacatctcagccatctaccactacggcttcgcaaaccttatgatgcgcaggtatgttgaggccactcgtgaattcaacaagattcttctgtatatcctcaagtacaagcagtaccaccagaattcccctcagtatgatcagatactgaagaaaaatgagcagatgtatgcattgttggcaatttgcctatctttgtgcccacagaacaagctcattgatgaaaatgttagcacccagctgaaagaaaagtataatgacaagatgacaaagatgcagaggtatgatgatgaagcatacgctgcttatgatgagctattctcgtatgcttgccccaagttcattacaccgtcgcctccaattctggaccagccgctaacaaactataaccaggatgcataccgtcttcagttgaagttgtttctctatgaagtaaagcagcaacagttgctttctgggattcggagttatctgaagctatattcaacaataaccattagcaaacttgcccaatatatggaagtggatgaagcaacactaaggtcgatcctgatgacatacaagcacaaaatgcatgcagttgacagtgaaggaaagatagtatcaagtgcagactttgacttctacatcgtcgaggatgtgattcatgttgtggagtccaaacctaccaagcgtcatggtgattactttttgagacaaattttgaagtttgaggaaatgattggtgaactggagaaggtacagcttgactgaaatctgatagcgatcatggagagaaatgtcactgtttcctttttgctctcttttgtactccgttgaaaccccatcttttttttttttgtttccttattgactctgaagcccgttgaaaccggccattattaaccgtgtaccgtgtaatgttacttactagtaaattgctcgctccttgcgcgtgtagtcggctgatgcatttacacacatttaagaaagtgttagtatatataggagcaaaata

SEQ ID NO: 110062 - DNA, 1827 bp, Zea Mays
tttggctcatcagtatatttttgttttgtataatgcctttctggaattctggttcattgccagacagtaatttttttggcacgtttgatagtgcaggaagctttgcctatccttgctttacctggcaagcctaacctgctacagcaggtgaatcagctagttctggtagcaaaaaaaatctggaaagcacagttcacaatgcattactggtcagataatcaaacacatctcgtgccaagttcttacccagccagacaatacagtagctggcagagaatcaaaacacaccctttgcttttaggtcatggcttactgcatttgttatattattgtacttttcttttacaggatgtgatatatatatgccccttcactattgatgttactactttaaactattactactttcatgttcttcccttcatctatagtctcgccccttcactattgctgttactactttaaactattactactttcatgttcttcccttcatctatagtctcgctctaacctaccacaaggttcttaagggactgtttgtttgggcttcctcggagccttttcttctcaaaagctggaagcccaaacaaacaggtagtttctggtgccagcttttcaaagctccaaagttcacaaaagacaagtttcaacaggaagctccaaagttcacatgaagtggcttccactaccttttggcccatatttacccacctgccatcgcttaagtgcccaaaaggttatcttttatttctttcccctcccccaattacagcgcggtttgtcctcctcgctcatgcgctactggcttcctacttgagtggccatcctcggtggtgtggctctccttctcagtggcatggagctcagcccttgcgctctgaatctggcgagttcttaggctgccgcaccgtcccgctggagatccggtcgcgcgaaactacattactccatccactcccgtcaccatgtgatgtcctatctggcgcccgcaccccggaagaccttgtccatgcctccgaccgtgtcttctctgcgatggccgtgccctgctctacctgctgctgcgtgcagcagtggcagtggtggaggaagctgtgtgcaaacaaacaggactagcgttggcacgagccagctttctgaaagccaatgccacaagctagaaagccaaaagctaaagcacaaacagacaggacctaaaggttttgtggttgctgcaacaggatgcataccgtcttcagttgaagttgtttctctatgaagtaaagcagcaacagttgctttctgggattcggagttatctgaagctatattcaacaataaccattagcaaacttgcccaatatatggaagtggatgaagcaacactaaggtcgatcctgatgacatacaagcacaaaatgcatgcagttgacagtgaaggaaagatagtatcaagtgcagactttgacttctacatcgtcgaggatgtgattcatgttgtggagtccaaacctaccaagcgtcatggtgattactttttgagacaaattttgaagtttgaggaaatgattggtgaactggagaaggtacagcttgactgaaatctgatagcgatcatggagagaaatgtcactgtttcctttttgctctcttttgtactccgttgaaaccccatcttttttttttttgtttccttattgactctgaagcccgttgaaaccggccattattaaccgtgtaccgtgtaatgttacttactagtaaattgctcgctccttgcgcgtgtagtcggctgatgcatttacacacatttaagaaagtgttagtatatataggagcaaaata

SEQ ID NO: 110063 - DNA, 3373 bp, Zea Mays
cgctgcccccgccgccgccgccgccgccgccgccgccgccgccgccgccactacagaggccgtccatcagccaggccgagcgagcccaacagcctcttcatcgcattcgctgcagcgcaggaaagggaaggaaaggaaaaggcagggcagtggtacgtgcgtgtatcgctgtatcacacacacgtacgcaggcctcgtgccggcgcgccattgcatcgcaccagccagcctgcctgcctgctctgagcagaggagacagccagacagggcagcgaaggaccgagaagctagcaacggcaacgagcagaggcccggcacttgcgctccgcttccccctccctccaccacctctccaggccgccagcccacgccaccactgaccacccgttgcctgtccgccgaccacgcctcgcgcgacctgaattctttctcgtcttccatcgtccctccgcgccccgccccgccccggccgggcctcttaatttaatctatccgcaccgccgcgccgccgccgccgcatcttatcgtatcgtgtacgatcgccatcgccgaccggagagcagcagcccaccatggagaggaagagcgtggtgatgtcggcgctggggatcgggatcggtgtcggcgtcggcctgggcctcgcgtccgcgccctgggccggcggcgcctcagcctccgcctccgccagggccgcgggggtcaccgtcgagagggtggagcaggacctccgccgcctcctcgccgacggcgccgacagcaaggtcaccttcgacgagttcccgtactacctcagtgagcaaacgcgtgttgtgctgaccagcgctgcgtacgttcacttgaaacaagcagagatttccaagtacaccaggaatcttgctcccgccagtcgtgcaatcctgctgtcaggtcccgcagagctctaccaacagatgctagccagagctcttgcccactattttcaagcaaagttgctcttgctagatcctactgatttccttataaagatccataacaaatatggcacaggtggcggcacagagaagacatttaaaagatcaatctccgagacgacgcttgaacgtgtgtcgggattgtttggatctctttcaattcttccacaaaaggaacagcccaaaggaactatacgtagacaaagcagcatgacggatgtcaaattaaggagctctgaaagtacaagcaacttgccaaagcttagaagaaatgcatctagttcctctgatatgagtagcatggcttcacaaggtccttcaactaatacagctcctcttagacgcacaagcagttggacttttgatgacaaaattttagtacaagcgttatacaaggttcttctttcagtatcaaagagctaccctattgtactctatataagagatgtcgagaagttccttcacaagtccccaaaaatgtatctcctgtttgaaaaactattaaacaaacttgatggaccggtgttagtccttggatcaaggattgtagatatggagagtgatgaggagttggactacagattgactgttctgttcccatataatatagaaatcaagccacctgaaaacgaaaaccaccttgtaagttggaaatcccaattagaagaagacatgaagatgattcagtttcaagataaccgaaatcatattatggaagtccttgcagaaaatgatcttgaatgtgacgatttaggctcgatttgcctatctgatactatgtgccttagtaagtatatcgaggagattgtggtgtctgcggtttcatatcacttgatgaataacaaagatccagattaccgaaatgggaaattagttctatccacaaagagtttgtcccatgcgtcggaaatttttcaaggcaacaagatgactgataaggacagcatgaaattggaagtgacagatggcaccttaaaggcttctgaaaaggcaattgctccaaccactgcaaaatcagaaacaaaacctgcatcatcgctgccacctgttcgacccccagctgctggtgcccctgctccaagggttgaaagcaaaacagaactggagaagaaggataatccacctccatctgcaaaagtcccggaagggacagcagataatgagtttgaaaagcgtattagaccagaagtgatacctgcaaatgagattggagtttcatttgatgatattggtgccttggatgatatcaaagaatcccttcatgagcttgtcatgctgcctctgagacgacctgacctcttcaaaggtggtcttcttaagccctgcagaggtatattactctttggtcctccaggaaccggcaagactatgcttgccaaggctatagccaatgaagctcaagcaagttttataaatgtctctatgtcaactatcacatcaaagtggtttggtgaagatgagaagaatgttcgagcactgttcacgttagctgctaaagtatcaccaaccatcattttcgtcgatgaagttgatagcatgcttgggcagcgtaacagagctggagagcacgaggcaatgaggaagatcaagaatgaatttatgacacactgggatggcctcttgtcaaggtcggaccagagaattcttgttcttgctgcgaccaacaggccttttgatcttgatgaggctattatccgtaggttcgagcgaagaatcatggtaggtctgccatcaatggaaagccgggaactcataatgcggcgacttctgtcaaaggagaaagttgatgaaaggctgaacttcaaggagctagcaaccatgacagaaggatatagtggaagtgatctcaagaacctgtgcacgacggcagcatatcgccctgtgagggagctaatccagaaggaaagaaagaaggagctggagaagctgaagcgtgaaaaaggcgagactccatcggatcttccaaagaagaaggaagagaccatcaccctaaggccgctgagcatgacagatctgaaggaagcaaagaaccaggtggctgcaagtttcgcttccgaaggtgtctgcatgagcgagctgaggcaatggaacgagttgtatggtgaaggaggctccagaaagaaggaacaattaacatacttcctctgaacaatatgaaaatctatggaccatcacacgcaaaaatgtatggacattttggaaagtatagtgcacaaaatagtcatgaggaaataggccgaacatgtataagaacatgggaaacggggggagtgttaaaaggacaggctcccagggtgtgtcggaggctcccacgccagtgggcacaagaaatcaggtcataaaagccactttctggtgtaggacaaggaagaagagttttatctccacctaaatcccagtttgcctgtgctgtaagtattaca

SEQ ID NO: 110064 - DNA, 679 bp, Zea Mays
ttttttctgagaatgtgtaagagagctgtgtatcgttgtattgagaactaaagtagagatcaattctgctcgatcctgaattcttctttaacagaacctgtgcacgacggcagcatatcgccctgtgagggagctaatccagaaggaaagaaagaaggagctggagaagctgaagcgtgaaaaaggcgagactccatcggatcttccaaagaagaaggaagagaccatcaccctaaggccgctgagcatgacagatctgaaggaagcaaagaaccaggtggctgcaagtttcgcttccgaaggtgtctgcatgagcgagctgaggcaatggaacgagttgtatggtgaaggaggctccagaaagaaggaacaattaacatacttcctctgaacaatatgaaaatctatggaccatcacacgcaaaaatgtatggacattttggaaagtatagtgcacaaaatagtcatgaggaaataggccgaacatgtataagaacatgggaaacggggggagtgttaaaaggacaggctcccagggtgtgtcggaggctcccacgccagtgggcacaagaaatcaggtcataaaagccactttctggtgtaggacaaggaagaagagttttatctccacctaaatcccagtttgcctgtgctgtaagtattacactaaaaatgggtg

SEQ ID NO: 110065 - DNA, 622 bp, Zea Mays
cccgcaggcgcaaacggcggaacgactcgctgctgcaggtgcaggaaggcatccagagcgacatcgcgcactgcaagcgctcaatcaacgtgtccaaagatacggttgtacgcagccgggcttcagctcgactacgcaacagcagcctagcttcggctgctacatccggtgctagtatgtagtactccgtaatggctaaccgttagtttttctctctctctttagcgtcggcgctgtagaacctcggtccatgacggcgacgacgggcggcgccggggaaggcgcgtgaggcggtcccgtacgtggcgccatgacgggaaaggcgtgacgcggactgtggtggtgttgtcagcgtacgtagatggtggtagtcggctatccgttaataaagataaaatattagtactagtaaggtttggaccggaagaaaggtttgtctttagcgccgcgctgtgggctgtctacttggatcatcatagtttttgtctgtctgtccgttccggtgccggttctgtggtgcttgtgtgctgtgctgtgtagcagtggccactgaggcactgactgactggccagtggtaaacgtgctcctcctatatattatattattattatatatgtaaaa

SEQ ID NO: 110066 - DNA, 354 bp, Zea Mays
tttttaaattttttggatggttcaactttagacttataaacgaggatgatgaaatcatcttttccgcaactcaaattattcaaagtgcatcaattgtacacgagtgcgaactcaataacagacaagtgattttacgatacggttgacatgcgaaataggctattgggagttccaaatagctccctaagcctggggactaaatagggacatttaggaagttggtatatttggggaccttactcaaggaactgttggggcatgattttttgttaataacaccctaaattgattttaggggcttgtttagggaactactggagatgctcttaatgcacttaacttggtttgtctacc

SEQ ID NO: 110067 - DNA, 1235 bp, Zea Mays
atatacaccgaggcccgagccaccgaggaaaactcgagggggaataaaatcccagcggcttcccccaaacaaaacctcttctccgccagagtccgcgtcggccagatcaaacgaatcggcacgacgcatcggcatcgcctccgacgatcttgagacaaacaaaacccaccgctgcggcaactccgcctcccgctgacacggggatcgcctgacaacaggcagagaaaagaggcgcagggtttgcccgcgaagatggaggacgtggacgtctcgcggcagctgaagcagatgacgaacttcatccgccaggaggccgtcgagaaggccgccgagatcgaggccgccgccgccgaggagttccaaatagaaaagttgcagctggtggaagctgaaaagaagaagatcaggcaggaatatgaccggaaagagaagcaagttggcatcaagaagaaaattgattactcgatgcagctcaatgcttccagaattaaagtccttcaagctcaggatgatttggtaacagatatgttggagtcagcaaggaaagagctactgtgcataagtagagatcaccccacttacaagaagctcctcaagacacttattgttcagagtttgctgcgcctgaaagaaccagctgtgcttctccgctgcaggaaggaggatcttcaacttgttgatttagttttggaatctgcaaggaatgagtatgcagataaagcaaaagtatatcctcctgagatagtggtagatcgtcaaatctatctgccatctgctcccagtcattatcaggcacctggcccctcatgctccggtggagttgtgctagcttcccgagatggaaagattgtctgtgaaaacacactggatgctagattgcaggtagttttcagaaagaagctgccagagattcgtcagagccttttcgggcaggtagctgcgtagccaattcttgaaagcagaacgtggcccagtactctttggggtaccctgacgatgtcgaggagaaactttggcagctctcaatagtgatttatcacacttttggacctcgattattatttgtgtatacttttttcctggttatggatacctttgaatcctgcacagagcaaataaactgtgttcatttgtgggacgatcgtttgttgcaataaggcatcgagatgtgttgcgatgccacttctgttatagcatcatgttttttcgttgagttgatctcgctggctgttatt

SEQ ID NO: 110068 - DNA, 2739 bp, Zea Mays
atgacggccggcgctggcgagccccgccgtatagtcctcctcctagacctcgataccttcctccccacttccagctcaagcacccccgctgccgcctcctacctcgccgaagtcctgcccgccgccacctccctgctcgccgcctgccggtccccggcgtccctctccgcggggcgcctcttcttctcctccctctccccgatcctctcctcctccctcctccctaggccgctcccggccgcccccaccccgctctccttcgacctccacccggccaccctcgcgtccctcgccccgctccgctgcctggcgctccgggcgacccccgcgcacccgcgcgcccccgcctcctcgtcagtcgccaaatctctcctccagcttgagcacgactactcctgggaccacgacccccctcgccgccgtcgctgccgcggcttcgatccgccgcccaatctggtggctctcttcacgcccgtcacggaattcgatctgttcggggacgacgccagcttcgtcgagaaattccgcaaggttttcggtcctgtcagggaccgcctctcggcgattggtctacaggtgtgctgggtcgtcgtcccatccgcctccgtctccgcctctgccgccgccagtgaggggatcaggagggcggtcaccgagctgggctggtggttcactaccgccgatgcggtcgcgttggggtcggccgttgcaccgccggcgctcgtgtggggaggtgttggacttggcggcggggaaggtggacggcgaggggaggtggtgttggagatcgcggatgtggagggcaaaccacttgtctgcaagggctgtgaggtcgaggtggttggctcctcacggttgcagcaggccagcggcaatgccgtgtccaggatacatgtcaggtcggtgtgtgaggcggggaattgggagcggttgatggatggggatgttgccgtggttcgagggttccaacgggaggggagcaaggctgacggtgaagaagctgtagataaggagtattttcctcatcggattcttgaattggtccttggtgacgagaaggaccgattaggggttgccaagccaatttggcagctaattttggtgttccttagtagaaggaactattgtgcagtagtctcagtttctgatggagatggaaactccgtagatggtgttctcatgcccttctcgatgaactgtgccttacttcatcttgagaagaatgtcatgtctgccaaagcctccgagacgccaagttgtggtgcatctgatgagacaaaggtccagagtgataagaagaggagaagcaggctggtcggtaagctacttgaggtgaccacctggagtaccttctgtgacatgcttcgcaaacgtgctgatggaagcatgccggtggtggacttggaggatctatatttcagcaggtatggcaccacatccaaaaagttgcggtttctgaaatgctggatgaaacaggtgaaacagtcacgtcttagtactctatcaagtatacatacagaaggagagcagcgtcttccctcgaaggatgattcagaagcaagagttctggtttcagaagaagatgcttcagctagtcttgtcaatttttcgctggatgaagcagattgccagaaagtagacgcactagtggatgtagcaggctgcagtgaagtgggcatacctgtcgatgaagcagattgcagtaaagtggacatatcagtgggtgaagagagttccatgttctcttctatggaagaattagaagcatttctgggagctgtcccacataagattgagcaaagtctttgttctgaagatgctgatctggggagtttagctgaacgtttggttgacttgtccgtccatgcgatgttggttaaacacggaaagattgcagtgcggtactttgaacacaatgaagcggaagatggttctagtgcaaagattgcctcatgtaccaggcatgagctgcagatcttgcttagaatggaaatgatcaaatctgaactcgggtctgccatagaggaaggttcaaaacagaaaatgataaaagacatctgctcgcttctgcaatttattgacatcaatctccaaggggattcttttcagtctgacggtattcttgagtatgctgaaaagaccataaagtcgaggtacatcaactccatggaggatgtgatcaagaagatctacagggagatggagtttgatttatttgatgacgacgacggagttgactactcagattctctacccagcagcagcaaccaggacgacggcaggtgccgcagccagcggggctccgacagcgcgagcgcctccgcgctccacctgctgcagcgggacgccaggagcagccggcagcgcgaggacgacgaccggcacgacaagctgacggcgagggcccgggagcggcgggaccggcagaggcggctctcctccttcaccagctgggtgcccgacctgcgccgcgtctgggcgctcaagcacccggggaaagagccgtgcgcgtgggtgccgcggtcccggtccaggtcgtgcgcgaagcggcggcgggccgcgtgcaccgatgtcgtcctcgagacgccggtgacctccggcaaaaggcacatgagcgggtcggagtccgacgacgccagacaggtggcggcgaggaggtccgccgcgctcggggccgtgtccaagaccttgtttgacgacgaggtggtcgagactgacgttagctcgagtagcacgtaa

SEQ ID NO: 110069 - DNA, 2017 bp, Zea Mays
ggctgaccgtgccgccgtcactcctcccgttcaggtccagcagcgttcgtttcgttgctccactcatcagatccatccacgccagagacggaggcagccatgccgctgccgccgctcctgctctgcgtctgcctctacctcacccacctcccccgcctcgcctcctccgagcccgacgccgacaaggcggcgctgctggcgttcctcgccggcgtgggccgcggcgccaccgcccgcgcgcgcatcaactggcccaccaccccgctcgcctgcgccagccccggccacggccccggctggacgggggtcacctgcagccccgacggcgcgcgcgtcgtggcgctgcacctcccggggctgggcctctcgggcgccgtccagtccggcacgccgttcctggtcgcgtcgcatcaccacaggaatggcggatctcgccgctcaaccaccgtaacaagaaatcgttgccgacgacgatttcagaattcgaataaattcctacgcccaggtccagcagcgttcgtttcgttgctccacctccactcatcagatccatccacgcgagagaccgaggcaggcagccatgccgctgccgctgccgctgccgccgctcctgctctgcgtctgcgtctgcgtctgcctctgcctctacctcacccacctcccccgcctcgcctcctccgagcccgacgccgacaaggcggcgctgctggcgttcctcgccggcgtgggccgcggcgccaccgcgcgcgcgcgcatcaactggcccaccaccccgctcgcctgcgccggccccggaccgggctggacgggagtcacctgcagccccgacggcgcgcgcgtcgtggcgttgcacctcccggggctgggcctctcgggcgccgtgcaacccggcacgctcggccgcctcacggcgctgcagctgctcagcctgcgctccaacaacctgtcgggcccgctccccgccgacctcctgcgcctgcccgcgctcgcggggctccacctccaccgcaacgccttctccggcgcgctcccgcccgggctcgcggggctcgccgcgctccaggcgctcgacctctcctccaacggcttcggcggcggcatccccggcgcgctcaccagcctcacccgccttgtcgcgctcgacctctccaacaactcgctctccggccgcgtcccggacctcggcctccccgcgctccagttcctcaacctctccaacaaccgcctcgacgggcccgtgccaccgtccctcctccgcttcgccgacgccgcattcgcgggcaacgacctgacgcgcccgcccgcagcagctcctcccgccgccgccgcccccgccgcgcggacgcggcgggtcaggctcagcgaggcggccatcctcgccgtcgccgtcggcggctgcgtcctcgcgttcgccgtcgccgcggtgctgctcctcgcattctgcaacagggagggccgcgacgacgacgacgacgacacgggaggggccggcgggaagggcggggagaagaaggggagggagtcgccggagtccaaggccgtcatcggcaaggccggggagggcaaccggatggtcttcttcgagggcccggcgctggcgttcgacctggaggatctgctccgcgcctccgccgaggtcctcggcaagggcgcgttcgggacggcgtaccgggccgtgctggaggacgccaccacggtcgtcgtcaagcggctcagcaaggaggtgagcgccgggcgccgcgacttcgagcagcagatggagctggttggccggattcgccatcgcaacgtcgtcgagctccgcgcctactactactccaaggacgagaagctgcttgtgtacgattactacgccagcggaagtgtatccaacatgcttcatggtatgtatgatcctttgaccatctcctcctctgtctcttcttcgtcctgtcactttgatcgttttcagtgctcaaattggaattacgggcttcataactacaagcgtcggcctgtttgtgcgttacaattttag

SEQ ID NO: 110070 - DNA, 2443 bp, Zea Mays
ggctgaccgtgccgccgtcactcctcccgttcaggtccagcagcgttcgtttcgttgctccactcatcagatccatccacgccagagacggaggcagccatgccgctgccgccgctcctgctctgcgtctgcctctacctcacccacctcccccgcctcgcctcctccgagcccgacgccgacaaggcggcgctgctggcgttcctcgccggcgtgggccgcggcgccaccgcccgcgcgcgcatcaactggcccaccaccccgctcgcctgcgccagccccggccacggccccggctggacgggggtcacctgcagccccgacggcgcgcgcgtcgtggcgctgcacctcccggggctgggcctctcgggcgccgtccagtccggcacgccgttcctggtcgcgtcgcatcaccacaggaatggcggatctcgccgctcaaccaccgtaacaagaaatcgttgccgacgacgatttcagaattcgaataaattcctacgccgtccagcagcgttcgtttcgttgctccacctccactcatcagatccatccacgcgagagaccgaggcaggcagccatgccgctgccgctgccgctgccgccgctcctgctctgcgtctgcgtctgcgtctgcctctgcctctacctcacccacctcccccgcctcgcctcctccgagcccgacgccgacaaggcggcgctgctggcgttcctcgccggcgtgggccgcggcgccaccgcgcgcgcgcgcatcaactggcccaccaccccgctcgcctgcgccggccccggaccgggctggacgggagtcacctgcagccccgacggcgcgcgcgtcgtggcgttgcacctcccggggctgggcctctcgggcgccgtgcaacccggcacgctcggccgcctcacggcgctgcagctgctcagcctgcgctccaacaacctgtcgggcccgctccccgccgacctcctgcgcctgcccgcgctcgcggggctccacctccaccgcaacgccttctccggcgcgctcccgcccgggctcgcggggctcgccgcgctccaggcgctcgacctctcctccaacggcttcggcggcggcatccccggcgcgctcaccagcctcacccgccttgtcgcgctcgacctctccaacaactcgctctccggccgcgtcccggacctcggcctccccgcgctccagttcctcaacctctccaacaaccgcctcgacgggcccgtgccaccgtccctcctccgcttcgccgacgccgcattcgcgggcaacgacctgacgcgcccgcccgcagcagctcctcccgccgccgccgcccccgccgcgcggacgcggcgggtcaggctcagcgaggcggccatcctcgccgtcgccgtcggcggctgcgtcctcgcgttcgccgtcgccgcggtgctgctcctcgcattctgcaacagggagggccgcgacgacgacgacgacgacacgggaggggccggcgggaagggcggggagaagaaggggagggagtcgccggagtccaaggccgtcatcggcaaggccggggagggcaaccggatggtcttcttcgagggcccggcgctggcgttcgacctggaggatctgctccgcgcctccgccgaggtcctcggcaagggcgcgttcgggacggcgtaccgggccgtgctggaggacgccaccacggtcgtcgtcaagcggctcagcaaggaggtgagcgccgggcgccgcgacttcgagcagcagatggagctggttggccggattcgccatcgcaacgtcgtcgagctccgcgcctactactactccaaggacgagaagctgcttgtgtacgattactacgccagcggaagtgtatccaacatgcttcatggtatgtatgatcctttgaccatctcctcctctgtctcttcttcgtcctgtcactttgatcgttttcagtgctcaaattggaattacgggcttcataactacaagcgtcggcctgtttgtgcgttacaattttagcaatcatgatagcgagacagacgtggcgattttgaaaggaaaggaagaaactttgtgacgtctgattgatatcatggtgacctggagatgcaatgttgcttgttgtttggaaagatgctcatgggttgatatgctaactggttgtttagtgcaagcaacaacctttgcttggcttttatcggattgctataggtaggagtttaggattcggggtaaataaaggcaatgcaggacctgaaggctactaaatattggaaaaggcccttgtttcttgtttgtgccctgtttcttgtctagcttcacattttaatctcttctgatggctgtcacactaggcttttcaaccgatatatatttgaaaacttctcatctcccggcttcctatctttacgccataccagtcaatatctgatcgcttttctgctttga

SEQ ID NO: 110071 - DNA, 2798 bp, Zea Mays
atgccgctgccgccgctcctgctctgcgtctgcctctacctcacccacctcccccgcctcgcctcctccgagcccgacgccgacaaggcggcgctgctggcgttcctcgccggcgtgggccgcggcgccaccgcccgcgcgcgcatcaactggcccaccaccccgctcgcctgcgccagccccggccacggccccggctggacgggggtcacctgcagccccgacggcgcgcgcgtcgtggcgctgcacctcccggggctgggcctctcgggcgccgtccagtccggcacgccgttcctggtccagcagcgttcgtttcgttgctccacctccactcatcagatccatccacgcgagagaccgaggcaggcagccatgccgctgccgctgccgctgccgccgctcctgctctgcgtctgcgtctgcgtctgcctctgcctctacctcacccacctcccccgcctcgcctcctccgagcccgacgccgacaaggcggcgctgctggcgttcctcgccggcgtgggccgcggcgccaccgcgcgcgcgcgcatcaactggcccaccaccccgctcgcctgcgccggccccggaccgggctggacgggagtcacctgcagccccgacggcgcgcgcgtcgtggcgttgcacctcccggggctgggcctctcgggcgccgtgcaacccggcacgctcggccgcctcacggcgctgcagctgctcagcctgcgctccaacaacctgtcgggcccgctccccgccgacctcctgcgcctgcccgcgctcgcggggctccacctccaccgcaacgccttctccggcgcgctcccgcccgggctcgcggggctcgccgcgctccaggcgctcgacctctcctccaacggcttcggcggcggcatccccggcgcgctcaccagcctcacccgccttgtcgcgctcgacctctccaacaactcgctctccggccgcgtcccggacctcggcctccccgcgctccagttcctcaacctctccaacaaccgcctcgacgggcccgtgccaccgtccctcctccgcttcgccgacgccgcattcgcgggcaacgacctgacgcgcccgcccgcagcagctcctcccgccgccgccgcccccgccgcgcggacgcggcgggtcaggctcagcgaggcggccatcctcgccgtcgccgtcggcggctgcgtcctcgcgttcgccgtcgccgcggtgctgctcctcgcattctgcaacagggagggccgcgacgacgacgacgacgacacgggaggggccggcgggaagggcggggagaagaaggggagggagtcgccggagtccaaggccgtcatcggcaaggccggggagggcaaccggatggtcttcttcgagggcccggcgctggcgttcgacctggaggatctgctccgcgcctccgccgaggtcctcggcaagggcgcgttcgggacggcgtaccgggccgtgctggaggacgccaccacggtcgtcgtcaagcggctcagcaaggaggtgagcgccgggcgccgcgacttcgagcagcagatggagctggttggccggattcgccatcgcaacgtcgtcgagctccgcgcctactactactccaaggacgagaagctgcttgtgtacgattactacgccagcggaagtgtatccaacatgcttcatgggaagaggggagaggagcgaacgccattggactgggaaaccaggtggaagatcgctctgggtgcagcaagaggagtggcacacgtccacgccgagaacaacggcagatttgtccacggcaacatcaaggcctccaacgtgttcgtcaacagggacggatacggctgcatctcggacctcggcctggcacagctggcgaacccgatcgcggcgaggtcccgctccctcgggtactgcgcgccggaggtcgccgacacgaggaaggcgtcgcaggcttcagacgtgtacagcctcggcgtcctcgtgctggagctgctcacggggaggtcgcccgtccaggtatccggcgggcgcggcagcgaggtcgtccacctcgtgaggtgggtgcagtcggtcgtccgcgaggagtggaccgccgaggtgttcgacggcgcgctgctgcgggtccctgacatcgaggaggagatggtggagatgctccagatcgcgatggcgtgcgtgtccaggacccccgaccggcggcccaaggtggcggacgtggtcaggacggtcgaggaggtgcgccggagcggcaccggcacacggccgccctccccgccggccaccgccgcggatgcagaccagagtgagatggagagctcctcctcggcggcggcggcggcggcgcagtgacggcgggagttgatgcttcgcagccgcatctggtgatccgttcgtcgccctttgtgttgtgctcttccaaatccacggccattccattcttttggcgggtgctgtaccattccattctttttttctctctctcttgtgttaagaagattccgtgttacgaaattgtaacacagtgtcacgtggagacggtggtccgtccgatgctcatggcagcagttgctcactccttgccgatgagatgagagtgtcagcgcatgaagacaagcaattaacattcggtgctgctttgctctgttgcttcttcagcttcggatcagatgcccttgagggcatggcaatggtttgcatcgtttgagtactcaacttgggcttgttcggttagctcttaatctacgtgtattgagtgagattagatgagtttgaatcccaaataagttaaaattattctt

SEQ ID NO: 110072 - DNA, 2124 bp, Zea Mays
atgggggttgtgcgtgagagagacgcctgctgggagtactgcgacaagctggatgggaacaaggtccggtgcaggttctgccacaaggtcctcaacggcggcatcagcaggctcaagttccacctgtcccagatccccagcaaaggggtgaacccctgcaccaaggtgaaggaagacgtcgtcgacagggtgaaggccgtcatctcggccaaggaagagtacaaggagttccagctcctcaagaggcagcgcgtcgccgacctgtcgtcggctgctgccccggcgaagtgggcgccggaggctcctccgtccctgtctacctctccggggcgagtggcctctcctgctgctgttattactcgtgccgctgaacagagtcggcttctcgccccggaagcgtccgctccggtgcccagaccatctgctgctgcggcaaacaacaagccacgcgccgccgccgcttcggaatgggagacagaacgatgtatagctgagttctttttcgagaacaagttggactacagcatagccgactcggtctcataccagcagatgctcgaggcgctcggcggtccgggattccgagggccgccagcagatgttctgcgggacaagtggctgcagaggctcaagtccgagatcctgcagaagacgaaggagatcgagaaggactgggcgacgaccggctgcacgatactggccgattcgtggaccgacaacaagctgaaagccctgatcaacttctccgtggcgtctcccatgggcacgttcttcctcaagacggtggacgcctcctcgcacttcaagacgcacaggggcctgtacgacctcttcgacgaggtgatccaggaggtgggcccggagaacgtggtccagatcatcgccgacaggaacatcaactacggcagcacggacaagctggtcgcgcagaactacggcggcgccatcttctggtccccctgcgcgtcgttctgcgtcaacgccatgctggacgacttctccaagatcgactgggtgaaccagtgcatctgccaggcgcagaccgtgacgcggttcatctacaacagcaggtgggtcctcgatctcgcgaggaagtgcgtggcggggcaggagctcgtctgctcggggatcaccaagtccgtgtcggacttcctcacgctgaagtccctgctgaggcacaggccgaagctgaagcagatgttccacagcgccgagttttcgtcctcgtcgtacgcgagcaggtcgataccgtgcgtcgagatcctggacgacgacgagctctggagggcggtcgaagagatagccgccgtctccgaacctctgctcagggtcatgagggacgtctcaggaggcaggcaggccatcggctacatatacgagtcgatgacgaaggtcacggactctatcagaacgtactacataatggacgaagggaagtgcaagtcgtttctggacatagtggagcagagatggcagacggagctgcactcgcctcttcactcggctgccgcctttctgagcccgggcatccagtacaacccggaagttaagttcttccgcactatcaaggaggagttctaccaggtcctggataaggttcttacgacccctgaccagaggcatgatatcaccgcacagttgcacgctttccgcaaggcacaagggctgtttggttcgaacattgctaaagaggcccgcaacaatacccctccaggcatgtggtgggagcagtacggcgactcagcaccgtcgctgcaacgcgccgccgtcagaataaccagccaggtgtgcagcacgctgacgttccagagggactggggcgtgatcctgcagaaccactacgagaagcgcaacaagctggacaaggaggccctggccgaccaggcctacgtgcactacaacctcacgctgcactccgagccgaaggcgaggaggaggccggacgcggacccgatcgcgctggacgcggtcgacatgacgtcggcgtgggtggaggactccgacggccccatcctcacccagtggctcgacaggttcccgtcggcgctggatggcggggacctgaacacgagacagttcggtggatccatcttcggcaccaacgacaacctgttcggcctctga

SEQ ID NO: 110073 - DNA, 270 bp, Zea Mays
atggaggcgaagagcaggctgccggaggtgaccatcgtcccggcggcacggccgttggctggcgacggcacagtcgacgcggcaaaggcggcggcaggcaaggagcccgtaagcccgggcactccgtcctcggtggccgccggccgcagcagctgtgaggagaggcgcgcggtggacggcgtcgccctgcctgggtggaagctcgacgccctctgccaggagtcctgcccgtcgccggccatgagggcgcgcttcccctactacttctga

SEQ ID NO: 110074 - DNA, 1355 bp, Zea Mays
cttgcaaccatcgaaaacccatctgccttcttcttcgcgagatccagggagaaactgaacactgcacgccatgaggtgctcagaaacggatcgatcaaccagcagtagcaagcgcggttgtgcatcatgcatgcatgtttgttcttcttttcttttgatttgttgttggtcgtttaatttgtcgccgccgccgccgtcatggttagttgcgacgacgatggctggatggaagagagcgtccttcagtccactcaggggcggtgctagggtcgaattagctgccgactcattcacccacatgccaagcaaacggccatggaaaccagctttgcagatgagtgaatgaagcgggaggtaaaagcttcgatctcgcaccgtctttgcttggactgaagggtgctccctcctccctcgctccttgtttacctttatcgatccatgcatcagcttcgtcatatctcatggttttactagcttcatggtctgtctttgcttgagctgcttaacttacatgtttggttggcatctgatgcatacatatatagcagctgccaaaacgacgggcatattttatttagtcccttatcatgtgcgtgcttactgttcttctctgctggttaattgttatatagcagttacgttctgtgtgtatatataatggagatccaaagcttttttttgtactttccttgcgcttttgatatataaactagctctaaatccttgatctgctcgttgaatctacatatatattgttctcttccaaaaaaagagatcccatttcgttctgaagaaaagaaaaggagatcgaacttcatttgctttgcttgtttttgttttttataaaggaagcatttttattaataaccaagggcaatacatcaaggagatacaaagtctatttgcttttgttgtgtgtagatcttacagtacaggatgggatgggatccatacatccatgatccatgcatcgtctctgcaggtttctgccgtctttccgtgatctgtggaagaagatggtgtgcactgttgtggacttggactaaacgagatgcatgctagcttttctggtgcgtgtgggaatctgtggaatcacaacgacgcaactttcgttcggttcgtgtcgtgcaacagcgaaacgtctttcgaaactccctgtttgctttggaactttgcatgcaactagatcgagctagtgattcgatgtgtgctagcatagcactccgatcctccctgtgcttttatttggagcattatgtatggccaccacttggactgaatcatcatcaggtttccgatgctttttttccctcatggatgtccccgataagagaagaacgaggctgttttaggca

SEQ ID NO: 110075 - DNA, 795 bp, Zea Mays
attacttacttacttctaattgtcggtgtataaattatgtgtacttgtgtagcatcttttggcctgatctagctaggtgtagtcagtattccttccttccagacctcgctcgtgtgttgtcctataaggtgtgatgttctcaaataattcttatatatgagagtcatgctaattgatgctgttttgaatttaaacaatagacataaaatgctctcaagaaccatcgttaagttcctgtatgtcacagtagcagcatcagctgtaacacatgttaatcaagagcttagtgttaccagaaaattggagatcaataaataaagggtgcatgtgtttcactggagcttatgcaccgccgcctgtttgttgattggtaaatgtatctttgcatcgattacaagcaattaaatctacccttcgatattcatgtcgttatatatagcatgcatgtgtgtgcttactatggtcattaatccaagcattgttcctggtgacagttgttaagcacaatttctgaaggaatcatggtaggggattaaattttctgataataatgtcatctactgcactcagcgaatgcccatatatatgtgtcgtcgcgacgtcgccagattgagggaatttatcacactaattaagaagatgaactgcctaataatgcacattgtgcgacgacgatgcagacatgaatgtctctgagcagtttgaaaccgagagccgagagcaacatttccacacgtactaacaagcgacacttaccagtgttctataaaaaggataacagtgctggcaagtttg

SEQ ID NO: 110076 - DNA, 1428 bp, Zea Mays
atctctatgacacagtgagggttgatccggtccactcccatccctagtgggccggatacgtttcgaggctacagaactccaacatggatattgtgatcggtgcctcgatgggctaaaaatcagaacacatggcatcctggcccattcaccagtgcgcttggagataaggcaggcacggcacaagctaggcgcgcaaagccattcgacacatgggcggcgccggcgagctagacgccttcgacgccggccgctgcgcggacgggtacgcgctgggcctcgccgtgggccgtcggttcgccgaggtcatccagagcaggatgcggcaggacctcgtgctccgggagcagctgctgccgttcgcgtcgacggcgcaggcgcaggcgctcctggccgcgctccagtccgccaacaggcagaggtacccgcggtactgggacgagctggtgggcaccgccgacggcagcggcgtcccgctcctccacgtcatcctggtcaacttcaggaaggaggtcctgccgttcatccctaagcaggaggaggagaaggagaaggaggaggccggcggcgactgctccgacgtcctcatcgtcagcgactccacggcgatcgccgcgcacaacgaggacggggacgtcgcgctgctcggccacacgtacctcgtgcgggccacgctgccggacggcgcgtccttcaccgcctacacctgcgccggcgagctcccgagctgcgccttcgggttcaacaccaacggagtggccttcacgctgaactcggtccccccggcgaacgacgagatcgtcgcgggcgccattgcccggaacttcgtgtcccgggacctgctagaagcgaagaacctcgaggacgcaatgcacagggtctgttcaccggccgtctcagtcggccacagctacaacctgacggacgtcagagggcggaggatcgtcaacgtcgagaccgcctccgggaaccggttcgccgtccgcgaggccggcgccgtgcccttcttccacgccaacatgtaccggcatctccaagtgaagcaggtgccggacgagaactcgatgagcagggagaggagagctgcgcagtgttcgtcagcagtggatgtggactccaaagaggcggcgctctcgctgctgggagacacagctgacgagaagtacccgatctacatgacaggtccgaggttgtacactctgtgcactgttttggttgacctggacgaggcgaccatgaccatatacaaaggaaacccaagggacggaaacgctgctcatgttcttcgaatccgtgccgacccgcctgccggttaagtggttaacagtactaggacagtcggttaacaattttcttctataatctacttcagctattaaggaggcacatgtaaatttgatatcacttcataatcaggcattcttactttca

SEQ ID NO: 110077 - DNA, 2288 bp, Zea Mays
ctccatcttccttccaaccccacttctccccaacccgaaccccaacaagggttctcggcgacgcgtcggccgcgggagatggccaccgcggcgaagctgccgtccctttacgccgagctcgccgccaagtcctctcgcgtcgcagagctggaggtcaggatctcggccctcgaaaccgagaacgcgggcttgagggaggccctggcggttgcgagacgagaatcaatgggcagtacaggaaaggaggaggacccaatctctcgccaattggcggcacgcctacgcggaatcgagcacggggcggtcgagaagccgggctggggcgtggctcgccgcgacgcaattgaggtcagcgacgacgaggagggcgctgcggctgtcggtgctaacaagggggaaagcccggacgagggtgtcggtgccgtcccggctcttcggaagcgggtggtggccggagagagcgtgggtgaagctgatgcggaggacgcggagggaggcggtggaaacaacggggagagcagcgcgggtctggaggatgacgatgtttcggtcacaccgcgggggaagaagcgtggccgccggtcggccgtggcgcaggtggtcaccagtgatagcgaggatgatggtgtgaatggtggtggtggtgtcgaggatcagtttgggagtgccaaggacggcagcggtgatcaggagggcctcatgagcagtaggaagcgtgcctttcgcggagtcagtgacagtgaggatgaggatgcctatgagggcgttgctccacggcacactgagagtggggaggaggatgtggatgatatggttcccatcgatgaattgctgaaaagggtgccaaaagagagggccagtgaggatgacggcgaatccgaagggcattccactcctgtgacgaggcgttctgctcgattggttaagaatcagtcaaaatcttaccgcatgtttcgtggagtcagtgacagtgaggatgaagatgacaatgagggaacagctgcgcctcagggcaagagtggggacaaggaggaggaggatatggttcccgtctataaattgctcaagaggatgccaaatgagagagcgagtgaggacgacgatgaatcagatctggccaaagggcattccgctcctgcgacgaggcgttctgctcggttggctaagaatcagtcaaaatcctaccgcgtattttgtggagtcagtgacagtgaggacaaggatggcgatgagggcacaactgcgcctcagactgagaaccgggacgaggatgaggaggatatggttcccatctataaatcgctgaagaggatgccaaaagagagggtgagtgaagatggcgatgaatctgatgtggccaaagggcattcagcccctgcatcaagacgttctgctcgattggttaagaaccagtcaataaggccaagagctgcatgtccggggctccactttgttgaaccacccaaggatgttgaagggagtgaagatgatatggaagaagacgatgatatgaatgagttcataaatgatgaatcttctgataatgctagtgattctgccgagaaatcctgtgatgaatcagatgtaccatctgttatgaatgaaaaatcctctccaggactagaagtgtctgatggtgaggtggactataaagatgtaatggcttgcattggccgtaaaaagaaagctaaagagtgggactacgaggcagatatgctagcagcatttggtgaacatcccgagctttgcttgaaggctgtttgtgccctctaccggaagcaaactgaggatgaacaggtggaaaaggcttctttagttcataataagcagggatttagccacaaagatgccccaaggggatctcgcattgcagaatttcttctggatggtgatctggttggtccgctgaagaagaccgtctcggatctagacgagtatgatcgctatgcttttgagttctgtcgcaaggtggcttcgcactactcaaaacaactttttgcaatctaccagaacaaggaggacccttactttcatccatagccctggtaatgcttagtatcccgccaactgcctgctacactcttttgtacatacagtacgtgttgaattgcactcctggagaagttaggacatgttaaatgtagtttaggagaatgtagagaggccttaggagtgttggttaggaagacaaatgtcttgtggtgtctgtgttatgatggtcttgtccatgttacaatcctgtttaatatacgccagtaagatactctgtttactgagttggtgggggc

SEQ ID NO: 110078 - DNA, 3469 bp, Zea Mays
ctccatcttccttccaaccccacttctccccaacccgaaccccaacaagggttctcggcgacgcgtcggccgcgggagatggccaccgcggcgaagctgccgtccctttacgccgagctcgccgccaagtcctctcgcgtcgcagagctggaggtcaggatctcggccctcgaaaccgagaacgcgggcttgagggaggccctggcggttgcgagacgagaatcaatgggcagtacaggaaaggaggaggacccaatctctcgccaattggcggcacgcctacgcggaatcgagcacggggcggtcgagaagccgggctggggcgtggctcgccgcgacgcaattgaggtcagcgacgacgaggagggcgctgcggctgtcggtgctaacaagggggaaagcccggacgagggtgtcggtgccgtcccggctcttcggaagcgggtggtggccggagagagcgtgggtgaagctgatgcggaggacgcggagggaggcggtggaaacaacggggagagcagcgcgggtctggaggatgacgatgtttcggtcacaccgcgggggaagaagcgtggccgccggtcggccgtggcgcaggtggtcaccagtgatagcgaggatgatggtgtgaatggtggtggtggtgtcgaggatcagtttgggagtgccaaggacggcagcggtgatcaggagggcctcatgagcagtaggaagcgtgcctttcgcggagtcagtgacagtgaggatgaggatgcctatgagggcgttgctccacggcacactgagagtggggaggaggatgtggatgatatggttcccatcgatgaattgctgaaaagggtgccaaaagagagggccagtgaggatgacggcgaatccgaagggcattccactcctgtgacgaggcgttctgctcgattggttaagaatcagtcaaaatcttaccgcatgtttcgtggagtcagtgacagtgaggatgaagatgacaatgagggaacagctgcgcctcagggcaagagtggggacaaggaggaggaggatatggttcccgtctataaattgctcaagaggatgccaaatgagagagcgagtgaggacgacgatgaatcagatctggccaaagggcattccgctcctgcgacgaggcgttctgctcggttggctaagaatcagtcaaaatcctaccgcgtattttgtggagtcagtgacagtgaggacaaggatggcgatgagggcacaactgcgcctcagactgagaaccgggacgaggatgaggaggatatggttcccatctataaatcgctgaagaggatgccaaaagagagggtgagtgaagatggcgatgaatctgatgtggccaaagggcattcagcccctgcatcaagacgttctgctcgattggttaagaaccagtcaataaggccaagagctgcatgtccggggctccactttgttgaaccacccaaggatgttgaagggagtgaagatgatatggaagaagacgatgatatgaatgagttcataaatgatgaatcttctgataatgctagtgattctgccgagaaatcctgtgatgaatcagatgtaccatctgttatgaatgaaaaatcctctccaggactagaagtgtctgatggtgaggtggactataaagatgtaatggcttgcattggccgtaaaaagaaagctaaagagtgggactacgaggcagatatgctagcagcatttggtgaacatcccgagctttgcttgaaggctgtttgtgccctctaccggaagcaaactgaggatgaacaggtggaaaaggcttctttagttcataataagcagggatttagccacaaagatgccccaaggggatctcgcattgcagaatttcttctggatggtgatctggttggtccgctgaagaagaccgtctcggatctagacgagtatgatcgctatgcttttgagttctgtcgcaaggtggcttcgcactactcaaaacaactttttgcaatctaccagaacaaggaggacccttactttcatccatagccctgggcgttccccatggaggatggcaggccgctgcagttcatcttcagcagccggcagtaaaccaccaggggcgggctggcgaccaccacgaccaccaccaacgtgtaccggagcgaggagttcattcccaccatgcgcaccatcgagtcgcaggcgtgcagcccggaggcggtcatcttcggtgatgacttcgcgcggtctctctactgccatctcctttgcggacgggattgactccccggtctcagacaaggcacggagggaggcctcactttcagagaaagcagatggctctttaatttggtaacagtgcatgtggacaggcactcttcttctttggaacctacaccactgatgcccactgtctgaatacattaaacttggctgaatgacaagagccacgggtgatgcagctacatcttggcatagctgtaccggtgccatctagaggacgtggtgaaggtggccgggttctacaactcgacgccgaagctcaagttcgtgtgccggctcaacctgatgttgagcatcaacgtcgacaagaacagcgagcaggacctgcagctgtgtggacagcgcggccaggatactgctggcggagaagctgggaggtggtggactacagcaaccacgcggaggcgtcgcgcgatccgggccactacgtcgtgttctgggagctcaacgcctacggctttgacggcgtgctgcggagctgctgcaacgttctgtatgggctagctctgagtgttttgtttatcctcctatccatgatccattggccatggcatcaggggcagttgggtgaccacatgtcatctggggccatgtgacgaagatcacaagttgcttgcacagttcgcgtcgtctctggccgacaggacaggaagtgagagggtggcaagtgcagcaaattataatcatggactcatggtcatggtatggtatcagtagtatctgttaccttcggtgttgcacggcataccacatctgactgaagatttacgtgcgctattaaacagcaggaaggacgtccaataaattggcggtcacattatatcaagatttcattatatctttccggtgttagagcagaaaactttttttatccgtctcctttatttaagattattggaaggtaatatatatacctcccaatggggatgaggtactatgtgccacatggacatggggtctaggtgaaggagcaagaagggtacggagaaatggagtacagagaaagtgcccattgctgttgcctcaattagaggtgatgaacacagtccatgctcaccactttagagcctgttcgtttatggattgtgtcagattgagcttgagtggattttaatctcaagcaagtcgaaattctctctattttttctcaatcccatccaaaccatatggaataagaataaccgttttgttc

SEQ ID NO: 110079 - DNA, 990 bp, Zea Mays
tcgagaatggttccagatacagttcgtgtagcagtaggaatcctaggaaatgctgcttccatgctcctctacacaacccctatactgacgttcagatgggtgataaggaagggcaacgtggaggaattctcctgcgtgccatacatcctagcgctgctcaactgcctgctgtacacctggtacggcctcccggtggtgagctccgggtgggagaacctgcccgtggccaccatcaacggcctgggcatcctgctcgaggtcgccttcatcgccatatacctacggttcgcaccggcggagaagaagaggtttgccttgcagctggtgcttcctgccctggcgctgttcggcctgacggcggccttgtcgagcttcgcggcgcgcacgcaccgctcgcgcaaggcgttcgtgggcagcgtcgggctggtggcttccgtgtccatgtacacctctccaatggtggccgctaagcgagtcatcgcgacgaagagcgtggagttcatgccgttctccctctcgctcttctccttcctgtccagcgcgctctggatggcgtacgggctgctcggcagggacctcttcatcgcgtcgccgaacttcatcggcgtcccggtgggcgtccttcagctgctgctgtactgcatctacaggagagaccacggggcggcagccggtgcagaggcgcaagcgcatggccctgccgccgccgccgatcaggagaagggcatgaaggcagcggcgccggtggccgtgcagccgcaggagaatcccttgtgcgttgtgtcagtctgtgaagtgaatgtttcgttatctccatctgcggcccaagcccaacaccgaactggactctccaagtcgaatgaaattgaaggcttggctcttgggctgtacggccacatagcagcgacccaactgttgagaactacgtatacggatcagcagatccacttatggcgtgtttggtttatgaagtcactctatacttcatga

SEQ ID NO: 110080 - DNA, 785 bp, Zea Mays
caagtcccaaccaaaagacacacggatgccagctctctagctaccttgtgcccaaagtgccaaacggccccttaagtcttaaccacctgctttatcatctcccgtacgcgctctccctcggtctctccctccctccctccctctcgctcgtggccacgactgggcgactgcctccgccgcatttcgctaggcgccacacggcccttggccggcgacgagcacccacagaaaaaagtgttgctcctacgactagttctttttatgtgtaaccttcaatgaaggattctcaggatattcagagcacgacagagttgcagtcaccagtgcaaggttcagaatttgatagagcgttgtctacagctctacatgaacaaaggagaagttgttagaactctttctactcgtgctagaatagaacctggcttcactactttagtatggcagaaacttgaagaagaaaactccgagttctttagggcttactatatacggttgaagttgaaaaggcagatcatcttgttcaatcatttattgcaacaccagtacaatttgatgaaatatccagcacctccgaatattccattggctccaatacaaaatggaattcatcatatgccagttagcaatttaccaatggggtatccagtacttcagcagcctatcatgcctgctcccggccagcctcacatggatccaatggcctgcggtctgtccagtggtcatgtggttaatggaatacctgcaccaggtggttatcatcccatgcgcatgaactccggaaatga

SEQ ID NO: 110081 - DNA, 910 bp, Zea Mays
caagtcccaaccaaaagacacacggatgccagctctctagctaccttgtgcccaaagtgccaaacggccccttaagtcttaaccacctgctttatcatctcccgtacgcgctctccctcggtctctccctccctccctccctctcgctcgtggccacgactgggcgactgcctccgccgcatttcgctaggcgccacacggcccttggccggcgacgagcacccacagaaaaaagtgttgctcctacgactagttctttttatgtgtaaccttcaatgaaggattctcaggatattcagagcacgacagagttgcagtcaccagtgcaaggtactaatgaagtgcaaagtcagcaaccaaactcaatggccgctgatgctcctgctggaaattcgggttccttgtctgtagctagtaatgacaataagaaggtgtctcgcgaagatattgaacttgttcagaatttgatagagcgttgtctacagctctacatgaacaaaggagaagttgttagaactctttctactcgtgctagaatagaacctggcttcactactttagtatggcagaaacttgaagaagaaaactccgagttctttagggcttactatatacggttgaagttgaaaaggcagatcatcttgttcaatcatttattgcaacaccagtacaatttgatgaaatatccagcacctccgaatattccattggctccaatacaaaatggaattcatcatatgccagttagcaatttaccaatggggtatccagtacttcagcagcctatcatgcctgctcccggccagcctcacatggatccaatggcctgcggtctgtccagtggtcatgtggttaatggaatacctgcaccaggtggttatcatcccatgcgcatgaactccggaaatga

SEQ ID NO: 110082 - DNA, 1187 bp, Zea Mays
agcatggttttggacaatggagcgcctgaagcaccacatgctggtgctaccggtagtgctatgtcatctgagatggctgtgagtccctcgtcggcggcttcaagcaaccatgctccttttacgccgtcagatataccaggcatgaccatggatgtatcggccctagactcggcatttgggtgtgatgtggggaatcctgaatctctgcaattgggaccagatgggtcgtcaagagactctattagatccttagggcagctctggaatttcagcctctctgatctaacagcggatttgacgagtttgggagcagatctggacgtgctggagaactacactggcacccctttcctgccatcggattcggacattttgcttgattccccagaccaagatgatatagtcgagtattttgctgacgccatcaacgggtctccgtcagacgaagagaaaccgtagtttttccggggttgcatggcatgcattcaggttcatcatcaggcagggctgtcatctcatctcatgtagtgtaaagcagccaatctaactgtgtattcggctcgcgcgcggtgatccggtaatcgggcctctgccactaaaaagaattttgtagcggttaattgaaatcctaattctttggaataagtagctgggactggaatgtccagagagtagcggtcgttgttggcttagggattgctgctggtggatgcaaacctcacagctagctggtgactctgaaaccacaggaactccttttctttttctttttacttgtatctgtatttgctgctacataagtaaacagaagtggggtgtacctagttttctggttctcgagtgtcttgaaacagtgggcgcgggttttcagctgaaagatcatgatattgtgttgttggcaaagtgctgaggacacgcgatgcaaagtttcttagattagccatacacaggaggctgctggagttgatctcacatctcagggtgtgtttggttgaactggagaatagagcctacccatcgtcaatcattttagtggagcaagaacatcccaataatttatagagttcgcccctctttcgtacaaccgttctccactcaaccaaacacacccttactcaatccatctgtgctgctctctgagctcatctttcctagtcaaacttaaatatgattacaaccaaataacg

SEQ ID NO: 110083 - DNA, 192 bp, Zea Mays
atggcccgatgcaaatacaagcagcaatcaaggagaccaaaatgcatgttacacagcattcaccattcagattgccttgcagcagtacagggtatatttatgaagggcgggcctggtgcagcggtagagcctaccgtctgtaaccggaaggttccgggttcgagccccaacctctgcatatttggtgcttaa

SEQ ID NO: 110084 - DNA, 3534 bp, Zea Mays
ccctcgctccctgcctccccggccatcgcatcgtgttcgaaatattcaaaacccaccaattcctcggattccgacactcgggtggagggaaccccaaatttttgcccccgcgtcgcctccgccttccaccctccgccccgcaaatctccaaatccgtttcggccccgaaccggacaccgccgcgcttgcttaaatcccgacgcgacgctcgcggaggcggcggaaccctataaggcctggatcccgctccgcgcccccgcccccgcccgatttcaggctctagggttacgcatgccctagcctccgctgcccgtggtgccggtgccatgcctgcgacccgcatcccgctcaagcgctgcaccgccgtcgtccccggcgtggaggatcccggccccgctgcaagcatgccgcccgctaagcgccgccgcgagcgcgtcgtcccgtcgcggttcaggggttcgatgccgccgcccgctcccgtcggggaggaggtggaggtggaggacagggacggggacgtgtacaacgtcgaggtccgcatggccgaacccaaaggcgacacatttggccccgtggagaccgcggtgtggacgccagttctgccggcgcccatggacgccgacctgtaccgggcgtgccgtaacataaacaagagcggcagctgtgggggagctgccagtggtagtgtgctcacgtctgtgagcaatgccgcctcggacggtggtgctggtggtggtggtggcaatggcgggctggaggggagacctgtggtggtggagtgcaagcccaagagggaggtcagcggcaggaaagaggatttctactggccacaggattttgtgctcggggatgttgtgtgggcgaggtctgggaagaagtccccgacatggcctgcgctggtgattgatcccctgttgcatgcgccggaagtcgtgctcaactcctgcgttcctggcgccctctgcgtcatgttttttggttattccgctaacgggcatggcagggactatggatgggttaagcaaggaatgatctttccctttgtggactacctagacaggtttcaaggacagcctctgtataagctcagaccaagcaaattccgtgcagcaattgaggaggctttccttgctgaacgtggtttttttgatctcgaaacggatggggtatgctcaccgcgaaagtctgtaaataagcagtctgatcctattggttttcaggaagaggctgcttcaaataacgagcaagaatgccaatctgagtctcaggttgttggcaaatcggcactgtgttgtgatagctgtggtaatcgtctaccatccaaggtttcaaagaaaaggaagcaagcgggtgagcagatgctttgtatgcactgtgaaaagttattgcagtcgaaacaatactgtggcatatgcaagaaaatttggcaccacacagatggtggaaactgggtttgttgtgatgagtgccagatttgggttcacgttgaatgtgatctaacatgcaacaacgtcgaggatttggaaaatgcagattatttctgtccggattgcaaatcaaaaagtaaaacagttccagcaactgaaaatttgaatacttccacttcagaatgtgccagcacttctaagggaaaactgaccgcaatgatagctgtttgctgcaatggcgaggatgcactgtatgtacctgagaagcacatgatactatgtcaatgtaagtcttgcaaggaaaggatgatgagtctgaatgagtgggagaagcatactggctcaaggaaaaagaattggaagatgagtattagacaaaagagtactggggaactactcattaatttgctggatgatattccttgtgggacatcgaagtattctaacccaggcattaagaaagaagagctgctacaattgcaagctaatccttacagtcctgtctgtgctaaatggacaactgaacgatgtgctgtttgtcgatgggttgaggattgggactacaataaaattataatttgcaacagatgccaaatagctgttcatcaagagtgctatggagcatgtgctgtacaagatcttacaacatggctttgtcgagcatgtgaatccccccaacagaaaagagaatgttgtctatgccctgtcaaagggggcgctctcaagccaacagacattgatggactgtgggttcatgttacatgtgcctggtttcagcctaaagtatcatttccggttgatgagacgatggagccagctatgggaataatgagcatccctgtagaatactttaagaagacttgcgtcatatgcaagcaaatgcatggtgcctgcacacaatgctacaaatgctctacctattaccacgcaatatgtgcgtcaagagctggatattgcatggagttgcaatgctctgaaagaagtggcaggcacattacaaaaatggtttcatactgtgattttcatagtactcctgacccagacaatgtgttgatagtgaagacaccggaaggtgttttctctaccaaattttttctccaaaatggtgagaaacagacagctgcaagactcgtcaggaaggaaaatcaccaggagaaagtgcttcctcctataatttctgactgtctagtcgcaaagtgcctgacctatgaaatgtcgaaatacaagaaacaaccaggagaggctattgcccaccggattatgggacctcgtcaccactctcaggattttattgatggtcttaatgcatgcatggatcgtaaggatgaccaatctttttcaacatttaaagagcgacttcggtatttacagaaaactgaaaatttgagggtctcgtgtggtcgatctggaattcatggatgggggctcttcgccgcaaggaatattcaggagggtcaaatggttattgagtaccgtggcgaacaagttagacggtgtgttgctgacttgagggaagcacagtaccatagagaaaaaaaggattgctatttgttcaagataagcgaagatgttgtcatcgatgctaccgacaaaggaaacatagcgcgcctaattaatcactcgtgtatgccgaactgctatgctaggatcatgaccgtcagcgatgacaggagcgagatcattctgattgccaagagagacgtctctgccggagaagagctgacgtacgactacttgtttgaccctgatgagtccgaagactgcagggttccatgcctgtgcaaggctcctaactgccgtgggtacatgaactagaagactaaccaacctcagaaacagggactaaagactaacgtgaccccccttacagttacagaggccaaaggctggccatttttcccggaattcttccgttggcttctcggtttatatttactggaaagtttattagttctcgtggctgcccaagttttgaaccattttgtttagatattgcgattgagggcagccaccccattgtatattctttcattgttgtaataagataccagtataatcaagaatgctgactttgaaatggaaagaagaaaaaactcaacttgatgcc

SEQ ID NO: 110085 - DNA, 1471 bp, Zea Mays
atcattaacaacatccgtgttgagccggcaggccgtgtgcccgtccgacgaccgggtcccgacaggagagtttaagcaggcagggcagggccgccgtggacgcgggaccgaagcagggccaccgccgctgcaccatgacgcgtctgctgctggcgtgcctggctctgctgctggcgcgggcggccgtggcgcgggagtacgcggccgtcttcagcttcggcgactccctgtcggacaccggcaacctgtgcgtggacggcatcccggactacttggccacggcgcacgcgccgtacggcatgacctacttcggctatcccacggggcgcgtctccgacggccgcgtcgtcatcgacttcatcgcgcaggagctggggctgccgctgctgccaccgtccaaggcgaagaacgcgacgttccgccgcggcgccaacttcgccatcacgggcgccacggcgctggacatggccttcttcgaggagcacgggctggcgcgcgccgtgtggagctccggctcgctccacacccagatcgggtggttccgggacatgaagcccaacatctgcagctccccgcaagagtgccgtgagctgttccggcggtcgctgttcgtggtgggcgagttcgggggcaacgactacgggtcgaccatcttctcgttccggccgctggaggaggtgcacgcgctggtgccgcatgtggtggacgtcatcgcgcggggcgtggaggagctgatcgcggagggggccgcggacctggtggtgccggggttgctccccaccggctgcttccccatgttcctgtccaccttcgtcggcaagccggccgcggcgtacgggccccgcagcgggtgcaacagggagctcaacacgctgtcgtgggtgcacaacgcggcgctgcagcgcaaggtggaggagctccgcgccaggcaccccgacgtgcgcatcgtctacgccgactactacacgcccgccatccggttcgtcctccacgctgaggagtacggcatgctgaggcagacgccgcgggcctgctgcggggcgccgggagtgggggagtacaacttcaacctgacgtccaagtgcggcgagccgggggcgtacgcgtgccaggacccctccaaccactggagctgggacggcgcccacctcacggaggccgcctacggccacatcgccaagggctggctctacgggccctacgccgacccgcccatccttcacccctgaatccttctccctccgatccgcccgccggcgccgggtaccgacatacgaataggcatacggatacacagcatgctagttaatctagtttgatttgcataagaagtttttactattgtactcgtagtgttttttaatacagtataaaattataaactgtacatgtaagtttgcgctatgttaacttctgtacataacttgggatcggagtatatataaacttgtactattacatgttgagtaat

SEQ ID NO: 110086 - DNA, 510 bp, Zea Mays
atgacgttcttcggccgccctacgggccgcaactccaacggacgcctcatcatcgacttcatcgctcagaagctggggctgccgctcccgccgccgttcctgcagccgcagcagcagcacgacggcagacaaggctccaacttcgcggtggccggcgccttcgcccgcgacgccagcttctatagggacatccccgtcgtgggcgcgttcgctctcaacaccagctctagcgtgcagctgcggtggttccagtcgctgtgcggccgccaccacccttaccaagctgatgagtgccggggccagttccgcgacgcgctcttcttcatgggcgagttcggggtcaacgactacagcctctccttgttcggcaagaacctgtcgcagatcaggtccttcgttccggacgtggtcaaaaccatctccacagcaacggaggtaatgctggctgctcttttttcacgctgcatgtgcatgcatggccatgggctgctgctgctagctgacagctga

SEQ ID NO: 110087 - DNA, 126 bp, Zea Mays
ctgttatctatctctctcctttttgtttcctgcgtaccaaaacgttttcactccttaaaaattcccatgcccagacctataaggtaactgttttaggatggagggagtaacaagcattagataaag

SEQ ID NO: 110088 - DNA, 1246 bp, Zea Mays
gttaattgttcacttttgcccgagcctgaaaccatgtctcgtgcactgtgcctcgccaacagctgtgaaccacaaacagtcccacatgctacccacaggggcataactttaccttacacgaaaactacaattattatttagaaaatacaggcgaggaataactcgagaggacctatggctcaacagtcgtcacttgctgccattcgccatccacagcttccttccacagggtcacattgttgttgccgtcggaaaccgccagtatgttcccagtcagtgaccacgacagcctccaaacgggggttctgaaatcatacagcacccggccgtcccactgctcaccttcttttgctgctgtccagatgacgaccgttccgtcctgagaggcgctggcgatggtggactttggaaggcccaggtttggggcccacgcgacatctctcacccagtccttgtgcatctgtagggcagggaaacagtccatccgccaactcccattgttgagcttccacaccttaaccgtgttgtcgcagccaccagaagcgagtttctgaacatactcaaactggccagaagatcctgcgctgattagagctcctggtgccattgctggagcccaggaaactgaggtcacaccaactggatgtgcctggtcgatacgtgtggtgtcccaacctccatcagaacgagcagcgaagactgaaatgttcccgtctgatgaaccacaagccaagcatagacccagctcatgaggcgcccatgcaatggagttcacggaggacttgtgctcagcaaaggtgtgtgctagtgcccattcatcaggcttgcttccttccttccagatgatcacccggccgtcgtagctgcaggatgcaagcatggaaccaaacttgggatgagcccatgcgacttgccatactgggccctggtgtccactcaaggttgcaagctgctggtgtgaggttccacttacgccaatgatctttattgtgttatcagaggaggctgtagctaggcgcttcccgtagtaatccatggcaatatcatggaccacatcttgatgcccagtctcaatcttatggggcggcattgttccaatgatccaactttaacttaacaatatggtaaccttctgtgtagaccacttccagtctgttatacacggacggagcgggcgaggatgaggagaagccgcggcgtcgaggaggggagcgctgccgctgctgcagcggaacgaaactggcga

SEQ ID NO: 110089 - DNA, 1532 bp, Zea Mays
agtcagtaatagtcagtcgagtcctcctccctccgccgcggccccgccgcccgtcacaccaaaccttccctccacctctttctccggcctctcaccggcaccacacgcacctaccctcagtcacctcacctctccgcgttttatcggcgttccggcagggggacgatggcgaggcggcgagccgcgctggcggcgctgctagtgctgctgctgctggcggcgtgcacggcggcggcggccgccgtgaccgtgtcgcggaagcagcggcagcggcaccaccccggcggggcgtcggcgtcggcggcgcggtcctgcgaccccttcgcggcggcaggcgcgtgggtggaggacgggtcgtacccgctctacgactcggcgcgctgccccttcatccgcgacgagttcgcgtgcgcgcgcttcggccgccccgacacggcgtacctccggtaccggtggcggctggacgcgccgtgcgcgcagcccgccttcgacggggccgcgctgctccggatgtggcgcggcaagacggccatgttcgtcggcgactcgctggcgctcaaccagtacgagtcgctgctctgcatgctccacgccgccgcgggccccgccgcgcggaccaccctgtcgccgccgtccgggaagatcgacccctcctccaccgtccgcttcgagtgcgagcaggactacaacgtgaccgtcgtgtactacctgacgcactacctggtggacctcgtgacggagccgcacaccggccggcgcgtcctcaagctggacgccatcgaccaggcccgcgactggctcgccgccgacgtgctcgtcttcgactcctggcactggtggccgcgcaccggcgccacgcagccctgggactacatccaggtgggcgacacggtggtgaaggacatggaccgcacgcaggccttcgccaaggcgctgcacacctgggccaggtgggtcgacgccaaccttgtccagaccgacaccaaggtcttcttccaggggatctcgccttcccactacaggggccaggactggggcgcgtcgccgaagaagacgtgcatgggggagacgcggccgctcaacgccacggggccctacccgggcggcccgatcccgcagcaggcgatcctgcgcggcgtgctggcggccatggccaagcccgtctacctgctcgacttcacctacctctcgcagctgcgcaaggacgcgcaccccaccaagtacgacggcggcatcttcggcggcgactgcacgcactggtgcgtcgccggcctccccgacacctggaacgtcctcttctacgccgcgctcaccgccgggcaggggcacaactgatggatgagtactacgttttttctttctttcctttttctttttaccgacacgcagtgttacgtagctcaataagtaaaggaaaagaaaaagatagcagattgatttcgtatagttacgagggggccttcaaaagatttttcaacctaaatgagttgatagaagaatatcaaaagagaatattgtaattcattcccgaa

SEQ ID NO: 110090 - DNA, 402 bp, Zea Mays
gccatgagacgacctcacgccgccgccgccgctaccgctctcgctgccctcctcctcctcgtcctgtgcctcgccgccgcgttgacccgccacggcagcggaatctgccagcaggcggggaggacgccgacgaggaagatgctgctggccatgacaataagcttcgacgacgacgacgctgccgcctcgccctcgccatccggtcaccaccgccatcctcaccaccatcaccaacaccaacaccaccaccaccaccacgcgggcaggcggcgatggaaccggcggcaggggaccattccaccaccgtcagacgatgctggcgaggcccaggcggtcgacccgcgctacggcgtgcagaagcggctggttccttcgggccccaaccccttgcatcactgagga

SEQ ID NO: 110091 - DNA, 1416 bp, Zea Mays
ctcacgtgttttttttggaaaagtttttcttttcttcgtttgtgaaaatgaaaggcaaataattggatcgccagtcaatttgtaagctcaatcaaagagtcccgtctcatccagaccagatcagatcacggacgacacagacggccaccaaatctgcacctgccccagatgcagcagaggtagtcgccacggcgccacctgcccactgcactgcccccagagcctccaagctgcatatcggaagtgaagcgcctcgcagtcctcctctcggatctcgcggtggaagtcgccggtccactcgatcagcgagcgagtcggtgccgcgcggcggattccccgacccgagcaaaggaaccggacatgcggccgcggctggtgctcttcggcgactccataaccgagctgtccttcgcgtccggcggatggggggccgcgctcaccgaccgcttcgcccgccaggctgacgtggtgctgcgcgggctcagcggctacaacacgcggtgggcgctcaaggtgctgccgcgggccatggagggcgcggcgggcgcgggcgcgggcgcggacccggcggccgtgacagtcttcttcggcgccaacgacgcctctctgcccgaccaggtgcaggcgcaccagcacgtgccgctcaaggagtaccagagcaacctccgcgccatctgcgcctatttcaaggagcgatggccctccactgctgtcatactcatcactcccccaccgatttacgagccagcgagaatccgagacatgtatggagacgacgagccttcacgccaaccagaaaggagcaatgaggctgccggcgcttacgcacaggcatgcatagatgttgccacagaattgaaccatccagttatagacatctggaccaagatgcaggaatttccagactggcaaacatctgcattgagcgacgggctccacttcaccccagtaggaaacaagatcctgttcgaggaggtggtgaagacgctggagacgagcatcggtttcagccaggagcggctcccgtcggacctcccgctgttccacgagatcgaccccaaggaccccatgaaagccttcggagcttagcttgggccttatcggaggagacgcacggtcgttggatcagccacgtctgctgcatttgagttcgtcgtcagtatgcccgaggcctgctgaggccattacaggaacagtgagctttaataagcggtgttttcagtaccgtttggttgtcagcgcatcacgtgttgttggaacactgtggttggataaaaaaatcataccctctccgtccgaaattaaaattcattttaccttttttataattcgtacaataattaattaatacatgtgttatatatatatatagattcattattatttatttgaatataaacataaacataaagaact

SEQ ID NO: 110092 - DNA, 825 bp, Zea Mays
atagattgcacttttcactaaaccacttatctctgtgttttctgcacatgttcagcgatccgattgccttgcctgactcaagcattcagtgcagattgcacttttcgctaaagttaagtagctttcaagccagccacacttattattgtccttggacccttttgcagagacatgtatggagacgacgagccttcacgccaaccagaaaggagcaatgaggctgccggcgcttacgcacaggcatgcatagatgttgccacagaattgaaccatccagttatagacatctggaccaagatgcaggaatttccagactggcaaacatctgcattgagcgacgggctccacttcaccccagtaggaaacaagatcctgttcgaggaggtggtgaagacgctggagacgagcatcggtttcagccaggagcggctcccgtcggacctcccgctgttccacgagatcgaccccaaggaccccatgaaagccttcggagcttagcttgggccttatcggaggagacgcacggtcgttggatcagccacgtctgctgcatttgagttcgtcgtcagtatgcccgaggcctgctgaggccattacaggaacagtgagctttaataagcggtgttttcagtaccgtttggttgtcagcgcatcacgtgttgttggaacactgtggttggataaaaaaatcataccctctccgtccgaaattaaaattcattttaccttttttataattcgtacaataattaattaatacatgtgttatatatatatatagattcattattatttatttgaatataaacataaacataaagaact

SEQ ID NO: 110093 - DNA, 867 bp, Zea Mays
gaagacgcatagttactcatttttgtgtgtctagttttaaaactggtcacagtttattttccttcagagtgatgttatgtaccggccggtagcacgtggaccgtccctagctttcttgtgcaattgtaggcttaattaaggcttcaggcactggtgtttttgtatttgtaacgaatacttgctaatgctgggtcgtttctaatcttttctctacctggaaaataatcgtggctagctctaaaccggcagtgaatgcattgcgacgtgatcaacagtcctgattgtattatatcatatcattaatgtgtacgtatgtattttgtttcggaagccctagctgcctgtgataaccatgtggatgcgacgatgctatgcagcgacgggctccacttcaccccagtaggaaacaagatcctgttcgaggaggtggtgaagacgctggagacgagcatcggtttcagccaggagcggctcccgtcggacctcccgctgttccacgagatcgaccccaaggaccccatgaaagccttcggagcttagcttgggccttatcggaggagacgcacggtcgttggatcagccacgtctgctgcatttgagttcgtcgtcagtatgcccgaggcctgctgaggccattacaggaacagtgagctttaataagcggtgttttcagtaccgtttggttgtcagcgcatcacgtgttgttggaacactgtggttggataaaaaaatcataccctctccgtccgaaattaaaattcattttaccttttttataattcgtacaataattaattaatacatgtgttatatatatatatagattcattattatttatttgaatataaacataaacataaagaact

SEQ ID NO: 110094 - DNA, 1698 bp, Zea Mays
atgtaccaatgtgtagggctggtttgttatgggcgccggcgagttggatggacgcgccttgtcggacgcggagcagcagtagcggcgggcaaccaggcgggggatctggatccgaggcaccaccaccgggctcctcacggcggcgacgcaggcggcggcggagaaggaggaggaggcggaggagcgcagcaagaagcagatgagcagcagcggcaccacaacaaccggctgctgcagttccaccagcaagtgcagcagaaccaagacccgccgccggtccccctctttcagctccagcacctgcaggccgcggcggccgtgaggcagcggggcggcttgtcggccgagtatgcccttctcgaccccatgggcgacgccggccagtcccactcccaccgccaccaccacggcttccagccgcagctcctgtccttcggaggagtcggccagcaccacatgcaccagttcacggcgcaggcgcccgcggcgtctcactcctcgcggccgcggataggaggggtgggcgcgggcggcgaggccgcggccgccacgtccgcgtcgcactcgcgcgcgaggggcggcgccggggagatcgtggccgtgcagggagggcacattgtgcgctccacggggcgcaaggaccgccacagcaaggtgtgcacggcgcgcgggccgcgggaccggcgcgtgcgcctctctgcgcacaccgccatccagttctacgacgtgcaggaccggctgggctacgaccgccccagcaaggccgtcgactggctcatcaagaacgccaaggacgccatcgacaagctcgagacgctgcccgcgtggcagcccacggccaatgccgccgcgccgccgtcctcctcgacgcaccccgactccgccgagaactccgacgaccaggcgcaggccatcaccgtcgccgcgcacgctccgttcgacttctccggcgccggtggagcaagcggcggcgccgcgggcttcctcccggcgtcgctcgactcggactccatcgcggacacgatcaagtcgttctttcccatggctggcacgggtggcggcggcgaggcgtcgtcgtccacggcggcggcgcagtcgtcggccatgggcttccaaagctacacgcccgacctcctgtcgcgcaccggcagccacagccaggagctccggctgtcgctgcagtctctcccagaccccatgttccaccagcagcaggaccggtcggaagcccacggcggcaatggctcggcgcagcaggcgctcttctccggcgccgccagctactcgtttggcggcggcgccatgtggggcgagcaggcgcagagccagcgcatggtgccgtggaccgtgcccgacccaggcggcgggagcgctggcggctacctgttcaacgtgtcgcagcaggcggcgcacatgcaggcggcgtttggcggccagagccagttcttcttccagaggggaccccttcagtccagtaaccagccctccgagcgaggatggccggagagcgtcgaagccgacaacccgatgcagcacggcgggctcagccccgctgtgtcggccatcgggttctcgcccggcgtcggcttctccgggatccgcatccccaccaggatgcagggcgacgaggagcacaacggcggcggcaatggcgacaagccgccgccgccgtccgtgtcctcggcttctcaccactga

SEQ ID NO: 110095 - DNA, 525 bp, Zea Mays
ctgcttcctacgacaacggatggctgcagcaaaatggaggagcaaggttgggagcgaagcactctttttgactggctggttggttggccggtcggtcggtcggtcggtttctctaccatctctcgctgctttgtgtacgtcactggtttttgctccaagaactcactcactcactcggagcttctcttgttagaaattaggcctgtgagaacgcagcacattggctagccagcaggttctttcttcactagatctcttgctgcttgtccgtttgctgcgttgttacagtaggtttagttgatgttctagttgctgtagtagttctcaagcttttgcatcttaattttgctgttgttctcgctggcgctctgcacggatcgatgggggttaagctagtgtgcttcctcctggggttcagggagcagctataagcggcagcgcagcgccagccagcggatgatgttgttgttgttgttagcctgataattaagcggatggggacaggagtctttggttctttttaaa

SEQ ID NO: 110096 - DNA, 794 bp, Zea Mays
ccgtgggctggatccgacggcaaaggcaagcatcccccggccgccgccattccaaccatccgagcatcctgctcagctcagggcgaaacaaaaccctcctccctcactgccccctcgcagacgagacgcgtggtagctagggttttggcctcgccgcgcacgcctcctgaagcttctagacgttcgaggaggaggaggggaggctcccgccgccgccgccgcagccatggcgtccaccaaggtgcagcgtatcatgacccagcccatcaacctcatcttccgtttcctccagagcaaagcgcgcatccagatctggctcttcgagcagaaggacctccggattgagggtcgcatcatcggattcgatgagtacatgaacttggtcctcgaagatgctgaggaaatcaacgtcaagaaaaacactaggaagacactgggccggatactcctcaaaggtgacaacataactttgatgatgaacagtggcaagtgaaagttcttatggcaggaacgatgtttggtgctcgcgttgagtatttctggcacgttgtactccatccattcagacttacatgtacctgctgttaatgacctgagtaaaattatgctagatgctggccacttgtgtgtgccatattggcatcttttctgtttccatgttcagcttgacctgaagttttgctctgccctctactctccgcgctaacttggcgggatcaaatcaacatgagatgtgctgaattatcaatgccgcttggttcaaggcgagcgaccctgtcaatgcgttttggcat

SEQ ID NO: 110097 - DNA, 1536 bp, Zea Mays
atgtccatcccatccatgtcgagctcgagcccctccgtggggagccctttgccgccggcgcgcgacggcgggccgggcccgttcgtgtggcggcagaaggagcagccgcagccgcagccgcagccgcagcatccggactacagcttcaccggccgcgtcctgctcacggccgtcgtcatactcgccatactcaccgtcgtcttcgtcctcatccgcctgctcctgtaccagttcgtggcgcgcggacggggccgcctggccgtgggcgtccgccgctccttcggctccttcgccaggaggagcgcccgccacgggctcgccgcgtccgcgctcgccgcgctgccggtcgccacgtaccgcgtccgcggggcggacgacgacgggcctagctccgcctccgacggcgccgggaccgggacggcggactgcgcggtgtgtctgtcggagctcgcggacggcgagaaggtgcgcgcgctcccgggctgcagccacgtcttccacgtcgattgcatcgacgcgtggctgcggtcccggaccacgtgcccggtgtgccgggccgaggtgcggcccaaggcgacggcggacacgcgcccctcgccgcctccggcgttgatcgatgccgctgggggcacgttggtcgtgaccgtggtaggcggcgccgcggagaccggggacgcacaccgcacgtccgtgctgggctccggtcaaccggccggtgccgttgggtcatcttggtcctcgctacccgccgccgccagggggtaccgcgcgcgcgtcgaggccgagctctccgggatctgcacggggatcctgcgcctcctcgacgggcgcctcgtgccagcggcggcggccgtggacgccagggtcttctacctcaagatggaggactaccactgctacctcgccgagttcaagaccggcgccgagcgcaaggacgcctactcgcctcgtcttctccaatctccacacacactctcactgcgcaaagcgagcaggcgggcgggcaaccaaccaaccaaccccactcgcctccctctccctcgccgttgccgccgagcaccgcgccgcgggttccccgtcgccatggagagcgcccacaagatcggaggcgggagcgtgcccggagcgggagccggaggggagggcgtcctgtgccacgcgtgcgggtaccagtacccgaacgggcacccgagcgccaagcagcggcgcgcgcaccggaagcactgcggcaagccggcgtccgccgcggcggcggcggagggctccggggagcgcgaagccagcgagctgcttctagggctttggttccaggcattcgacgaagctatttcagagctggatagtcttggggaagagtcgtacaaggatagcaccctcatcatgcagcttcttcgtgacaacctcaccttgtggacttctgacatgcagtacgtaagtgatgctaatcatgctatgtatcaggaggatggtggcgatgaaatgcgggaccagtacaggatcatttacatgtataggaacattcaatttgtacgataa

SEQ ID NO: 110098 - DNA, 967 bp, Zea Mays
tccgcgaccaccgccatgtcctccaacagcacggcctcgccgggagccggcggcggcacccggtgctgcggagcgacgacgctggtggccgtggccgccacgtcattcgccggctgcttcgtcctcgtcgtcgccttcctcttcgtgcgcttcgtcctgcttcgccagcgctggcgccacggcgcgagagggctcctgctgcaggagcagcgtcagcccaagcccggcctcgacgccgcggccatcgcactgatcccgtccttcccgtaccgacggcgagccggcgccgacggctcaacctcagtggctgctgatgctgccggcgccggcgccggcgccgctgagtgcgcggtctgcctcggcgtcctggacgaggggcagatggtgaggcagctctccggctgcaagcacgtgttccaccaggagtgcatcgacgtgtggctcgcgacgcgcgcgtcgtgcccggtctgccgcggcaaggccgagccgccggcgcgggccgaggaccgggccaccgcagcttccgcgccgccgcgtgtcgcggcggtcgagatgttgggcgacgagttggagctcgcctcgtcgtcaacgccggtggcggcttgtcttgacttgacggcgccccgccaacttgtgtacagcagtggccaatcgcagtgattgcctggtagaagtttgagtctaagacagcaacatctgcagctgcagctgcaggccgttgctgtggaataattttgcatactttgaccattctcttctacctataatactacatgtccgtataaaattctgtattacttactcgagagaaaaaaaaaacacaaccaacgccaagtccaccacctcgagggggccttgcgaagtcgccacggggcacggcccaagggccgggcgcagaggctgagcggcacggcggcgaacagcaaggtgacgccatcctagctggaagaagagcacgacgtggttg

SEQ ID NO: 110099 - DNA, 456 bp, Zea Mays
atggatgggatgagaccgcgtgggggagctggatcccgccggttcgagcaggcagcggcggaggcgtggctcgttggcagatgtgaagtcaggggagagaagctcagctgcccagctatagagaggagaggcagaacacgcctaataggtgtgcagtggcagcagcggcatgggaaggaaaaaggcgatggcatggaaaggaagacgacgacggtgtggtgtggtgaggagcaggcggggccgggccgagggatctggcgcggtgggggaggcttggattgtggcgaccgccatggatggaagggcgcggtggggaggcacggattgcggctctggcgcggtgggggagcaattgagagcggctgtggcgtggtgggagcgcgtccgtgcgatgaggagcggagggagaggattgtgcggcagaacatggcgcacgattatgaacgtctacattga

SEQ ID NO: 110100 - DNA, 2151 bp, Zea Mays
cctgagccacaggtacacctccatttggtggcctgcaatgcaaaacccctgcctcgtggtgctcatccctcctccgcctccctctatctcgctgctcgatcttgccacctgcaggggaatcggacgaaatcggtgcctgaacttgcgtcttgtcagtctgaccacgcgcatgggctgttcttgatctcaacccggcgcgcgttgtcactcgccacttctcttcagttgagtgtccatggagctgggagctccacacgcaccgtcgtcctgcatttgttcctcgcatcctttcctcgttctgtgacggcccggtcggatcatccaagaccgaccgacccacacacacacacacaacaaagaaccctcgcgcctcccccggtcggccgaccggtggttagatgcaacgggagatggtgcatgggcacggcgacggcaaccaccaccaacaccagcagctgccgaggtacagcgccgccgcggccgccaccggcgtggcgcgggcgtcgaagaagagcaagcccaagaagatcccgcagcgcggcctcggcgtggcgcagctcgagaagctccggatcgaggagcagaagatggagggatccatgccggtgtcggggcccacgcacctcggcgtcggcgtcggcgggttcggccacctactcccgatgcaccctccgccacacgcgccgctcccgcttctgccgaggcccggcgcggacggcggcgtgcactgcggctacccttcggtgctctgggacccagcgtcggcgtcggcggtggcggaccccatgaagcacccgttctacaagaggagcctgtgcccgctccctccgcttccaacggtgagcgtgggcctgtcgctgacggcggcgtcgtcgagccacccaacggagcccccttcaaaccaaatgtacagcagcggcggcggcggcgcggagactgcggcggcggaggacgacgaggacagggtacacgctgtcgttgaggaggcggccggcgtggacagaccctggcccttggtgttcgagggcttgaacacgaccgccttccggacgacggcggcggggaaggcccctctcgcagtcgccgccaggacaacgagagaggccgccgccgccgccgctggcttgccagacgcctgtgccgccgccgacctgagcagatacgagttcagcagagccaccacgaactattacaggttaaatttgtagagctcactcgcatgtttgtggtttcccccagtgtgggttttgttgagtgtgtgccttcatctgagctcgaatttctgcataaggactagcccggcctccgcctgcagcttgaacgcgagttttccagactggtcatcgccggagttggggcactgcaagagcagcaaggagaaggagcctgcccctgcctacctcaccttgagcgcgcagcctgcgccacgcgggaagcagcctcctcctgcgctcccctcgatcaaactcccggagttgggtcactggggcgtcatgcagcctcctcagcacgggagcgcttcggcgtcgtcgtccgcgtcggcgtcgcggccgttctacagcttcatgccggctggtccggttcgcatcgacagaccccggatcgggatcaaggccgacgacgcctctgacggcgtcgacctggaactgaagctgtgaaggcgctcatcgctggacccctctgttcctagctggtaaatttgacgccgaacctgaagcgggaactgggaacagagctcgtcgtcgtcgagaagaaaagtttctggcgccgtgttctcggtttgtaacctgaaacacgatgtatcggtatttgcgttcttttttttttctcctcaacattttcccgctcccaataaacatctggtgcgcatggagatggagtgtgtgcagcgtcgagcaggtcttcagtgaggaaaggagagcacgtgcacgatcggggttgcaagcttgcagctggcctctgtggggggtcttttctgtacagatctagcaaggcagcgtcgtggcacacccagatacgcaccagacagtcaggtagatgtctgccaagatatgcaaatatggttgtagatgttctggttttcctttggatcatttgtgtttgtggatgtagtgctacgtgcaatggaatcaccacatttcccattctatt

SEQ ID NO: 110101 - DNA, 1128 bp, Zea Mays
attctcgcgcttgggggtcactcgctgctaagtgtgggttggccagagtgtaggaggcggccggcgtggacagaccctggcccttggtgttcgagggcttgaacacgaccgccttccggacgacggcggcggggaaggcccctctcgcagtcgccgccaggacaacgagagaggccgccgccgccgccgctggcttgccagacgcctgtgccgccgccgacctgagcagatacgagttcagcagagccaccacgaactattacagcccggcctccgcctgcagcttgaacgcgagttttccagactggtcatcgccggagttggggcactgcaagagcagcaaggagaaggagcctgcccctgcctacctcaccttgagcgcgcagcctgcgccacgcgggaagcagcctcctcctgcgctcccctcgatcaaactcccggagttgggtcactggggcgtcatgcagcctcctcagcacgggagcgcttcggcgtcgtcgtccgcgtcggcgtcgcggccgttctacagcttcatgccggctggtccggttcgcatcgacagaccccggatcgggatcaaggccgacgacgcctctgacggcgtcgacctggaactgaagctgtgaaggcgctcatcgctggacccctctgttcctagctggtaaatttgacgccgaacctgaagcgggaactgggaacagagctcgtcgtcgtcgagaagaaaagtttctggcgccgtgttctcggtttgtaacctgaaacacgatgtatcggtatttgcgttcttttttttttctcctcaacattttcccgctcccaataaacatctggtgcgcatggagatggagtgtgtgcagcgtcgagcaggtcttcagtgaggaaaggagagcacgtgcacgatcggggttgcaagcttgcagctggcctctgtggggggtcttttctgtacagatctagcaaggcagcgtcgtggcacacccagatacgcaccagacagtcaggtagatgtctgccaagatatgcaaatatggttgtagatgttctggttttcctttggatcatttgtgtttgtggatgtagtgctacgtgcaatggaatcaccacatttcccattctatttgacacttt

SEQ ID NO: 110102 - DNA, 2241 bp, Zea Mays
gtcagtgatgctatttttttttttttttggtcagtattttgcagctaaaaggataattcacatttgttgctatcaaggtttttgaaagttttatatgattcagagaaatatatattcttcggctagtgggtctgctcattgatggaaggcaaccagattttggtccagtcagagcagagccttataccaggtgtgcaaactcttgtcatcggtcaagagtttgcagatgttgacacttgtcggagggctgtcaaggacatggccattgctttgcactatgagctccgtgtggtgaaatctgatcgtagccgtttcatcgcaaagtgctcaaaagaaggttgcccttggcgtgtgcacatcgctaagtgccctggtgttccaactttcactgtcaggactttgcatggggaccacaaatgtgagggtgttctgaacctgcatcatcagcaggctactgttggttgggttgctaggtctgtcgaggcaaggctcagggataaccctcagattaagccaaaggagatactgcaggatattcgggagcagcatggtgtcgctgtttcttatatgcaggcatggcgtggaaaggagagaagcatggctgcagttaatggtactcttgaggatggataccgccttcttcctgcatactgtgagcagattgttaagacgaatcctggtagcgtcgcaacatatggaggtattggaccagggaatgccttccagcggctgtttgtctcgtttcatgcatccatttatggtttcttgaatgggtgcaggccccttctagaaattgacaaggctgacttgaagggaaagtatcttgggacattgctttgtgcttcagctattgatgctgatcacatgatgttccctctagcatttggtgttgttgattctgagagtgatgataactggaattggtttatatcggaattgaggaagatgcttggagttaacacagataagatgccggtcttgactatactttctgagagaaagcggcaagtggttaaagcagttggatctaatttccccactgcttttcatggtttttgcctgagatacgtgagcgagagtttccttgacgagttcaagaatactaaactgcttaaccttttctggagtgctgtttatgctctcacagcatcagaatttgatgcaaaggtaaatgaaatgatgcgagttcaagatgtcatgccatggttacagcgtttcccaccaaacctgtgggcagtctcttgctttcagggtatcagatacggccattttagtcttgggataaccgagatattgtacaacttgtcgcttgactgtcacgaacttcccatcgtgcaggccatcgagcacataaggcaccaactgacttgctggtttgctgagcgtcagaacttggcacagtcatacaactcagttcttgttccgtcagctgagaaacttgtttcagaagccatccatgactcgcagtgctaccaggtccttcgagcaaacaaggtggagtttgagatcgtgtcgtcggagcggacaaacatcgtggacactgaagctaggtcctgctcatgccgccgatggcaaatctacggcattccatgcgcacatgctaccgccgcgctgctttcgtgtggcgaagacccgcgcttctatgctcatgactgcttcagtgtaatgaagtaccgagaaacatattcgcagccaatacatccaattccagacaggagccactggagcaattcttctcccgggttacaaggtgtggccagcaaggccgatgtgatgatgctcagcccacccaatatccggaggcctcctggtcgacccaagatgaagattctaaagatcgagagcatgaagcggccgaaacggatcgttcagtgtggacgatgtcatcttgtagggcattctcaaaagaagtgctctctgcgaagctgtgactcgtatccacattgatgtaccctgaacttcgttttattgataatttaggaatttcattcttgcttgttcgtatcaggtgcaggtagttctcttatggaagtgctactgtagttgctctgcctctgaaaccatgtcgacgttgagtctatgatggcactggaagtgtctatacgcaagccgccgtttcaggtcaaccacaatctgtctgtttctttttaatgatttttgcagttatggttctatacttctatttacgatctagtgacccctgatctagggttcagttcaagaattttagttatgttatag

SEQ ID NO: 110103 - DNA, 122 bp, Zea Mays
ccaaacagtgccagaatttatgattttattttttatgactttgatttaagggccaatttggcaagactaggactcggacttctaaatgacagcttaatttttcacggagttgaagccgtttt

SEQ ID NO: 110104 - DNA, 267 bp, Zea Mays
ctttcaaacagcgctgaaggtggttctctactcaaagatattcctgctactaaggatggaagggttgattggtcacaggatttcttctgcaaaccagcatttctgacagtgtctggacagcttaatggtgaaacatatgcttcagctctatctgatgtaattctttttccacattcatttgaaacaattaaccctgtcatgtttgatggctttagttagttttttatttcctcattgattttttcgctccagatttacacatttggt

SEQ ID NO: 110105 - DNA, 1034 bp, Zea Mays
agcaattggcatccaagccatggcgtcgttcaagtgcatgtgcgtcttcttagtctcgcttatgctcgccctcatcgtcaataacgcccaggaagagcggacgctcccgccgttcccctgcatcccaggccagccacgacccccgtggctcccaccctgcccgccagcgccagctgagtgctacacgtcggtgtcggggctgatgccgtgcgcggacttcctcacccacatcgggctgccaccggcaccacccacgaccgcctgctgcgacggtctcaggtcgctcgtcaccaacgcgcccatctgcatgtgccacgtcgtcaatggcgacatcaacaagctcctaccggcgcccatgatacccgtgcgcatggtggcgctcccccgcttgtgcgtcgtccccttcccacgagccacgattcgccagtgcatcagaggccatgtgccaccgatgaaccctccatctccaccaccgactccgtcaaaatcatcaccgccaaaatcaccaccgtcgactccacccgcggcatcaccaccagaaccaccagcagcatcgccaccggaaccaccatcgacgccaccatcggaatcaccgtcgactccaccaccgacaccaacggcgacgccaccggaatcaccaccctcgactccaccgccagaatcaccatctgatccaccaccagctacgccaccagaatcaccatctgatccaccaccagctacgccaccggaatcaccatccgatccaccaccaacaccaacagcaacgccaccaacgactccatctccatcatcctgatcaccataaatttttttaaaagcagcagcagtctagtcaaattagttttgcgttttaagattctatctgatagacgtcctatcatagctagtcaaattagatttggttcacatcaaatgcagcagtgtgttagctatgtagttgcatacctatcatagctgagtctattagaagcacatgtaataatattcaggaccagtcatctataaaatgtatgcaaagatgccattgtcgt

SEQ ID NO: 110106 - DNA, 971 bp, Zea Mays
atggcgtcgttcaagtgcatgtgcgtcttcttagtctcgcttatgctcgccctcatcgtcaataacgcccaggaagagcggacgctcccgccgttcccctgcatcccaggccagccacgacccccgtggctcccaccctgcccgccagcgccagctgagtgctacacgtcggtgtcggggctgatgccgtgcgcggacttcctcacccacatcgggctgccaccggcaccacccacgaccgcctgctgcgacggtctcaggtcgctcgtcaccaacgcgcccatctgcatgtgccacgtcgtcaatggcgacatcaacaagctcctaccggcgcccatgatacccgtgcgcatggtggcgctcccccgcttgaggccatgtgccaccgatgaaccctccatctccaccaccgactccgtcaaaatcatcaccgccaaaatcaccaccgtcgactccacccgcggcatcaccaccagaaccaccagcagcatcgccaccggaaccaccatcgacgccaccatcggaatcaccgtcgactccaccaccgacaccaacggcgacgccaccggaatcaccaccctcgactccaccgccagaatcaccatctgatccaccaccagctacgccaccagaatcaccatctgatccaccaccagctacgccaccggaatcaccatccgatccaccaccaacaccaacagcaacgccaccaacgactccatctccatcatcctgatcaccataaatttttttaaaagcagcagcagtctagtcaaattagttttgcgttttaagattctatctgatagacgtcctatcatagctagtcaaattagatttggttcacatcaaatgcagcagtgtgttagctatgtagttgcatacctatcatagctgagtctattagaagcacatgtaataatattcaggaccagtcatctataaaatgtatgcaaagatgccattgtcgt

SEQ ID NO: 110107 - DNA, 867 bp, Zea Mays
atggcgcagctgccgcccaagatccccaccgtggcgccggcgtggccggagttcgggggcgggcaccagcagcagcgcagcccctccgtgggcacgttcctcgccgccgcgcccatgcagccgtcgtgggtggacgagttcctcgacttctccgccgccaagcgcggcgcgcaccgccgctccgtcagcgactccgtggccttcctcgagcccgagcccggccccggcgacggcaatgccggggcgcatgacttcgaccgcctcgacgacgatcagctcctgtccatgttctccgacgacctccaaccgccgccgccgcagccgcagacgcaggccgcgcccgcgccggtggcgagctcgtcgtcgccgtccgaccacaacagcatcaacgacgagaagacggataggggcgacgccgaggaggcacagagcaagtgccacggcgccgccgccaccgccaccgcggtggatcctaagcgcgtcaagaggatcctggcgaaccggcagtccgcgcagcggtcgcgcgtgcgcaagctgcagtacatctcggagctggagcgcagcgtcacgtcgctccagacggaggtgtcggcgctgtccccgcgcgtggcgttcctcgaccaccagcgctcgctgctgacgctggggaacagccacctgaggcagcggatcgcggcgctcgcgcaggacaagatcttcaaagatgctcatcaggaggcactgaggaaggagatcgagaggctgaggcaaatctaccaccagcagagcctgaagagcggcagggagcccgacgcggccccgtcggtccgcgacgacaaggacatgatcggcagcgaggggaccgccgcgcccggcccgccctcgtga

SEQ ID NO: 110108 - DNA, 1551 bp, Zea Mays
atggcggcgcagtctctgtccgtgcccgtgcccatgcccagctccttggacctccgcgcggcggcgccgttcctggttgccgcggtggctttgtacttcctgatggagcaggtgtcctaccaccggaagaaggggcccctgcccgggccggcgctcgtggtgccgttcctcggcagcgtagcgcacatgatccgcgacccgacggggttctgggacgcgcaggcggcgcgcgccaagcggtccggcgcgggcctcgccgccgacttcctggtggggcggttcgtggtgttcatccgcgactcggagctgtcccaccgcgtgttcgccaacgtccgccccgacgcgttccacctcatcggccaccccttcggcaagaagctgttcggcgaccacaacctcatctacatgttcggcgaggaccacaaggacctgcggcggcggatcgcgcccaacttcaccccgcgcgcgctgtccacctacgccgcgctccagcagcgcgtcatcctggcgcacctccggcggtggctcgaccggagcggcggcggcggtggcggggcgttccccatccgcgtgccctgccgcgacatgaacctggagacctcgcagacggtgttcgtggggccgtacctcgccggggaggcccggcggcggttcgagcgggactacaacctcttcaacgtcgggctcatggcgctgcccatcgacctgccctgcttcgcgttccggcgcgccagggagggcgtggcgcggctggtgcgcacgctgggcgagtgcgcgcggcagagcaaggcgcggatgcgcgccggcggcgagcccgagtgcctggtggacttctggatgcaggacacgctgcgggagatggacgaggcggcggcggcggggcgcccgccccccgcgcacaccgacgacgaggagatcggcgggttcatgttcgacttcctgttcgcggcgcaggacgcgtccacctcgtccctctgctgggcggtgtcggcgctggactcccacccggaggtgctggcccgcgtgcgcgccgaggtgtcggccgcctggtcgccggactccggcgagccgatgacggcggagacgatccaggggatgcggtacacgcaggcggtggcgcgcgaggtggtccggcaccggccccccgcgacgctggtgccgcacatcgcgggcgaggcgttccagctgacggagtggtacacggtgcccaagggcgccatcgtgttcccgtccgtgtacgagtcgtcgttccaggggttcccggacgcggaggcgttcgacccggagcgcttcttctcggaggcgcggcgggaggacgtggcgtacaggcgcaacttcctggcattcggcgccgggccgcaccagtgcgtggggcagcggtacgcgctgaaccacctcgtcctgttcatggcgctgttcgtgtcggtggtggacttccggcgggagaggacgcccgggtgcgacgacccggtgtacatgcccaccatcgtgcccaaggacggctgctccgtgtacctcaagcagcgatgcgccaagttgccgtcgttctga

SEQ ID NO: 110109 - DNA, 2246 bp, Zea Mays
atatgtttaaagtttttttataaggaagactttattaatttcaaaaacattacatcgagaaaatacaagtctttgcaacctctcccagcctctgttaatgaaagcacacaacttttagaagaacgatcacacacacttacgtacactctagtgactatcaatccgaagactagaccgtcacccatgatcctgagcaaaaaagaccttaaccacttgcatcaaacgttacgtagcctccaccataaaaagacgagaatctgacttttacagtacagtccacgtgcgaagctaatggaagatagtatggataacctgcaaaggagaataattttttttttcaaaaattatgccatttctgcttagccaaatcacccaacaaacagttgcggccctaataaggataaatctctaagatcttttccaaaacccctaagccagctcccaaacatattagaaacactagaaggcttagaaatgccaaaaactaagcgaatttaactccaaaccatgcgagcaaaacgacagttaaagaacaacctaattgtttctgacacctgacaaaagcaacatgttcaagctcaccgccaccaaggagaaacgctagctgcttttcctcgagaagtacgaagaagccaagatgtggtgggtttgcttgacgaatctgacattctgactgaagtttggacatagcattggggtgggtgcctgactgcctggtcagggttcgcaccgagatccttggacggaagaactgaggcgatttcgacacaatcttcttgggctcaaacaggtgaacggagaattcaggtcccacttcatccgacgatcacgcatccactccatttgccactgacctctctgttactgcgtccaggggtaagatcttgagagagcaacgcaagaacagagctcactagtagctgtatagcaatcttcgttttcttgttaaaaagggagaaaaacaagagagcacagcagatatttttgtattccattcctgaacctggtctcactttccattccattccattccattggatgccaaaccaaatcacaacccgtggttgaaaccaggacaagctcgcaagaatttggcatcagcagtccctagtagccgtttggaccttccgtagtctgaaaccaccaaagtttggccacggaatctgtagacatgaaaactaagtctccagatttttattaggtgtatacccaaacctgtcaaaatctggaaactacgaagcttctgttctgaagatggctattgccagggaacggcggtgtcttgtttgcgctcacttgacgcatatctgcccaaaagggtttcatgtttctctctgattcaactattgtcaccaggagcagaaagcagaagcagtacatgtcttctaccaataggcagttacaaatcgttttcaagagtcccatcagaaattcagaatccaacttgcagaagagtaacacagtgtggtgtgaaagaaggatgcatgtctatgtaataacaaggcaagtaccccgtgagttatctccactcttcatgaatcaacgtatatatttccaggtgctcagactctcgaacaagggtcacgagttagcaaagctgagagtgatgcagggatcaaaagcaaccaaatggatacatgtgatgaagctaaaaggtactagaacagatgttggcggcccagtatacaggcttctagttctagcgaaggtgcaaactcacaggcagcatgtgacaaaagttcagcatctggaaggcaacgaatgcattgtaagaaaggccaagctgaaccccgcaatcggaatatttatatttcttcacaacggattaagtaaactcctttttatttatatatctgtccatacaacttcattggcgaagccttttggagggttcctgctgtatgcctgcattggtacatcagcaaagaaaaacaaggacgatattttcaatatacctctccaataacagtcatgtgttgcaagaaaggcacatgaatgcaggtataatctaggcaacatgtgtaatataatgtgtgcaattgaacgggaatactaaatattgatcaggaggtgcttgcatgcactagagctaattgttagttgactaaaaaattgctagtgaaattagctagctaacaaatatctagttagactgtttgaatgtcttcaactaattttaacagctaactattagctttagtgcattcaaatatggccttaatcttcagcaactttgctgcattttc

SEQ ID NO: 110110 - DNA, 1264 bp, Zea Mays
ttttttttttcaaaaattatgccatttctgcttagccaaatcacccaacaaacagttgcggccctaataaggataaatctctaagatcttttccaaaacccctaagccagctcccaaacatattagaaacactagaaggcttagaaatgccaaaaactaagcgaatttaactccaaaccatgcgagcaaaacgacagttaaagaacaacctaattgtttctgacacctgacaaaagcaacatgttcaagctcaccgccaccaaggagaaacgctagctgcttttcctcgagaagtacgaagaagccaagatgtggtgggtttgcttgacgaatctgacattctgactgaagtttggacatagcattggggtgggtgcctgactgcctggtcagggttcgcaccgagatccttggacggaagaactgaggcgatttcgacacaatcttcttgggctcaaacaggtgaacggagaattcaggtcccacttcatccgacgatcacgcatccactccatttgccactgacctctctgttactgcgtccaggggtaagatcttgagagagcaacgcaagaacagagctcactagtagctgtatagcaatcttcgttttcttgttaaaaagggagaaaaacaagagagcacagcagatatttttgtattccattcctgaacctggtctcactttccattccattccattccattggatgccaaaccaaatcacaacccgtggttgaaaccaggacaagctcgcaagaatttggcatcagcagtccctagtagccgtttggaccttccgtagtctgaaaccaccaaagtttggccacggaatctgtagacatgaaaactaagtctccagatttttattaggtgtatacccaaacctgtcaaaatctggaaactacgaagcttctgttctgaagatggctattgccagggaacggcggtgtcttgtttgcgctcacttgacgcatatctgcccaaaagggtttcatgtttctctctgattcaactattgtcaccaggagcagaaagcagaagcagtacatgtcttctaccaataggcagttacaaatcgttttcaagagtcccatcagaaattcagaatccaacttgcagaagagtaacacagtgtggtgtgaaagaaggatgcatgtctatgtaataacaaggcaagtaccccgtgagttatctccactcttcatgaatcaacgtatatatttccaggtgctcagactctcgaacaagggtcacgagttag

SEQ ID NO: 110111 - DNA, 2055 bp, Zea Mays
atggaagatattagcaatatatttcacaatgacctgctcccatctctaggagcaaaagcaaacgagtcaatcaagttgaggaaattcatcatttctccttatgattcgtgttacagaacctgggagacgttcttgcttgtgcttgttgtttactcagcatggatctgtccatttgagctagcatttctgagacatctctcatgggtgctttttctggttgagaacattgtcaacagcttctttgctatagatatcatcctaacctttttcctggcataccttgataaaaaatcatatcttctagtggataatccgaaaaggattgcagcaagatatatctcctcttggttcatttttgacgtttgctcaacaattccatatcaagcgtttggtctactatttaaaaagcatgcaaatggcctcgcttacagaattcttaacatgctacggttatggcgccttcgtcgcctcagtgatctatttgccagactagaaaaggatattaggttggactactactggataaggtgcatcaaactaatatctgttactctttttacagtacattgttcaggatgtttcaattacctgatagctgatagataccccaatccagcaagaacctggataggagcagcaagaccagactacagatcagagagcctatgggttcgatatgttacatcgatttattggtctattacaacacttacaacaactggttatggagacttgcatgcagagaatccaagagagatgttattcagtatatgctacatgctgtttaatctgggactgacagcatacctcataggaaacatgacaaatctggttgtccagggaagttgccgtaccagaaatttcagggacacaatccatgcagcttcccagtttgcctcaagaaatcagttacctgaatacataagggatgaaatgctatctcatatttgcctaaggtataagacagagagtctgaaacagaaggaaactttggacagtctccccaagggaatccgatcaggcatagcataccacttattcttccctgtcattgaaaaagtgtacctttttcgtggtgtttcttatacttgcatgctccaactggtcactgcaatggaagcagagtactttccaccgagagaacttgtgatactacaaaatgaagcaccgacagatgtttacatattagtttccggagcagtggaagaacgattcgtgattgatggggttgaaaacgtccagggagtaatgtacgctggcgaaatatttggtgaaattggggctctgtgcagtgttccccagccatttacaatctgtacaaccaaaatttcacaactcctgagggtgagcacaactgtgctaaaaaatattatagaggaaaacaaagacgacgaacaaattgtacttaacaatattttccagaaaacagcccaagatcaaagattctctactgaggttagcgggaaatttcttggaaaactcaatcaagaattcagaaagcccaacaactattcagccttcaatcaagtcggtcaagaaaatgaatcagaagcaaaaggaagagtaacatcatgttgcagaaatgagcgctgtaaagaactcaacgaatcagagagatgcaatcatgtaactattcacaaaactgcaaaacaggatgacttcaacataatcaatagttttcctgctaaaggtgaaagcaaggaaaaacatattctcacaaatttgatgtttatggagtctgtgtacagaggagaggcagatgttcatcgacaaatattacctgacagtagcctgacaagatctgaagaggatggcagttctgtggttttagaaataaagagagtgacaattcatgtatatccacagcagaacaaaaaatatgtgccctgtgcaaaagttataaaactaccaggatctctggatgaacttttcaacatagcttgtcagaagttctctggctattgcccaaccaaagtgttcaatcaagaatttgcagaaattgatgatgttacagttattcgagatggtgaccgtttgtttcttatggaatcttga

SEQ ID NO: 110112 - DNA, 1386 bp, Zea Mays
cgccgactgcacggacggggaagcctcctggagagtggactccctttccttctataaatccggctcctcccaatccaggatcttcccagcctcgccgccccaccaccccagcattgccttaccttgccttgccttgccctgccctccattccacctccacctcgccgcccaaatccccccacccaacaatcccccatggggtcgcaggccatcgaggcgcaccgcgcgggcgcggaggtgtaccgcggcgcggcgctgtgcgcggagaagtcgacggagctgctggcagaggcgcacctcccgctgggcctgctgccgctggccgacatggaggaggtcggctacaaccgcgccacgggcttcgtgtggctgcgccagaggaagtcgctcacgcacacgttccgcccgatcgcgcgccaggtctcgtacgccgccgaggtcaccgccttcgtggaggaccggcggatgaggcgcatgaccggggtcaagaccaaggagctcctcatctgggtcaccctctccgacatgttcgtcgacagggacgacccctccaagatcaccttcaagacgcccaccgggctcggcaggacctaccccgtctccgccttcgctaaggaaggcgccggtgacgacggcgcggcggccaagcacaaggatgatgcccccgccccgaccgccgccggtaaggctgctgccagcaagtgaggtgcgcggcgtccggagctttttaccttgccgtagtcgccatacttgcctccccaataatggcgtttgtaccccctctacctgcttcaaattagtgtgttttatgaatggaaacgaccatccaactttccatccgtccttgcaatgtgtcacggcgggatgtttttactacacatcagctttaccagtttcaagattgtttttttccctaatcttgagttaaaacaaaaactaataagtgctcaattttcctaacgacttccacccagtcagttcacgttaagctatcttcaatggctttccggacatgcatagctgtccggtagttaatactaggatgccaggaattcttgacagagacgggccagcaaaaacagaacagaccaagcagactccacttccacggacgagtcattggcaattttgccattatcatttgtgggcttcgccagtatgccatcggacccacaaatcatagacacagacggtcccaccagtcatagacacgggatggcataataacaggcagccaaaattgagagtggcaaaatagcaaatttctctccacggggacgtaccagcactccagcagacatatagctgtacgccatgagctccttgcttcaccagtaaagctcaccaattatttgtatcctgcaagctgaaactgaaagcaactgc

SEQ ID NO: 110113 - DNA, 1370 bp, Zea Mays
gccgactgcacggacggggaagcctcctggagagtggactccctttccttctataaatccggctcctcccaatccaggatcttcccagcctcgccgccccaccaccccagcattgccttaccttgccttgccttgccctgccctccattccacctccacctcgccgcccaaatccccccacccaacaatcccccatggggtcgcaggccatcgaggcgcaccgcgcgggcgcggaggtgtaccgcggcgcggcgctgtgcgcggagaagtcgacggagctgctggcagaggcgcacctcccgctgggcctgctgccgctggccgacatggaggaggtcggctacaaccgcgccacgggcttcgtgtggctgcgccagaggaagtcgctcacgcacacgttccgcccgatcgcgcgccaggtctcgtacgccgccgaggtcaccgccttcgtggaggaccggcggatgaggcgcatgaccggggtcaagaccaaggagctcctcatctgggtcaccctctccgacatgttcgtcgacagggacgacccctccaagatcaccttcaagacgcccaccgggctcggcaggacctaccccgtctccgccttcgctaaggaaggcgccggtgacgacggcgcggcggccaagcacaaggatgatgcccccgccccgaccgccgccggctgttcgactacatccagggcaagaacgcgtacaaccagacgatcgagatgacggcgccggtgctgacgcgggtgtcgcccagcgacgggcccttctgcgcctccgccttcgccgtgagcttctacgtgccggccaagaaccaggcggacccgccgccggccgagggcctgcgcgtggaccgctgggccggggccaggtacgcggccgtgcgccgcttcgggggcttcgtggcggacgccgacgtcggggagcaggcggcgcggctcgaggccagcctccagggcacccggtgggccgccgccgtcaacgacgcgcgcagggccgacccggcctcgccctacaccgtcgcgcagtacaactcgcccttcgagttcaccggcagggtcaacgagatctggatgctcttcgacgcggacgacgacgccagtatgtgatgcgattccaagcgtgctctcggggcactgaggcgtttagggaaggacgcgcatgcacctgtgcagtgcagctgtgctaccatgaagtatttcgtgctcttgtgcgctagcttcgtttactttcgacttttcgagtaaggaataaggtgcctcttgttgcaataatgataaagctaatcctgcttgtaattacatttcgtggcatggccattccggcaacatgtccagtaaaaaaaaactttttagtttcatc

SEQ ID NO: 110114 - DNA, 2002 bp, Zea Mays
gccgactgcacggacggggaagcctcctggagagtggactccctttccttctataaatccggctcctcccaatccaggatcttcccagcctcgccgccccaccaccccagcattgccttaccttgccttgccttgccctgccctccattccacctccacctcgccgcccaaatccccccacccaacaatcccccatggggtcgcaggccatcgaggcgcaccgcgcgggcgcggaggtgtaccgcggcgcggcgctgtgcgcggagaagtcgacggagctgctggcagaggcgcacctcccgctgggcctgctgccgctggccgacatggaggaggtcggctacaaccgcgccacgggcttcgtgtggctgcgccagaggaagtcgctcacgcacacgttccgcccgatcgcgcgccaggtctcgtacgccgccgaggtcaccgccttcgtggaggaccggcggatgaggcgcatgaccggggtcaagaccaaggagctcctcatctgggtcaccctctccgacatgttcgtcgacagggacgacccctccaagatcaccttcaagacgcccaccgggctcggcaggacctaccccgtctccgccttcgctaaggaaggcgccggtgacgacggcgcggcggccaagcacaaggatgatgcccccgccccgaccgccgccggtaaggctgctgccagcaagtgagctaacctcacgccggcggactctagcaagagcacgaacgagggccaagcgctcgaaacccagcgacgtggaagcgcctgcgccgcgagcatccttccagagcgcggggccaaggccaagcagaggtatttatcatcgcagccgatccccagccgcacgaacggaggtcgagcaccagacctcatctcactccgctaccccctcatcctgccatccaccagaagcagtgcaagcatatggcgcgccgtgccagcctgctcctcgccgcggcgctgctcgtcgccgtcgctgccgcggcggtgccgccgacgtgcgagcgcatcgagtgcccggcgtacgaggtggtggacagcgccaacgggttcgagatccggcggtacacggacgccatgtggatcaccacggcgcccatcgaggacatctccttcgtcgccgccacgcgcaccggcttcctacagtaagccaccacctctcgcctccacacgcacgcttccgtcccttattgggccgccttcaaatgggccagagccaaagagagaaaataatacgtgctcgcacgtagtccttagctgtggtgggctcacaccggatacgcgcgcgcgattgcaggctgttcgactacatccagggcaagaacgcgtacaaccagacgatcgagatgacggcgccggtgctgacgcgggtgtcgcccagcgacgggcccttctgcgcctccgccttcgccgtgagcttctacgtgccggccaagaaccaggcggacccgccgccggccgagggcctgcgcgtggaccgctgggccggggccaggtacgcggccgtgcgccgcttcgggggcttcgtggcggacgccgacgtcggggagcaggcggcgcggctcgaggccagcctccagggcacccggtgggccgccgccgtcaacgacgcgcgcagggccgacccggcctcgccctacaccgtcgcgcagtacaactcgcccttcgagttcaccggcagggtcaacgagatctggatgctcttcgacgcggacgacgacgccagtatgtgatgcgattccaagcgtgctctcggggcactgaggcgtttagggaaggacgcgcatgcacctgtgcagtgcagctgtgctaccatgaagtatttcgtgctcttgtgcgctagcttcgtttactttcgacttttcgagtaaggaataaggtgcctcttgttgcaataatgataaagctaatcctgcttgtaattacatttcgtggcatggccattccggcaacatgtccagtaaaaaaaaactttttagtttcatc

SEQ ID NO: 110115 - DNA, 1754 bp, Zea Mays
gccgactgcacggacggggaagcctcctggagagtggactccctttccttctataaatccggctcctcccaatccaggatcttcccagcctcgccgccccaccaccccagcattgccttaccttgccttgccttgccctgccctccattccacctccacctcgccgcccaaatccccccacccaacaatcccccatggggtcgcaggccatcgaggcgcaccgcgcgggcgcggaggtgtaccgcggcgcggcgctgtgcgcggagaagtcgacggagctgctggcagaggcgcacctcccgctgggcctgctgccgctggccgacatggaggaggtcggctacaaccgcgccacgggcttcgtgtggctgcgccagaggaagtcgctcacgcacacgttccgcccgatcgcgcgccaggtctcgtacgccgccgaggtcaccgccttcgtggaggaccggcggatgaggcgcatgaccggggtcaagaccaaggagctcctcatctgggtcaccctctccgacatgttcgtcgacagggacgacccctccaagatcaccttcaagacgcccaccgggctcggcaggacctaccccgtctccgccttcgctaaggaaggcgccggtgacgacggcgcggcggccaagcacaaggatgatgcccccgccccgaccgccgccggtaaggctgctgccagcaagtgagctaacctcacgccggcggactctagcaagagcacgaacgagggccaagcgctcgaaacccagcgacgtggaagcgcctgcgccgcgagcatccttccagagcgcggggccaaggccaagcagagaagcagtgcaagcatatggcgcgccgtgccagcctgctcctcgccgcggcgctgctcgtcgccgtcgctgccgcggcggtgccgccgacgtgcgagcgcatcgagtgcccggcgtacgaggtggtggacagcgccaacgggttcgagatccggcggtacacggacgccatgtggatcaccacggcgcccatcgaggacatctccttcgtcgccgccacgcgcaccggcttcctacagctgttcgactacatccagggcaagaacgcgtacaaccagacgatcgagatgacggcgccggtgctgacgcgggtgtcgcccagcgacgggcccttctgcgcctccgccttcgccgtgagcttctacgtgccggccaagaaccaggcggacccgccgccggccgagggcctgcgcgtggaccgctgggccggggccaggtacgcggccgtgcgccgcttcgggggcttcgtggcggacgccgacgtcggggagcaggcggcgcggctcgaggccagcctccagggcacccggtgggccgccgccgtcaacgacgcgcgcagggccgacccggcctcgccctacaccgtcgcgcagtacaactcgcccttcgagttcaccggcagggtcaacgagatctggatgctcttcgacgcggacgacgacgccagtatgtgatgcgattccaagcgtgctctcggggcactgaggcgtttagggaaggacgcgcatgcacctgtgcagtgcagctgtgctaccatgaagtatttcgtgctcttgtgcgctagcttcgtttactttcgacttttcgagtaaggaataaggtgcctcttgttgcaataatgataaagctaatcctgcttgtaattacatttcgtggcatggccattccggcaacatgtccagtaaaaaaaaactttttagtttcatc

SEQ ID NO: 110116 - DNA, 1106 bp, Zea Mays
agaaaaaaaatctctcagaaaccaccaaaactgggtgctttctacgtgcttctgcagctaacctcacgccggcggactctagcaagagcacgaacgagggccaagcgctcgaaacccagcgacgtggaagcgcctgcgccgcgagcatccttccagagcgcggggccaaggccaagcagagaagcagtgcaagcatatggcgcgccgtgccagcctgctcctcgccgcggcgctgctcgtcgccgtcgctgccgcggcggtgccgccgacgtgcgagcgcatcgagtgcccggcgtacgaggtggtggacagcgccaacgggttcgagatccggcggtacacggacgccatgtggatcaccacggcgcccatcgaggacatctccttcgtcgccgccacgcgcaccggcttcctacagctgttcgactacatccagggcaagaacgcgtacaaccagacgatcgagatgacggcgccggtgctgacgcgggtgtcgcccagcgacgggcccttctgcgcctccgccttcgccgtgagcttctacgtgccggccaagaaccaggcggacccgccgccggccgagggcctgcgcgtggaccgctgggccggggccaggtacgcggccgtgcgccgcttcgggggcttcgtggcggacgccgacgtcggggagcaggcggcgcggctcgaggccagcctccagggcacccggtgggccgccgccgtcaacgacgcgcgcagggccgacccggcctcgccctacaccgtcgcgcagtacaactcgcccttcgagttcaccggcagggtcaacgagatctggatgctcttcgacgcggacgacgacgccagtatgtgatgcgattccaagcgtgctctcggggcactgaggcgtttagggaaggacgcgcatgcacctgtgcagtgcagctgtgctaccatgaagtatttcgtgctcttgtgcgctagcttcgtttactttcgacttttcgagtaaggaataaggtgcctcttgttgcaataatgataaagctaatcctgcttgtaattacatttcgtggcatggccattccggcaacatgtccagtaaaaaaaaactttttagtttcatc

SEQ ID NO: 110117 - DNA, 988 bp, Zea Mays
gaacggaggtcgagcaccagacctcatctcactccgctaccccctcatcctgccatccaccagaagcagtgcaagcatatggcgcgccgtgccagcctgctcctcgccgcggcgctgctcgtcgccgtcgctgccgcggcggtgccgccgacgtgcgagcgcatcgagtgcccggcgtacgaggtggtggacagcgccaacgggttcgagatccggcggtacacggacgccatgtggatcaccacggcgcccatcgaggacatctccttcgtcgccgccacgcgcaccggcttcctacagctgttcgactacatccagggcaagaacgcgtacaaccagacgatcgagatgacggcgccggtgctgacgcgggtgtcgcccagcgacgggcccttctgcgcctccgccttcgccgtgagcttctacgtgccggccaagaaccaggcggacccgccgccggccgagggcctgcgcgtggaccgctgggccggggccaggtacgcggccgtgcgccgcttcgggggcttcgtggcggacgccgacgtcggggagcaggcggcgcggctcgaggccagcctccagggcacccggtgggccgccgccgtcaacgacgcgcgcagggccgacccggcctcgccctacaccgtcgcgcagtacaactcgcccttcgagttcaccggcagggtcaacgagatctggatgctcttcgacgcggacgacgacgccagtatgtgatgcgattccaagcgtgctctcggggcactgaggcgtttagggaaggacgcgcatgcacctgtgcagtgcagctgtgctaccatgaagtatttcgtgctcttgtgcgctagcttcgtttactttcgacttttcgagtaaggaataaggtgcctcttgttgcaataatgataaagctaatcctgcttgtaattacatttcgtggcatggccattccggcaacatgtccagtaaaaaaaaactttttagtttcatc

SEQ ID NO: 110118 - DNA, 1934 bp, Zea Mays
gcccggtcctcgcgcgccctgatcaggaggagtggtcgagcggagcaagtggcggcgtccggcagagccaagcgtcgcggcagccaaggaactcctgcatctgcatgggttggccggtgcgcgtgcggagcccctcggtgctgcagtccaagctgctgtgcctgtccctgctctacctcctcaccacgctgccgctcgcgctctacgtctccttcaccgactccggccgccgccgccgctgcctccagcccgtcccctccccgcccaagccgctcttccagtacccggccgggtacggcgagcacaggcacgccctgcccacctcgcgcgcgctctgctccaaccccgtcgccttcgcagactacaagactgctttggaagagatccatggcctctgccgcgacacctcggcgtcccctgcgttgcggtaccagagcggcaggagggccacgtttgcagggaacttgtcgacccaggaacggagatccttcttcaaccacactgatgaccaagtggcggttccctgtgggttcttccgtgaatttcccgtcccagaacctgacagactggccatggagaagtgcaggggcgtggtggtggcgtcggcgatcatgaacgaccacgacaaggtccgtcagcccaggggcctgggcgccgagacgctacgcgcggcgtgcttcttcctgttcatcgacgacgccacccgcgcggccctcgcgcggcagggcgtcctgccggcgcgcggcggcggcggccacaccacggtcggcgcgtggcgcgtggtgacggtgggtcgtcgtcgcgccggcggcggcgggctcccctacgaggaccccgcgatgaacggcgtcgtggccaagcacctgctgcaccggctgttcccgggcgccaggttcagcgtgtgggtggacggcaaggtgcagctcacggtggacccggtgctgctggtgcacgcgctcctggtccgcgagcgcgccgacgtggccgtgtccaggcaccccttcaaccggcacaccatggaggaggccatcgcgacggcgcggtggcgcaagtgccgcgacgtggacgccgtcagggcgcagatggagacatactgcggcaacggcctgcgcccatggtcccccagcaagcttccctatccgtcggatgtgccggacacggcggtcatcatccggaggcacggcgtggccagcgacctcttctcctgcctgctgttcaatgagctggaggcgttcagcccgcgggaccagctcgccttcgcctacgtcagggaccagatgagccccaagctgagcatcaacatgttcgaggtcgaggtgttcgagcagatcgccgtcgagtaccggcacaacctcaagcctggccgagggaagcggcagcaggggggcactaggatggcgtcctcgagagacatcgccgggagcagctgcgaagagtaccttcaccagatgtggggggagtctgctgctgagtaaggcggcctttgcaaatgcaagaccattcttttttttaatttaaatgcaggagcaggaccatgctgcagggtaataattgacaaactagaaccttttttcttgtaaatgatgaagtgaacaagtgtaaaaataataattagaaaattaagtgacacacattggaataattgaaacgacttggcagtcataggacacacaaattcatcagtcatccctggatcaatcagcactcgacagaaaccttcagcgtcagccaaactgcaagcacacacggtgtatttacatgagctatatcaggcggtggaatctgccgaccccttggctagctcgctcttgttcttgaactccttccaggcgtccacggcggtcttggtcatcttctcgatgtcgtcggtggtggcggtgtcaggggacagcatggcttccaccgctatcatcatgttgatcacagcctgaaga

SEQ ID NO: 110119 - DNA, 2285 bp, Zea Mays
agcagcagcccagctacaactacaagctactccaccacctccacacgaagtgggactgtgggaggcgcgagtgacgtgaggcgagccgctcctgctgcagccatggagcccgcggagaacgacacgtcctcgccgcctgagtatggcgcaggcaaggccgcggcgacggtaccggcgaggagctactggcggtggcgcagggacgacttcttcccggagccgtcgttcgcgagctggggcgcgtaccggcgggcgctgcgcgagacgccggcccgcctccgcgaccgcctcgcggggcggtccaccgacgccgcggagctgggcgcgctgcgccggcgcagcgagcacgagatgcggcggtgcctgacgtggtgggacctgacctggttcggcttcgggtccgtcatcggcgccggcatcttcgtgctgacggggcaggaggcgcgcgaccacgcgggcccagccatcgtgctctcctacgtcgcctcgggcctctccgccatgctgtccgtcttctgctacaccgagttcgccgtggagatccccgtggccggcggctccttcgcgtacctgcgcgtcgagctcggcgacgccgcggccttcgtcgccgccgccaacctcatcctcgagagcgtcatcggcacggcggccgtggcgcggtcctggacctcgtacctggcgtcgctcgtcaacaggcccgccagcgcgctgcggatccacgcgccggggctcgcgggcgggtacgacgagctggaccccatcgcggtgctcgtcatcgccgtcaccgccacgctggccatgctcaccgccaagggcacctcgcgcgtcaactgggtggcgtccgccgtgcacgtgctcgtcatcgccttcgtcatcgtggccgggttcgcgcacgccgacgcggccaacctgagacccttcatgccgcaaggcgtgccgggcgtgttccgggcggccgccatcgtgtacttcgcctacggcgggttcgacaacatcgccaccatggcggaggagaccaggaacccgtcgcgggacatcccgctgggcctgctgggttccatgaccgccatcacggccatctactgcgtgatggcgctggtgctgagcatgatgcagccgtacacggccatcgaccgcagcgccgcctactcggtggcgttcgccagcgtggggatgcggtgggcgcagtacgtggtggcgctgggcgcgctcaaggggatgaccacggtgctgctggtgggcgcgctggggcaggcgcgctacaccacgcacatcgcgcgcagccacatcatcccgcccgtgttcgcgctcgtgcaccccaggaccggcacccccgtgcacgccaccgcgctcatcgccgtctgcagcgcctgcatcgcgctcttctccagcctcgacgtcctcgccagcctgctctccgtcagcacgctcttcatcttcatgatgatggccacggcgctcctcgtccggcgctactacgtgcggggcgtgacgagccggacgcacgcgctgcggctcacggcgctgctgctgctcatcatcgcctcgtccatcggcatcgccgcgtgctggggcacgtcgccggagcggtggcagggctacgtggtgctggtgccggcgtgggcggccggcacgctgggcatccagctgctggtgcccgcggcgcgggcgcccaaggtgtggggcgtgccgctcgtgccgtggctgccctcgctgtccatcgccaccaacctcttcctcatgggctcgctcggcaaggacgccttcatccgcttcggcgtctgcaccgccgtcatgctcgtctactacgtcctcgtcggcctccacgccacctacgacgtcgcgcacggggcgtgcggttgggaggaagaagacgacggggacgcggccgccgccgatgaagacaagaaggttgttgccgcggcagacgtggagaaggctgatgcggcaggcggtacccgttaattattagcccatccatcggcgtcggcggccttgaatgtcccatgccgcgcggctgctgacaattgcggttggagacgagagtcttcgccgctgtacgtgttcatatacgaacgtacacctattccacacacacacgcacgtctcactcataccacacacacaaacagctctacagctccacattgttaggaaatagaatcatgaaatgtattctgttagggtaatccctacaatctcgggcggccattgtgccgcctcattgtaatcctctctgtatataaatacgtggctgtccctatgcgtggtatggccttccatca

SEQ ID NO: 110120 - DNA, 1122 bp, Zea Mays
gcgctcgcgctctgtgcacagacgagagacgaccttcccttcccgttcctctgtttttatctctgctccattcctcgatcggccatggtggtcctcgccaagggtgagctcgagcagatcgcgctgcctgcggcggcgccgccacgggccgacgtgcggtcggtggacctgtcggccccggcgggcccggcgcgcgaggccgcggcgcgcgcgctggtggcggcgtgcgaggagcacgggttcttccgggtgacgggccacggcgtgccggccgagctcgtgcgcgccgcggaggccgcggcggccgggttcttcgcgcggccgcagggcgagaaggacggggaggcccccacgctcgggtacggcagcaagcgcatcggcggcaacggcgacctcggctgggtcgagtacctcctgctcggcgtcaaccccgccgtgcccgccgcctccgcgtcctcctcgacattgccgttgcggggccttctggacgagtacacggtggcggtgcggcggatggcgtgcgcggtgctggagctgatggcggaggggctgggcatcgccggcgccggggacggggacggggacacggtgctggcgaggctggtggcgcgcgcggacagcgactgcatgctgcgggtgaaccactacccgccgcggccggcgctgaactacccctgcctcacggggttcggcgagcacaccgacccgcagatcatctcggtgctccgcgccaacggcacgtccggcctggaggtcgcgctgcgggacggcgcctgggcctccgtcccgcccgacggggacgccttcttcgtcaacgtcggcgacaccctgcaggtgttgacgaacgggaggttcaggagcgtgaggcacagggtggtggtgaacagcgagaagtcccgggtgtccatgatcttcttcggcgggccgccgcccgacgagaggctggcgccgctgccgcagcttctgggagacgacggcggccggagccggtaccgggacttcacctggagcgagttcaagaccagcgggtgcaggaccaggctcgcggaagaccgcctgtcccgcttcgagaagcagtagcagctctagataaagctattagttagcacaggatcgaccata

SEQ ID NO: 110121 - DNA, 171 bp, Zea Mays
atggctggcccaggccctaggctgcgcgcgacggcggtggcgcccgacccctacgtccctgacgacgcgctcatcgatatatttgacctcctcctcgccaactccctccaccgcttcaagtgcgtcttcaaagcatggtgcggcggcttcactgacccgctccaccgctag

SEQ ID NO: 110122 - DNA, 450 bp, Zea Mays
atgcagattcaccgggatgcaaatggatctacattattgaagggatttaggaaaccatcaccgaacaacaacctattagagtgtactcaacatgcttacgatatctgcactgtggaccagggctctcttctgaagcaactagcaaataagagtatcagtggtggtgtagctgctgttctagctgaaagggacaaggaagagatggagatggacatagcaaagctagaagttggctccatggaaacatctgtaatatgtaggagtgacggtcctctaattctagcatacttgaggaagtggtctttgatttcatctcattccacaataagatctcaaataattgaccctttccaggtttctgtttctaaagcacaggccattattgtgttaacatctgatgaaaatgcagaccaagttagtatttttgttctacacacatcacctgaatag

SEQ ID NO: 110123 - DNA, 422 bp, Zea Mays
ttcatcaccttatcagactgtattgcccctaaatatcgtttagttggtgattgttaactcaattttcacaattaaatatgtttgtgtacaatgttactttgaaatcgtacgaacatgttctatcctattgtcattcagtgtactcaacatgcttacgatatctgcactgtggaccagggctctcttctgaagcaactagcaaataagagtatcagtggtggtgtagctgctgttctagctgaaagggacaaggaagagatggagatggacatagcaaagctagaagttggctccatggaaacatctgtaatatgtaggagtgacggtcctctaattctagcatacttgaggaagcctcgacaaacctgaagtttgaacgtatgacagatgacatcttggttacttttgtggatggacatctt

SEQ ID NO: 110124 - DNA, 732 bp, Zea Mays
atggagaagaacccaacggcacgtattgatgttctgaagctagacctcagctccctcaagtctgtcagggcttttgtggaccagttcaactcgatcaaactccctctgaacatcctgataaataatgcaggcgtcatgttttgcccttttcagctgtctaaagacggggtcgagatgcagtttgcgacaaatcatctaggacactttctgcttaccaatctcctccttgataccatgaaggccactgccaagtctacgggtattgagggccgcattgtgaatttgtcatcagtcgcccaccaccatacgtatccgaagggaattgacttcgataacctcaatgatgagaaaatatacaacgacaaaatggcttatggacagtctaagctggcgaacttgctgcatgcgaaggagctctctagaaggctgaagggagctgcgactacttgctacgtaggactgagccctcaactcaagggagtgacaggaaagtactttgctggctgcaacgtggagaagacgagcaaactggcgaggagcgagcgtcaaagcagcgactatcactgtccccagctccatcaacaaacccgccacaaccacagccgccaccacagtcccgaagatttcgaagtcgccctctttcattcaagaggttgccgaggtgctgttcggactcaccaggcagttgaggaaatcgaggttgccgaggtgctgttcggactcaccaggtag

SEQ ID NO: 110125 - DNA, 1072 bp, Zea Mays
aagtccaggacgccaaggctctctcctctcagtttttattgggtgaagaggggccggagcggcggagggggataggggggccggagccgagcggcggagtttctggaggtagacgacgcaggagctcgaaaccctaatcctgaggctgcccgcggcggcgatcgcctcctcttccttggacttatcttgcttcaactattaaggcggagtcaccatgaacgaccaaactaatgaaaaatgtccactttgcttgaacaagatggatttgacagataaacaactgaagccatgtaaatgtggatatgagatatgtctttggtgttggcatcgtataattgatgaatctggcgggaggtgccctggatgccgttctgtatataacaaggataagatcttggagacaagcgccaggaaccaaattttaaaggaactttgtgctgataagtccaactatcaaaaagaacaagtcaagtctcataagcaaacatctgcaaaagttcagttgggacagtcagaaccaaaagatccaaatagcattcgtgtgattcaacggaagcttgtctatattgttggtatgccaactgagttcgccagcgagaagttgctgagacagaagagtttccttggacaatatggaaagatagaaaacattatcattgataatgttggagctaaccaacaggttcctgactctggacgtgtatatgttacatttgcaaaagaagtagaagctatcagatgcatacaggcagttgatggttattccttggatggtcgacctttgaaagcaacctttggtgtgacaagatattgtcatatatggctcagcaataaggactgctacaagccaaactgttcgtatgtgcattataaagccccagcagaagaaatttgtacaaaagatgatgtttctgtggtgtgtgcaaggtatatttttttagtactaacattttattatgtactagtacaatgtctgcatgttgcgatggcataataataaattaaatcaacatagattttctcttctagttttgttttgatttcccccttactatcaggagcaaaaaaaaaa

SEQ ID NO: 110126 - DNA, 2782 bp, Zea Mays
ggagtcaccatgaacgaccaaactaatgaaaaatgtccactttgcttgaacaagatggatttgacagataaacaactgaagccatgtaaatgtggatatgagtattctattttggataacatggcccatttaaaggaactttgtgctgataagtccaactatcaaaaagaacaagtcaagtctcataagcaaacatctgcaaaagttcagttgggacagtcagaaccaaaagatccaaatagcattcgtgtgattcaacggaagcttgtctatattgttggtatgccaactgagttcgccagcgagaagttgctgagacagaagagtttccttggacaatatggaaagatagaaaacattatcattgataatgttggagctaaccaacaggttcctgactctggacgtgtatatgttacatttgcaaaagaagtagaagctatcagatgcatacaggcagttgatggttattccttggatggtcgacctttgaaagcaacctttggtgtgacaagatattgtcatatatggctcagcaataaggactgctacaagccaaactgttcgtatgtgcattataaagccccagcagaagaaatttgtacaaaagatgatgtttctgtggtgtgtgcaaggctgcagcactccatgggaatgagtaccaagtgtctccaacatcgttcgggacgtactttgccccctccatgtgactgcagttcaagaaatacaactgccagtggaatctccaaagatatttgcatcaatgatgacagattactacccaatggtgctatcaagtatactagtttaccatcagtcaccactccacgggactcaagcctttcttctggcagtcctccatcgccggcaagtattgttcttcatcaaaggaatgaccatgagagattacacaataatcagcaaaatttgtctgacctcaaacctcaaaggtacataccacctggagggcgtaactgttcaagtgaaatgactacatcagtaaagcatatgcagcctattgagggtgcttggttgcacagctcatcaaatgagcatttgggctccaataacgacaaatctcaagcatcttcacagttaggaaacgataattcaaatcccaagcaaattacttcagcagaaaatggaacatctgacaccgtgcagcaaaagccacagtatgctgatgtagtttctcaaggacaagttgcaccagtgcggcgtcttactgtacttaacaggccgtcaattgcttctagcgatactaggcctaaagcaacaggacaagttgtcaatggtacttcaacaagcttcacaaaacttactttggttcaaaaggcacaagggagctgcattacaattcctagaaaccatccagttccccagatcccagaggaacctgcgcatctgttcgcttcagctagtgttaaatctcatgctggagtagagataatgaatgaatgctcagatatcaaagaaaagatagttcttggaggttataagcaactaccagagagcactgtgtcacacagattgactgcatcacagaatatgagcagcggaactcttcccagtaatctttctgcatcttatgccaaaactcaaggatctgctggatcacacaatctttcagatttgaacatgaagcttgtagcaaagaatcgatcacagctggtaaatcaacaaaatgcaccagtttcagtttctaatacaggtatagcaagagcaagtttctgctgcagcactcttaataagaatgcatcgttgtctgatggtgatagctcgcacaataggcgctgggacacaattcggtctggtcatattgtttcctctcattcttcagatagcactatgctatcaagaccagccagtgcagtatcatccactgatgtggcatctctgcatagaaaggaaaggagacaagcttgtcctcctggatttgagaagcctcatctgtactccggttcaggcaaagcttgctctggacattgctctgcacctgatgccctggtacaagattgtggtattccagatcaacaagactttactagcttgactacagattgcctgaaagatgatggagatgtcacacaaaatctaagcatgaacatctcttcaccacccagtttgaccgataccaaccggaactggagtcagagtcacagacagtttccaggcaccctctttggttggtcaaatgaccctcagtattcattttaccctggtggctcgtcacatccacgtcaagaggctgaaaattgggatggaacttccactagttacatggctactgctactgggggatacaaagtattttcccagggaacaacttcagacatgaggggtggtatggcaggcacattgctccaacagccaataatgtcaactcatgatagatggactgatggaagcagcgattctggaaggaactgccctcaggttgacatttcgtaccgcatgtacagcctattctagcaccagggcgagaggtctgcttcctagaccctaacaacagacatgtacaagtcataccttctaacctagtagatgccaagatgatggatggtggcgaaaatggtgtcagggagtgcttcgtgtttgttgctaaagcttgtaaagatcaaacatggaggagcttcatgtacaaagactgcaggggtgggtatttggtttaacatttggtaaacagtcattctttcacgcatttgctttgcctttgcttgggtgaaatgtgaatttgcgctctcggaccgggtaccaggtgggtgccgggcgcttctcgttt

SEQ ID NO: 110127 - DNA, 1609 bp, Zea Mays
tttccgtttcgcttcctgccccccgatcctctctcgcgtacatttcccagtctccaccccggaaatggccagaacctgaggcactagaacccacccgcccgcggctctctccagcagccccccaatccatcgacgccgttggcgagggcgcacaggcgcgcgtcgcaccacatccgccacccacaacacaccaccgtcctcatctccggtgtgcaggcagagacgcgggatggcctcgcgccagtagtatccgcccggcactttctaccccacccatccggccgcgggtgggtttgaccgagatcggcaggcggccgtcggcgtctcgctcgctcgatccgcctcgtctcagtcctacctaggtatggcggcggcggtggcagagggatcggcttcttcggcggcgaaggaggtggagtaccaggcgggcgtgcagaagctggtggacctgctgtccaacctcaacccggccgccaaggagttcgtcccctccgcggccgcgtctccgcccaagaaggcgctgtcggcggatgcgccggtgttcgattaccactccatcggaggcgggaatggggccaccgacgctgcgttttacgttgggtttgggcaccagccgcgcacgagggggaatggatacatcaaccaaggaaggaggaggacaaatggtagagtgaggcgggcagacagagaggacagcattaggcgaactgtttatgtctctgaacttgaccatactgtgacagaggagagacttgctgatatctttaccacctgtgggcaagttgttgattgcagaatttgtggtgatccccactcagttcttaggtttgcattcattgagttctctgatgaagagggcgccagaactgcgcttaacctgggaggcacaatttttggtttctaccctgttagagttttgccgtcaaagacagctatcttacctgttaatccaaagtttcttcccaggacggatgacgagaaggaaatggtcatgcgaactgtctattgtacaaacatagataagatggttactcagttagatgtaaagaaattctttgaagaactttgcggtgaggtctctcggttgaggcttctaggggataatgtacattccacaaggattgcttttgttgaatttgtccatgctgagggtgccatcatggctctgaattgcagcgggatgattttgggaacactgcctgtcagggtgagcccttccaagactccggtgaagccccgtgtaaatcgagtgggatctaactgactctgcgcaagctgaactggattgttcacgggaaggcgtcgccataagctgaaggcttccgcggtccggtgcatcatgatgcgtctgctcacattcttacaaacgttttctttgtacccttttgcaaacctgttgttggaagggaactggttagatcaggcccttctatagccagctttcggtttctcctgtttcactggacgtgatggaaccactgaggatgactatcttggcaatcagccatcaaagtaacttctgttaatgtccttgttgttaagctaattggtgtgtaaacgtcttacatgtgaatcatcacagttagggtccgtttggtttctttagtcc

SEQ ID NO: 110128 - DNA, 419 bp, Zea Mays
ttagggacaataagttgataagtttgctcaaacaattgagatttttcctcccagtgctttttttttcctaatcgtatattgacctgcaagatgattgtgctcgtacaggcatgccttctatttgttccttccatactgagtatccgcttaagatggagatattgattctaacttttgaactctgaatcacaggctgagggtgccatcatggctctgaattgcagcgggatgattttgggaacactgcctgtcaggcatgacctcccctctagccacattctccatttctctttatttgtaggttatctagactgaaaaactgaacatatttgtatctgccaatgctgatggaactgtgggatgtccagggtgagcccttccaagactccggtgaagccccgtgtaaatcgagtgggatc

SEQ ID NO: 110129 - DNA, 1620 bp, Zea Mays
ctttggggtgaagggagcggaagtcgccccctccctcgactcccccaggccccaacgccaccgtgtcctcccccgcccacagccgcgtcgcgcaccaactccaattcctcctctccgagcgcccccacccacctcgacgcctcgcctcggccgttgagatctcgcgcgcccgcggcggcatggcgacgcgcaaccggacgccgctctaccgcaagtaccgcgacgcgctgcggcacgtccgcgcgccgcccggggcgccgtcgtcgtccggcggcggcggcggcgggggagggccggtaatcgagatggcctcactcctgcgctccgaccgcccctacgcgcccctcagcaccgacgacccctccgcctccagtagaggcgctgcgacggtcgggctacccccagcctgggtggatgtctctgaagagatatccgcaaacatgcagcgggcaaggacgaaaatggcggagctggctaaggcgcatgccaaagccttgatgccgtcctttggtgatggcagagacgaccaacgagccattgaggttctcacgcacgaggtaacggacttgctaaagaggtcggagaagaggctgcagaagctgtccatgaaagattcgtcagaggactcaaatgtccggaagaatgtccagcgttctcttgctacagacctgcaaaacctgtcaatggagttccggaaaaagcagtcgtcgtatctaaagcagcttcgtcaacaaaaagagggtcaggacggtgttgatttggaaatgaatataaacggagcaaagtctacatttgaagatgatgagtttgacgatgtgggtttcactgaggttcagatgtcaaaacttaagaaaagcgaagccttcactagagaaagggagagagaaattgagcaggttgttgaatcagtcaacgaacttgcacagatcatgaaggatctttcagttctcgtgattgatcagggaaccatcatcgatcggatagactacaacatacagaatgttgcagcttcagttgaggagggttacaaacaattgcaaaaggctgagaggacccagaagaaagggggcatggtgatgtgtgccactgtccttgtcattctaatcttcatcatgatagtccttctgattttgaaggagatcattttctgacatacatacctatctcattctaccgggaacgccgcagttcgtttgaatagcgcgatacggttcgctgatctgaagatagttctcctgcccattttcataatggctgggccagcaactgtcttccgtgttggccacaatttttttgcatcgttgcagatgtagagatgctctattcatacatgcctcatatttatagggaaaagaggattgttttacacgtttcaccttccagtttgccttgcggcgacgaggcttggctggttgtttatgcctctgtatagggtgagttgtatcatacatcaggttatcggaaatcagaaagtagattcagttcctttctgctttatgttgtctgcccttctattttgagctagttttgaagtggcatttcattgtaccagacattcctaacaattgtttctacaacttttcgctcatgtgtagctgattattactggtatcagcagcc

SEQ ID NO: 110130 - DNA, 2616 bp, Zea Mays
gcacgctccctcgcttccctgtccctgctcacctctgaacccaatctaaccgccgtccgccaccttcgcgcgcgaaaactccccccctcccattcgcgccgccgccgccgaccaccacccatcccggcgacaagggctccccatccggctgatccgtcaggaacctaatcttctcggcgcgagaaacgccgggcggggaacaaaggacaggaccccattccggtgcggcgggaccaatgggctccggcgaatagctcgagcacctcgagctcgccggaaacaaccgaggcggcgcggcgtctgttctccccggcgtgatggcgatgcaggggacaggcaacggatctccaagccgacccaacatttccgtgcccggtcgttgaacgcagcggtggtcccgtctcgtcctccaaggcattgggaacctgagaggcagaggctcggccagcgacggtgggtagcgaactggcgcctggttcccgggttgctattctccgggaggaggcgctcccgttgccatgggtgcgcggcggcggcttcgccagggctctggacggctccagctgctgttttccttcctcgtgctgctgctccaggcacaggccagcgtcggcgcggcttcgatcaacggtgaaggattggcgttgctggaactgaaggtgagggtggaagctgatccccatggcgtattccaggattgggaccccatggacagcagcccatgcagctggtctggcgtgcgatgctttgacgataaagtagagattctgaacttaacaggccggcaattggctggaactctcgcacccgagatcgggagcctccgaggtctaaaatcccttttacttccaaagaacaacttccgcgggcaaatccccagagaatttggagggctgtctgctctagaagtgctagatctgagcagcaacaacctggatggaacagttccagaagaactatgggctatgccactgctcaaacaactctccaagaaggcgtccaagcaatagctgatgatcaggcaggatgcttgagcagaaaactagggtgctggtgagggaatatacttggtgttacttctgtctgcgctccattttagcttccagcattttccagtcttaaatatttcacctcttgtaaaggtctttgctgtacaagtgggactttaaggattggatctctctcggtggtctccgagagaaagataacaccaatgtaccaaatttcagtgaggcagacgtaatgcataatttgcagtcatttgcaagtgtcatgcgccgcaggcttcttagtgaaaatgacaacctggctgctcttttgggaaatgatgacaaatcttctgatctgcaaaacctaaaagaaattcagagatctgttgacgtgaattctgtaggaagtggctcgttctctgcatttccgggaatatatggccaagctctggcacctttgcttcctgaagatattgatgctaccacagttcagcagctgtctacagatgtgacccagaccactaatgtagagatgtctggtacaacgtacagcaagtgggcatatattatcacaattcctgctgcaatattgctcattagtctcatagttctgattttggttttgcggaagcgagggcgtgcaccagtagccccttggaaaacagggctaagtggccctattcagaaggccctcgtaacaggtgcccaaaaactgaacagagctgaactcgaagttgcctgtgaagattttagcaacatcatcaatacttttcctacctgtactgtattcaagggcatattgtcaagcggggttgagattggtgttgtctccactaccatatcgtcgagcaaagactggtccaggagtgcggaatcatgcttcaagaaaaagatagatagactgtcaagggtcaaccacaagaacttcatcaacctccttggctattgcctagaaaatgagcctttcacgagaatgatggtgtttgagttcgctccacatggtagtctctcacagcaccttcacgtcaaagagtttgagcatctggactgggctgcgaggatgagggtcatcatgggcgtcgcatactgccttcaatacatgcaccatgagctcagtccacctatggcgatccacgacgtgcggtctgacacaaccttcatttcagatgattatgctgccaagattgcagatgttggtgtatggaacgagcttgctgccaaagcgaaggctggaaaggaggacggcagcagccgtgctgaagctcctccggatctcccaagcaacgcctactgcttcggcgcgctcatgatcgagaccatatccgggagggttcctgacccgtatgatcacaaacccatatgcagctgggcttctgagcatctgaaagacaagaactacggcaagctcgtggacgcgtcgctgaaggagcacaaggaaagcgagctggaggccgtctgcgaggtgatccaagagtgcatcgaccctgacccgacgcggcggccgtcgatgagagacgtcgtgggcaagctgcgagacgctctcggcatctcgcccgaggcggcggcgccgcggctgtcgccgctctggtgggcggagctggagctgctgtcggtgaagtcaacctag

SEQ ID NO: 110131 - DNA, 2357 bp, Zea Mays
atgggtgcgcggcggcggcttcgccagggctctggacggctccagctgctgttttccttcctcgtgctgctgctccaggcacaggccagcgtcggcgcggcttcgatcaacggtgaaggattggcgttgctggaactgaaggtgagggtggaagctgatccccatggcgtattccaggattgggaccccatggacagcagcccatgcagctggtctggcgtgcgatgctttgacgataaagtagagattctgaacttaacaggccggcaattggctggaactctcgcacccgagatcgggagcctccgaggtctaaaatcccttttacttccaaagaacaacttccgcgggcaaatccccagagaatttggagggctgtctgctctagaagtgctagatctgagcagcaacaacctggatggaacagttccagaagaactatgggctatgccactgctcaaacaactatcccttcatgataatcagctccaagaaggcgtccaagcaatagctgatgatcaggcaggatgcttgagcagaaaactagggtgctggtctttgctgtacaagtgggactttaaggattggatctctctcggtggtctccgagagaaagataacaccaatgtaccaaatttcagtgaggcagacgtaatgcataatttgcagtcatttgcaagtgtcatgcgccgcaggcttcttagtgaaaatgacaacctggctgctcttttgggaaatgatgacaaatcttctgatctgcaaaacctaaaagaaattcagagatctgttgacgtgaattctgtaggaagtggctcgttctctgcatttccgggaatatatggccaagctctggcacctttgcttcctgaagatattgatgctaccacagttcagcagctgtctacagatgtgacccagaccactaatgtagagatgtctggtacaacgtacagcaagtgggcatatattatcacaattcctgctgcaatattgctcattagtctcatagttctgattttggttttgcggaagcgagggcgtgcaccagtagccccttggaaaacagggctaagtggccctattcagaaggccctcgtaacaggtgcccaaaaactgaacagagctgaactcgaagttgcctgtgaagattttagcaacatcatcaatacttttcctacctgtactgtattcaagggcatattgtcaagcggggttgagattggtgttgtctccactaccatatcgtcgagcaaagactggtccaggagtgcggaatcatgcttcaagaaaaagatagatagactgtcaagggtcaaccacaagaacttcatcaacctccttggctattgcctagaaaatgagcctttcacgagaatgatggtgtttgagttcgctccacatggtagtctctcacagcaccttcacgtcaaagagtttgagcatctggactgggctgcgaggatgagggtcatcatgggcgtcgcatactgccttcaatacatgcaccatgagctcagtccacctatggcgatccacgacgtgcggtctgacacaaccttcatttcagatgattatgctgccaagattgcagatgttggtgtatggaacgagcttgctgccaaagcgaaggctggaaaggaggacggcagcagccgtgctgaagctcctccggatctcccaagcaacgcctactgcttcggcgcgctcatgatcgagaccatatccgggagggttcctgacccgtatgatcacaaacccatatgcagctgggcttctgagcatctgaaagacaagaactacggcaagctcgtggacgcgtcgctgaaggagcacaaggaaagcgagctggaggccgtctgcgaggtgatccaagagtgcatcgaccctgacccgacgcggcggccgtcgatgagagacgtcgtgggcaagctgcgagacgctctcggcatctcgcccgaggcggcggcgccgcggctgtcgccgctctggtgggcggagctggagctgctgtcggtgaagtcaacctagtgtggagaacgctgtgtatactgatactgtaccaacatgttccaacgctcctctagctgagctctaacaggattcgtataggggcttcaattcgtgctgctgatgctaccgacatttgtactggccgtaagcggtcgtaatttatgcagagagagagagagagagagagagagacgttgtgaaaaaatgcgattgatgatgtaactcatgtacatgctgatctttatcaaggaggggaaatacagtgacttgtataaatatctgtaatcccaaactcgtgtgactgtatagaaataaaacaaatagctggcgttcccagttgccactca

SEQ ID NO: 110132 - DNA, 3321 bp, Zea Mays
gcagtcgcagcagggccgagccgaccggtcaaaagcactgctgccccaccccaacccaccaccatccccgttccccaacccccaaagccgagagccatcccgcccgcagccgcaaccaggcaagcaagcgggagccgccaactcgtgcctctcggcagcggcgtctgaactctgaaccgaccgaccgaccgaccgttccgttccgttcaccccaccatggaggcgccgccgggaccggggcccatggagctggacgccccacctcccgccgccgccgccgcggcgattcctcccgccggcagcgacaagcacaaggacggggaagggggagacgctgtgacgggccatatcatctccaccaccatcggcgggaagaacggcgagcccaagcggaccatcagttacatggcagaacgtgtcgtgggcacaggctcatttgggatcgtcttccaggctaagtgtctggaaacaggagagaccttcgccatcaagaaggtgctgcaagatcggcgttacaagaaccgggagctgcaacttatgcgtgccatggagcaccccaacgtcatctgcctgaagcactgcttcttctcgacaacgagcagggacgaattgtttttaaaccttgtcatggaattcgtccctgagactctataccgagtcctgaagcactacagcaatgcgaaccagaggatgcctcttatctacgtcaagctctacatgtatcagctttttagaggcctagcttatattcataatgtaccaggagtctgccatagggatgtgaagccacaaaacgttttggttgatcctctcacccaccaggtcaagctctgtgactttggtagtgcaaaagttctgattcctggtgaaccgaacatatcttacatatgctctcgttactatcgtgcccctgagctcatatttggtgcgacggagtatacaagttcaatagacatatggtcagctggttgtgttctagctgagttgcttcttggacagccactatttccaggagagagcgctgttgatcagttggtagagatcatcaaggttcttggtactccaacccgtgaggagatacggtgcatgaatcccaactatactgagttcaggtttcctcagataaaggctcatccatggcacaagattttccacaagagaatgcctcctgaagccatagaccttgcttctcgtctccttcagtattcaccaagtcttcgctgctctgctcttgacgcatgtgctcatcccttcttcgatgagctgcggacaccgaacgcacgcctaccaaacggccgcccgttccctccgctctttaacttcaagcacgaactagcaaatgcctctccggacctcgtcagcaggcttgtgccggagcacattagacggcagatcggtgtcaacttcgggagcagctaggagggcaggcgctgtgatggtcgaagttttcggtcttggtttccccttctggagagtgggaggggctcaagcagtacctgagaaaagtagtgaaaccgtgtaaattatctgaccgtgaaggagtactaccgccagtaactggcgcatgttcgtccagtagttatggtaagaatgtaggaggtggagactggttaatgtgtagggtcgttttttttgttttgttttgatattactaccattttgttgtaatgttcgtcggtacttccagcagtagtgtagctggccacgttttgttcgtccgccatgatgtaaatgatcatcgcccaactgtaatgcatgttctctctgatcgtttcgtagtcctgatgcctgctgtgatgaagctcagagtctgaggcaggaaagtcggaagaacttccggctcccgaaataggaatcgctgccggtgtgaaactacggtgaagttgtatcgaaattttgcatgccaatacagactattctatcggttggaacttggaagttatctgatgagcggttcaatcgcaaatgttcattcccaactcccaaggccacaaatgctctcggattgtagtgggctttacacgaacagtggcttcttaaaatcgtagtttgattttgttcttacacagagatatatcgaaaatcacaggcaacgcgggttggtatcatttcttccgcatcgagtcagttcaaggcatagaaacgggaataattaatagatacagtctagtttttgcgatttatttgaccgggcacaagtgcgtcgctacacattcttgatgtgactcgcaagtcgctgtagcttggagcaattcggtcgtacctatcgggcaaccaaccagtgcaccaggcggagcgcacgactagagccgcggccgcgccggcgccggcccggcgccgtggtccttgacctgggcccacagctggggccacgcggccttcctgatctcggcgacggcctccccgtcccagcccctggcggccagcctctcggcctcagcgacggccgcggccaccacgtcctcggggccgccgtccacggcggcgtccacgaggccccggcgcacggcctcggccgcggccacccggtccccgcgcagcaccaggtcgcgccgggccgcggcgtcggggaccttgtcgcggagcacggcggccacgaagtcgacgaacttgatgccgacgtcgacctcgctcatgtacaggagcccgcgggaggcgcgcatgagcgcggcgtcgtgcgcgagcgccagcgcgcacccggccgccgccgcgtggcccgtcaccgccgccaccgtgggcacgcgcagcgccagcaggtcggccagcagcgcgcggagcccgccgtccatggcgccgtgcaggccgggcggcgccgcgcgcgcccacgccaggtcgaacccgttggagaagaacttcccctccgcggccagcaccagcgcgccggcgccagcggaggcggccacagcggagcggagcgccgcgaggaggtccgggttgaggcggtgctcgccggcgccggtcatggtgatgaggtgcacgcggccgcgcctctcgacggtgcacatgcccttgctgctgctctccattgctgatttggggaccacgacgcagcagccgtgacgagactgcgttcggacaactctacgctatttgctttttaagtatgtctttgggatcagttttttaatcgaccagagtttgagacgagcgtcctatgtgatgcatatggcggctaactttcccgcgatacgatataaaactggaagaaggatgtaattcttcatggatcatctagcgtggagtggttcatgagattttaaaactgttcggctgcactaagcagatcaaatagtagtggctgaataaatatatatataaata

SEQ ID NO: 110133 - DNA, 1161 bp, Zea Mays
gttccagcacgtactcaccgcacccccagacggcccgacacgtccgtccgtgctggcttgtacttgcacaccacaccacaccaccacccagcctccccaacgatgacggcggcggcggcaccggcggtcgctagcagggtgtgggagtgggaggggaaggtggcgtcggcggtggccgaggcgacggcggacgaggcgtgggcgctgctgtcggacttcctggcgttccaccggtggcacccgcgcgtggccgcgtgccgcctcgcgtccggcaccccgcgcgcgccgggctgcgtgcgctactgcgagggcaccaccgccggcggcgagccggcgcccgactgggcgcacgagacgctgctggagcacgacgccgagcgccgcttcttccgctacgagatgaacgacaacaacatgggcttcggcctcttcttcgccacgttccgcgtcgtcccggccgccgccgccgccggcgggtgcgagctgcgctgggagttcgagtgcgagcccgtgcgcggcacgcccagggacgcgctcgtggcgcgcctgcaggccgggctcgacggcatggcggcgcgcgtgcgtgaccacgtcctcgccgctcgcgccgcccctgccgtggtgcccgccggtgcagctggtgagctcgtcgtcgtcaagctcgacagctccatcgccgccgtctgatcactggccggcgcggcgtcgacggcgatccaacacgtatcaacgaagagaccgccgttcgctggtgctctctcctctgtctgctcacgcgcgccacgctgtcgctgcccatcgtgtttccgtttcctatctcctcgtcgtcgtggtttttagccctttgtctgtggcttgtgtgctgctgtctcgtctccataatttatccgtccctgcatagatattgtatgcatgtagtataaccgtgtactccactgcttttatcctcttaccctcttgtgcattttattaattaccctggtacgtgtgttgtactagtattgctgtaccttggccggaataaaccagcctgatcggctgacttttttttttctttttttggttgggctgctgttgctgcaggatgcagcctagcggttgctgggtcttggtccactgttaggtggtgtttaatttttaaagactaatttgcattgtctt

SEQ ID NO: 110134 - DNA, 1602 bp, Zea Mays
ccgattttccaccgttacaacccaatccattcacagcatctgtaacggcttttcctgcctagctaccatggccacacaccgccactggctgctgctgctcttcctcccttgggccctcctctcccgccgcggcgcgcagcctcccgacgccctgtaccctgtcgtgctgctcccgggcaacacctgcagccagctcgaggcgcgcctcacggacgcgtacgagccgccgccggagtcgccgcaatgcggcgcgggcagcaacgagcgcggccgctggttccgcctgtggaggaacgccacggccatggacgaccccgccgtcgcgccgtgcctcgccgaccagctccgcgtcgtctacgaccccgccgcccgcgacttccgcaatgagccgggcgtggagacccgcgtcctcggctttggctccaccgccgacttcctcgccgacaccgaagccaacaaagacctctgcatggggaggctcgtcgaggcgctgcagcaggccgggtaccgcgacggagagacgctgttcggcgcgccgtacgacttccgccaggctcccgcggcgcgggggcagccgtgccgtgccttcgcgcggttcacccggcggctcagggcgctcgtggagcgcgccagcagggagaacggcggcaggcccgtcgtcatcgtgtcgcacagccagggcggctacttcgcgctggagttcctgaaccggagcccgctgccctggcgccggaggtacgtcaagcactacgtcatggcgtccacgggcgccggcgggttcctgctccccctgcggaacctcgcgtccgtgccccgcgacgcgctggaggcccccgacgcgctcgtggcgctgccgtcgccggcggtgttcggtcccggcacgccgccgctggtcgtcacgcgcgccaggaactacacggcgcgggacatcccggagttcctggcggcgatcggagtgcccccgctcggggtcacgctgtacgagacgcgggcgctccccctgcagctcggcttccgggcgccggtggtgcccacgacctgcatcaacggcgtcggccagcccacgatggagcagctcgtgtactgggacggcaacttcagcgagacgccgcaggtggtgtacggcgacggcgatggattcttacccgtggcgagcatagtggccctcgacaccgtcatcggtggtgacccgaggcaggagtactacaagtctatcaagcttgccggcacgtctcacgctggcgttgtctcagatgctgcggctttgaagcgtgtcgtcgatgagattctttggagccctccaatatgagcaagtctgtcagagaccaactctatcgcctgtttttttttttcttttggcagccaatcgatttggaagtattgcctatgtccgaaaacacaataccactaaatcaaattccctacgccccgttccaaaattatactttttatatttttactagatagtttacttttattagatatatagagagagtgcgcgcgagagactgatagcatagtaaaatcatatatctagagaggccaagatgtattgtaatttggaatggaaggagtaaccgagtaagagctaataccctgttg

SEQ ID NO: 110135 - DNA, 312 bp, Zea Mays
atggccgcagatctcgcctaccatggaaggggcccgcctaccatggaaggtcggcccttgtcgggctgtcgcctccgagtttggcagtttggaaggagatctgtggcccgcatccgctccccatgggtgtggacgtggaggcggctgtcacgacgggtgaagtgggcgcgactatcacggcagggcttcgcgagcaggaccggcgagggggagatctcgagcgagggcacgatggggcttcacgatctcggacgcagccccacgcccacatcgggcgtagatccgcgatcttgggcgagggtacgggaatga

SEQ ID NO: 110136 - DNA, 2346 bp, Zea Mays
tgcatagcctatcgagcgacggcctacgctcaaaaaacacaaatcgctttccgcgccgccgccgcgccgccgaccggcgctcctcacctctcccgccgcacccatcgtccccccgttcccggctaaaccctgcttgagccctagacaccgcccgcctccgggaggtagagagcatgcacgccaggttcctcagcgcgccgtcccctgcctccgccgccccctccccgtacgttcgcttggccttcacgggcgccctcccgcgccgcgcgtgttggaagccgcgaggccccgcgtccgcgtccgcgccgccgcctcggcctctccactcgctgtgcgcccgggcctccatgcagcccgcctctcccgcgcacgacgggcatggtggtccgccggtgcacggcgtctccaacaccgtcatcggggtcctggggggcggtcagctcgggaagatgctctgccatgcagcgagtcagatggggattagaattgtcatcctcgaccctcttcccggctgccccgcgagctcggtttgcgatgagcacgtcatcgggagcttcaacgatggggacacggtccgggagttcgccaagaggtgtggggtcctaacagtggagattgagcatgttgatgccgccacactggagaagctggaaaaacagggcgttgactgcgagcctaaagcctccacaatcacgattattcaggacaagtacaggcagaaaaagcatttctcaagatacgagatcccattgcctgacttcatggaagtagatactttacgcagtatagaggaggctggggaaaagtttggctatcccctaatggtcaaaagcaagagattagcatatgatggtcgaggaaatgctgtagccaagaacaaagaggagctatcttctgttgttgcttcactgggtgggtttgagcggggcttgtatgttgagagatggactcctttcgtaaaggagctttctgtaattgtggcaaggagcagagacaactctactgtctgctatcctgttgtggaaacagttcacaaggaaaatatatgccatgttgttgaagctcctgctgatgtatctaacaaaataaagaagttagctactagcgtggctgaaaaagctatcaaatcattagaaggagctggtgtctttgctgtagagttgtttttaacagaagatgatcaggtttttttggaccatctacatattttttcaaaatttattcctcttggagtggtgtttacatcattatccttgtgttgttctttctctagattttattgaatgaggtagcccctaggcctcacaatagtgggcatcacacaatagagtcatgctacacctcacaatatgagcagcatatacgcgctattcttggccttcctcttggtgatccctcaatgaaagcacctgcagcaataatgtacaacatcctgggcgaggatgagggtgaagcagggttctttctggctcatcagcttatcagtagggcactaaccattccaggcacatcggtccattggtacgcaaagccagagatgcggaagcaaaggaagatgggtcatattacaattgtggggccttctaagataagtgtaaaatcacgcttggacaacttgctgcaaagaaactcgtctgatcccaaggaagttagccctcgtgttgctattataatggggtcccaatctgatcttcctgtgatgaaagatgctgagagggttttgaaagagttcgacataccttgtgagttaactattgtttctgcacatcgtacaccagagcggatgtatgattatgcgaagtctgctaaagacaggggtttcgaggtcataattgcaggtgcaggcggagcagctcatttaccagggatggtggcttcattgactcctcttcctgtaatcggagttcccattaagacttcaacactatcaggatttgattccctcctatctattgtgcaaatgccaaaaggtattcctgttgcgactgttgctatcgggattgcagaaaatgcaggtttgctggcagctaggattctggctgcaagagatcctgagctccaggacagggtaactaagtaccaggatgatctgagggacatggttttggagacggcagaaaggctggaggaccaaggcccggaggaatttctgaagggaatggattgaccccttttgaagccctggctctggggcctgggaggaatacgagtgtattatgggtcggcgataactcactgtccactcgattatggtttaagatggggagtcatcaagaagatactttaataggctcggctgcattcgattttccttacaattcttttttgataattgtgctatcttaa

SEQ ID NO: 110137 - DNA, 2541 bp, Zea Mays
tgcatagcctatcgagcgacggcctacgctcaaaaaacacaaatcgctttccgcgccgccgccgcgccgccgaccggcgctcctcacctctcccgccgcacccatcgtccccccgttcccggctaaaccctgcttgagccctagacaccgcccgcctccgggaggtagagagcatgcacgccaggttcctcagcgcgccgtcccctgcctccgccgccccctccccgtacgttcgcttggccttcacgggcgccctcccgcgccgcgcgtgttggaagccgcgaggccccgcgtccgcgtccgcgccgccgcctcggcctctccactcgctgtgcgcccgggcctccatgcagcccgcctctcccgcgcacgacgggcatggtggtccgccggtgcacggcgtctccaacaccgtcatcggggtcctggggggcggtcagctcgggaagatgctctgccatgcagcgagtcagatggggattagaattgtcatcctcgaccctcttcccggctgccccgcgagctcggtttgcgatgagcacgtcatcgggagcttcaacgatggggacacggtccgggagttcgccaagaggtgtggggtcctaacagtggagattgagcatgttgatgccgccacactggagaagctggaaaaacagggcgttgactgcgagcctaaagcctccacaatcacgattattcaggacaagtacaggcagaaaaagcatttctcaagatacgagatcccattgcctgacttcatggaagtagatactttacgcagtatagaggaggctggggaaaagtttggctatcccctaatggtcaaaagcaagagattagcatatgatggtcgaggaaatgctgtagccaagaacaaagaggagctatcttctgttgttgcttcactgggtgggtttgagcggggcttgtatgttgagagatggactcctttcgtaaaggagctttctgtaattgtggcaaggagcagagacaactctactgtctgctatcctgttgtggaaacagttcacaaggaaaatatatgccatgttgttgaagctcctgctgatgtatctaacaaaataaagaagttagctactagcgtggctgaaaaagctatcaaatcattagaaggagctggtgtctttgctgtagagttgtttttaacagaagatgatcagattttattgaatgaggtagcccctaggcctcacaatagtgggcatcacacaatagagtcatgctacacctcacaatatgagcagcatatacgcgctattcttggccttcctcttggtgatccctcaatgaaagcacctgcagcaataatgtacaacatcctgggcgaggatgagggtgaagcagggttctttctggctcatcagcttatcagtagggcactaaccattccaggcacatcggtccattggtacgcaaagccagagatgcggaagcaaaggaagatgggtcatattacaattgtggggccttctaagataagtgtaaaatcacgcttggacaacttgctgcaaagaaactcgtctgatcccaaggaagttagccctcgtgttgctattataatggggtcccaatctgatcttcctgtgatgaaagatgctgagagggttttgaaagagttcgacataccttgtgagttaactattgtttctgcacatcgtacaccagagcggatgtatgattatgcgaagtctgctaaagacaggggtttcgaggtcataattgcaggtgcaggcggagcagctcatttaccagggatggtggcttcattgactcctcttcctgtaatcggagttcccattaagacttcaacactatcaggatttgattccctcctatctattgtgcaaatgccaaaaggtattcctgttgcgactgttgctatcgggattgcagaaaatgcaggtttgctggcagctaggattctggctgcaagagatcctgagctccaggacagggtaactaagtaccaggatgatctgagggacatggttttggagacggcagaaaggctggaggaccaaggcccggaggaatttctgaagggaatggattgaccccttttgaagccctggctctggggcctgggaggaatacgagtgtattatgggtcggcgataactcactgtccactcgattatggtttaagatggggagtcatcaagaagatactttaataggctcggctgcattcgattttccttacaattcttttttgataattgtgctatcttaacccatctcaacatgcccttttcccttctaatatagggtatgaattttgggtttagagggggaaaaaagaatgggagtaaacgttgtacgtacgaaaaataaaacggttcgagtaacgtaaaaaacatgcctggatttttcagccgcacaagttgctttgagtcaagtaattgtacatattccctccgttctaaataaggccttgtttggttattaccattgttcatggattggatttggttattatcattgcacatggattgaatgagattataaaaaattaag

SEQ ID NO: 110138 - DNA, 1701 bp, Zea Mays
accaaatttacagatacgtccatcctctctcgaagccgccgcctcctgccgtcctgccactgcgagtggccagtgcccactgcccagtggccgttgctggttgctgctccccttccactcccacagttccactactttcaccgcgcccgcgccaccgtttgcccccttcctccgccaccaccacagtgccacaccactcctaaccctaatccgcgcgagccaaatcttagccgcaagatccattcgccgcatgcctctcccttcccggcggcagcgccggctaagctgagccggacaggtaactcccttcgacgccccggcgccgttgctgtcacagccggcgccatgggctgcgtctgcggccgcccctccgcctttgacgacggccagtgccgcgcgacgcctccgccggccgcgaagctctcggcggcggtgaggagcaaggaggaagcacggaaacagcagcagctccagcttcagcagcatgtgagggcaggaagcggaagggaggaggcgctcgagaggaggcgagcaatgatggcgatggcggcggtgtgccaggtgaggagcccggtgccgagggcggttgaggcggagcatgtggccgtggggtggccgccgtggctcgtcgccgtcgccccggaggccgtgcgcggatgggtgccccgccgcgccgagtcgttcgagaagctcgacaagattggtcagggtacatacagtaatgtttacagagctcgtgacctcgaaaaggagaagattgttgctttgaagaaagtgcggtttgataatttggaacctgagagcgtgaaatttatggcaagggaaatcctcattttgcgccgacttgatcatccaaatgttatcaaactagagggtctagtaacatcaagaatgtcctgcagcttatatcttgtttttgagtacatggagcatgatctagccggactagcttctttccctggagtaaaatttactgagtctcaggtaaagtgttacatgcaacagctcctccgtggtcttgagcattgccacagccgtcacattctgcaccgtgacattaagggttcaaatctcttgattgataaccgaggcatattgaagatagcagattttggattagcaagtttctttgatcctgaacaacgacaccctttgactagtcgtgttgtcacgctatggtataggccaccagagctcttgcttggtgccaccaattatggtgttgctgtagacctctggagtgctggctgcattcttgccgagctatatgctggcaagcctatcatgcctggtagaacagaggttgagcagttgcataaaatatttaaactctgtggttcaccgtcagaggattattggaggaaatctaagcttccccatgccaccattttcaaaccgcaacacccgtatgcaaggcgtgtaccagaaacatttaaagagttccctgttcctgctctggcattagtagatgttcttctttcagtagacccagctgatcgtggaactgcgtcttctgcattgcaaagtgaggtatacaatttccctcttaaacctatctccagcaacacaagacatttgtctttgttttcgaactggtcattcttttttatgagacatgttgtttcaatactcattttttgcattacttgaaatattttataatttgagtttgaacatggcaaaacgaactattttgtgctt

SEQ ID NO: 110139 - DNA, 2826 bp, Zea Mays
accaaatttacagatacgtccatcctctctcgaagccgccgcctcctgccgtcctgccactgcgagtggccagtgcccactgcccagtggccgttgctggttgctgctccccttccactcccacagttccactactttcaccgcgcccgcgccaccgtttgcccccttcctccgccaccaccacagtgccacaccactcctaaccctaatccgcgcgagccaaatcttagccgcaagatccattcgccgcatgcctctcccttcccggcggcagcgccggctaagctgagccggacaggtaactcccttcgacgccccggcgccgttgctgtcacagccggcgccatgggctgcgtctgcggccgcccctccgcctttgacgacggccagtgccgcgcgacgcctccgccggccgcgaagctctcggcggcggtgaggagcaaggaggaagcacggaaacagcagcagctccagcttcagcagcatgtgagggcaggaagcggaagggaggaggcgctcgagaggaggcgagcaatgatggcgatggcggcggtgtgccaggtgaggagcccggtgccgagggcggttgaggcggagcatgtggccgtggggtggccgccgtggctcgtcgccgtcgccccggaggccgtgcgcggatgggtgccccgccgcgccgagtcgttcgagaagctcgacaagattggtcagggtacatacagtaatgtttacagagctcgtgacctcgaaaaggagaagattgttgctttgaagaaagtgcggtttgataatttggaacctgagagcgtgaaatttatggcaagggaaatcctcattttgcgccgacttgatcatccaaatgttatcaaactagagggtctagtaacatcaagaatgtcctgcagcttatatcttgtttttgagtacatggagcatgatctagccggactagcttctttccctggagtaaaatttactgagtctcaggtaaagtgttacatgcaacagctcctccgtggtcttgagcattgccacagccgtcacattctgcaccgtgacattaagggttcaaatctcttgattgataaccgaggcatattgaagatagcagattttggattagcaagtttctttgatcctgaacaacgacaccctttgactagtcgtgttgtcacgctatggtataggccaccagagctcttgcttggtgccaccaattatggtgttgctgtagacctctggagtgctggctgcattcttgccgagctatatgctggcaagcctatcatgcctggtagaacagaggttgagcagttgcataaaatatttaaactctgtggttcaccgtcagaggattattggaggaaatctaagcttccccatgccaccattttcaaaccgcaacacccgtatgcaaggcgtgtaccagaaacatttaaagagttccctgttcctgctctggcattagtagatgttcttctttcagtagacccagctgatcgtggaactgcgtcttctgcattgcaaagtgagttttttacaacaaaaccatatgcctgcaatccttcaagcttgcctaggtaccccccaagcaaagagtttgatgcaaaacgtcgggaggaggaagctcgaaggcaaggtgttactggaggaaagcaacataaacatgaccctgaaagaagaaccagagaatcaagagcagtccctgcccctgaggcaaatgcagaattagtatcatcattgcagaaaaggcaagcccaagctaataccaggagcaggagcgaaatgttcaatccctgcaaagaagactccgcgtccggattccgaatcgaaccaccccggccaactcctgttaccgagtcttctgaagacccacaacgtgcctacccaaccaggatcttccattctgggcctctagttaaccagagccagccatcaaaggctggaggcggcaaaaatggtgaacctcaggtccctggtgttgcgaatcaccctgtggttttgtcgacaagatcaggtccccgggcagacgatagcggccggacaatggtcgctcaagctgaagcatttgctcatgggcggaggctgtcggagtccatcaatgagcatttcagtaacagtgggaagtacgatcaagtgttcccgaagaaggatgacaggaacattagggctgatggagctattggctacggatccaaaggcagcaagatccaccactctgggcccctgacctgtccttcaggcagcaacgtcgacgagatgctgaaggagaacgaccggcaaatccaagaagtgttccggcgaacccgggtggagaagtcgcgagcgaggagggaccatggacatcaccagggcggtataagacctggcgatttcggcgccatcccagtcttcccttccagccgctccagctatcaggctgtgcagcagtaaggccggcgctcgaacaagatcggttggcgttggaacctccgatgtgtttcggtcccacgctttttccgggaggggatgtgtagcatacgctatgctatgctatgtacagggacagggaggcagcagcagcagccgtgtagagactctgaaggtgaggagagggggaggtgatttgtttattggcggcgattcgagtgtctcggtgaccaaactcgtgtatcgtcaggtagttttgagatgttcgctgcaactgcaatgcaatatggtgtgtgtatctcagtctcagctcgccaagacgaagttggccaccaagagcattttcactgtgatggcatcaaatctttcaaacccatgctgagacttgggagctttgttgaagcacctgttcttgtgatc

SEQ ID NO: 110140 - DNA, 1543 bp, Zea Mays
ttgtcgttctctgtgcccaagggatagatgttgtgaaacagagtgatgaggtgaatctgtcaatcccctctttctttatatattacacaacattgcatacaatgccatacatggatgctgcttcccctacacctacacagaattataacatttattttcctttttcatgtattagcatgtcctgtttattagacctgcactacttgtttcatttttctttctatttcctttagttcattgcctgctccatttgtgctatttaaatttcaatactcaagcaaaaggcaaccagcattgttgtcatacatttgattttttttttacaaatcatagtcatgcactttttaggcaaggtgttactggaggaaagcaacataaacatgaccctgaaagaagaaccagagaatcaagagcagtccctgcccctgaggcaaatgcagaattagtatcatcattgcagaaaaggcaagcccaagctaataccaggagcaggagcgaaatgttcaatccctgcaaagaagactccgcgtccggattccgaatcgaaccaccccggccaactcctgttaccgagtcttctgaagacccacaacgtgcctacccaaccaggatcttccattctgggcctctagttaaccagagccagccatcaaaggctggaggcggcaaaaatggtgaacctcaggtccctggtgttgcgaatcaccctgtggttttgtcgacaagatcaggtccccgggcagacgatagcggccggacaatggtcgctcaagctgaagcatttgctcatgggcggaggctgtcggagtccatcaatgagcatttcagtaacagtgggaagtacgatcaagtgttcccgaagaaggatgacaggaacattagggctgatggagctattggctacggatccaaaggcagcaagatccaccactctgggcccctgacctgtccttcaggcagcaacgtcgacgagatgctgaaggagaacgaccggcaaatccaagaagtgttccggcgaacccgggtggagaagtcgcgagcgaggagggaccatggacatcaccagggcggtataagacctggcgatttcggcgccatcccagtcttcccttccagccgctccagctatcaggctgtgcagcagtaaggccggcgctcgaacaagatcggttggcgttggaacctccgatgtgtttcggtcccacgctttttccgggaggggatgtgtagcatacgctatgctatgctatgtacagggacagggaggcagcagcagcagccgtgtagagactctgaaggtgaggagagggggaggtgatttgtttattggcggcgattcgagtgtctcggtgaccaaactcgtgtatcgtcaggtagttttgagatgttcgctgcaactgcaatgcaatatggtgtgtgtatctcagtctcagctcgccaagacgaagttggccaccaagagcattttcactgtgatggcatcaaatctttcaaacccatgctgagacttgggagctttgttgaagcacctgttcttgtgatc

SEQ ID NO: 110141 - DNA, 856 bp, Zea Mays
ttcagccatggttactgcaatgttagttcagaactgtattttaacatgcatcgccaagctaaaaaaaaattataggttagcaaacccaggtattaggtcaatgaaacatgaaaaagggggcaaaaccgaaaccaaccccatctattcttagttcattaccagtacttttggaagaaaaaaaaactgaccattttctggctcttgacgaaacagggctacggatccaaaggcagcaagatccaccactctgggcccctgacctgtccttcaggcagcaacgtcgacgagatgctgaaggagaacgaccggcaaatccaagaagtgttccggcgaacccgggtggagaagtcgcgagcgaggagggaccatggacatcaccagggcggtataagacctggcgatttcggcgccatcccagtcttcccttccagccgctccagctatcaggctgtgcagcagtaaggccggcgctcgaacaagatcggttggcgttggaacctccgatgtgtttcggtcccacgctttttccgggaggggatgtgtagcatacgctatgctatgctatgtacagggacagggaggcagcagcagcagccgtgtagagactctgaaggtgaggagagggggaggtgatttgtttattggcggcgattcgagtgtctcggtgaccaaactcgtgtatcgtcaggtagttttgagatgttcgctgcaactgcaatgcaatatggtgtgtgtatctcagtctcagctcgccaagacgaagttggccaccaagagcattttcactgtgatggcatcaaatctttcaaacccatgctgagacttgggagctttgttgaagcacctgttcttgtga

SEQ ID NO: 110142 - DNA, 3334 bp, Zea Mays
gtttccggtactaaagatatcttttagtatcattttggtgtcttctgccggtatgaaagacctgatatattagtattgattagagacagcaataactgcggtaaccatgttctcttcacggactcaatatttatttgaaaccatgcattaccgacgcttgtataactatggattttgaaacaacgaccggaatgacgaaatctcagtctccggttgtgatagctgatgattcgcgtgtgtcgccagcagtagcagaaactccattggactggcgtgcacactttgagcgtgccaataatccgccgccgcatagctagacacgcacaggtgaccagtagcgtggcagacacgtcccgtccgcccccctccatccccccttctagcagctgccactctcagatcttcctctttggcaggcacataataatatagacggtgccctagaaacgacggctaacaaatacatgccaaatcatcgtccatgcatctcaggcggcacagggcaaaagcaaaacatgtttatgcttgcatactacgcatgatcgagcgagcccatggcgatgctgacagcaggtcgtcgtcgatgcaaaaaaaaaaaaaaagtgttcctgcgttaacggcggtgcattgcatgcaaggcgaagcgggcggcgttgcgtttgcgtacggatcggagcaggagaggagaggagagggacgggcgcgtgacgaccggaggggaggagggtaaacgtgacgctggctggccgcgttgccggggccgttgcgccatttcatttctttatcttcttcctcctctcccatacaacaaggcaaggggggcctccctatatatcgcgtgctttgcttgccccgaccacatctgtatccctgcaaccgccaaccgtttttccgagaaacctgctcgcctcgcctctccacacgcctatcgtcgtcgtcctctccctccctggctcgctcgatctgcatcgtctgtctcagttggtggggggtgtccgggctatctgttcatccgttgaagtggtctcttggatctatctctcgatctctgcctcagcttttccttcctccctccagcttgtttaacgggtcctcgcgatcgatcggtcgctagctcccagctacctggtcaacgtacagcaggcgggcaacagtttccgccgtgtcgtgtgtttatatacgcgcgcgcggccggtcttctcgcttccgcctgcatcggcggcggcggcggcgtcggcgtcttcgtccgatctatcatcccaatctcttttgttgccattgcctgcatgtacgttagtgaccagcccccatcggcccatccaaagaatccccttgttgccattggccgtccgcctgtcccgcctcccgtccctacgaccagttcctcgattgcaagctagtagatagcttccatcgtccagggcgcgcgggcaagcgctgtaccgtccgtccgtccgtccgtcgcgtcgaccccacagatcgatcccgcgcggtcgatccgctgacgccgacggccgatcgctagctgctggtggtggtggccttgcacttgcacgttgcaccggcggcaggcagagatcgcgcgcggctgggcgccagcatgcacggcaacaacggcagcggcgagcagcactcgccgaggtcgcccaagtcgtcggcgtccccgcgcggcgggggcggcggcggcggagcggcgaagctcccgagcagcgcggcggcctggctggtggacagccgctgggcgctgtcggccgcgctgagcctgctgctgttcctggccgtcgcgctcgccgtcacgtccttctcctcctcctcgtcgccctacatcgtctccccgtcgtccttcttctcctccctccccgtccccgtccccgccagccgcgccgccgccgccaaccactcccagtcccagtcgccgcctcctccccccggcgccggcgtgccgcggctggcctacctcatctccggctccaagggcgacctggaccgcctgtggcgcgcgctgcacgcgctgtaccacccgcgcaaccagtacgtggtgcacctggaccgcgaggcccccgtggcggagcgcctggagctggcggcccgcgtcgccaacgccaccgtcttccgccgcgccggcaacgtccacgtcatccgccgcgccaacatggtcacctaccgcggccccaccatggtgtccaacacgctgcacgcctgcgccgtcctcctccgccgcggcggagcctgggactggtttatcaacctctccgcctccgactacccgctcatgacgcaggacgacatcctgcacgtattctccacggtgcccaggaacgtcaacttcatcgagcacaccggctacctaggctggaaggaggggcagcgtgctcggcctctgatcgtggacccggggctgtacggctccaagaagcaggacatcttctgggtgtcgcagaagcgggagctgccgacggcgttcaagctcttcacgggctccgcctgggtggcgctgacgcgggacttcgtggagtacacggtgtgggggtgggataacctgccgcgcaccctgctcatgtactacgccaacttcgtctcctccccggagggctacttccagacgctgctctgcaacgcgccccgcttcgtgcccaccgtcgccaaccacgacctgcaccacatccagtgggacgtgccgccgcgccagcacccgcacccgctcgcgctcgccgacatgcccgccatgctcgccagcggcgcgcccttcgcccgcaagttcccgcgggacgaccccgtgctcgacgccatcgacgacggcctcctcgcgcgcccgcgcaccgccaacgccaccgcggccttcgtgcccggcggctggtgcggcgccgacgccgagtgccgcgccgtcgacaacgactgggtgctcaggcctgggcccggagcccagcgcttccggaggctcatcgacaggatcgtcaggtcagaggccttccccaacaggcagtgcaagtagcgtcctcgtcgtcatcatgtgtgtggttgtgtttgtgtgtgtacaggaaaaaaaacaccagacggtttgttgtactcatgtagtggacactggagatgatcatacttcacttttcatataacaacaatacacacataaaacatgctagtgttagcgaatttcagaatcaagaaacatcttggaatgtctgtataagactactgaatgacccatggcatgcatttcttttcttcaactctgaaagggtgtactgacagagagcgatgctcactctggttttggactcagtttcttctctttcgactaggccctgttaacctgtttgaaggttgtggttttaag

SEQ ID NO: 110143 - DNA, 255 bp, Zea Mays
tttgttttgtttttgtctctgtgtgtgtagggagtgattctgcctgacagtcacatgatccttaattaattgctcaatcatacgatgtcctctaatcagttgctcaaccatagtacagtagtacgatgctttgttttagggatccccaaaactgttggggctcggagctcagcagcctggccagactcttatccagagagattcgtgcttcatcgttcatacacacacacacctcaagccctcaaggttcatgcc

SEQ ID NO: 110144 - DNA, 337 bp, Zea Mays
tcatcccgtcgtgtcccgccgtgccatcctcctctctgctccacgatcacctcctctgctcccctcgtgcccagcgtcgcgtccgcgaaccagccccctcactctctctcccgcccggctctcctcgcccaactctctctcccgcaatcccgcggcctcgccccaaatcgccgccccgactctcggtcctcgcccatgctctccatggaaggagatcgaggaatccgcgtccgctgcgcccagctctctccacgtccatagtctccctggaaagcgattcctcgatctgcgtccgcttgcttcagctcctccgttcccaaacctcatcaaccagcat

SEQ ID NO: 110145 - DNA, 1185 bp, Zea Mays
cagcgcacctcatctcgctccaagcacaccaccactccacagtgcacttcactctctacagcaacagaaaagtgagcagcagacagcagcagctgctgccatggaggcgtggagatctctcctcgcgagcttcgtgctcgccgtgctggccgcgcaggccttggtggccgtggtcgagtccaggaccggtcccgtggagcaggcgagcgaaggtgacgacgtgaagaagccggactgcgtgccggggatggacccgcgctcgttcccggggaccggcggcggccacggcatcacgcccgtgacgccatcgcacggaggctccagctccccgacgccgtcccacggcggcggcggcgggtacgttccaacgccgtcgcatggcgggacgctgcctttcccgtcccacggcggctccggctccggctcctctccgacgtcgccctccaccggcggcggcgcgtacggtgggtctccgtccacccccggcggtggcgcgtacggtgggtctcctccgtccacccccagcggcggcggcgcgtatggtgggtctccgtctactcccagcggtggcggcgcctacggaggcgggtccccctcgcctgctcatggtgctggtggcgcctatgggagctctccgacgcccgcgtacggcgattcccccttgcacggcggcatcgggacctcgtcaccgacgacatttgtccccatggacccccacagcttcggcacctgcgagtaagccactagtagtctactacatctacatcagtacgtgcatcacaagttcacaacgcgtccatgcaacatgcatgcacagtttccgtcagcatgcatgcatgcatgcagtcactgatgaacaaaactaaaagttccatcatcgtcgatcgaccgagcagctactggaggtcgcacccgatggagatctggtcggcggtcggcggccggttcccgagcacgtcatcgtcgatgggccacttcttcggcgcggcggcgggcagcgtgggcggggctgacgtgatgagcatccaggacgcggtgggcaacacgcgggcggacggcacgggcgcgctgctgcgcgagggcgccgccgcgctgctcaactccatgacccgcgccgggttcccctacaccacggagcaggtccgcgacgctttcgcggcggcggcggcggccgggtccgacggc

SEQ ID NO: 110146 - DNA, 1298 bp, Zea Mays
cagcgcacctcatctcgctccaagcacaccaccactccacagtgcacttcactctctacagcaacagaaaagtgagcagcagacagcagcagctgctgccatggaggcgtggagatctctcctcgcgagcttcgtgctcgccgtgctggccgcgcaggccttggtggccgtggtcgagtccaggaccggtcccgtggagcaggcgagcgaaggtgacgacgtgaagaagccggactgcgtgccggggatggacccgcgctcgttcccggggaccggcggcggccacggcatcacgcccgtgacgccatcgcacggaggctccagctccccgacgccgtcccacggcggcggcggcgggtacgttccaacgccgtcgcatggcgggacgctgcctttcccgtcccacggcggctccggctccggctcctctccgacgtcgccctccaccggcggcggcgcgtacggtgggtctccgtccacccccggcggtggcgcgtacggtgggtctcctccgtccacccccagcggcggcggcgcgtatggtgggtctccgtctactcccagcggtggcggcgcctacggaggcgggtccccctcgcctgctcatggtgctggtggcgcctatgggagctctccgacgcccgcgtacggcgattcccccttgcacggcggcatcgggacctcgtcaccgacgacatttgtccccatggacccccacagcttcggcacctgcgactactggaggtcgcacccgatggagatctggtcggcggtcggcggccggttcccgagcacgtcatcgtcgatgggccacttcttcggcgcggcggcgggcagcgtgggcggggctgacgtgatgagcatccaggacgcggtgggcaacacgcgggcggacggcacgggcgcgctgctgcgcgagggcgccgccgcgctgctcaactccatgacccgcgccgggttcccctacaccacggagcaggtccgcgacgctttcgcggcggcggcggcggccgggtccgacggcgcggccgcggcgcaggcggcggccttccggaaggccaacgagggcaaggcgtagctgcctgtgctgtgcatatgcatgtgtggttaattagctggagtgctccggtcgcttaatctgttggatttgatggtttgttggttgtgtgcgcgtgtgtttcagtgatttgctcctttttttttctttctcgtggatctatcgatggatgaacatgaatgaatgaaccgaactgcacagctccgttgtgagctgatgcatgcatgcactagctagtagc

SEQ ID NO: 110147 - DNA, 876 bp, Zea Mays
agcgcacctcatctcgctccaagcacaccaccactccacagtgcacttcactctctacagcaacagaaaagtgagcagcagacagcagcagctgctgccatggaggcgtggagatctctcctcgcgagcttcgtgctcgccgtgctggccgcgcaggccttggtggccgtggtcgagtccaggaccggtcccgtggagcaggcgagcgaaggtagtacattacatcttctttcttacgccgtgttcattcagacgctgtgtgtagcaacgttgatgacctttgcgcgcgtgcgtggtaccttaatacctttgcaccgccgctgcaggtgacgacgtgaagaagccggactgcgtgccggggatggacccgcgctcgttcccggggaccggcggcggccacggcatcacgcccgtgacgccatcgcacggaggctccagctccccgacgccgtcccacggcggcggcggcgggtacgttccaacgccgtcgcatggcgggacgctgcctttcccgtcccacggcggctccggctccggctcctctccgacgtcgccctccaccggcggcggcgcgtacggtgggtctccgtccacccccggcggtggcgcgtacggtgggtctcctccgtccacccccagcggcggcggcgcgtatggtgggtctccgtctactcccagcggtggcggcgcctacggaggcgggtccccctcgcctgctcatggtgctggtggcgcctatgggagctctccgacgcccgcgtacggcgattcccccttgcacggcggcatcgggacctcgtcaccgacgacatttgtccccatggacccccacagcttcggcacctgcgagtaagccactagtagtctactacatct

SEQ ID NO: 110148 - DNA, 109 bp, Zea Mays
agagtgaggaggacaatatgacttttacgatagttaatggcatgtttgtttgggattataatctgcctatattatataatataataaattctaaactaatatttagttc

SEQ ID NO: 110149 - DNA, 240 bp, Zea Mays
caattggctgcatatatattgcacgcgtgcaggtcgcgaggtgatctgctacgagagccctcggccgccggcggggatccaccgcgtggtgttcgtgctctaccagcagacggcgcgcggcgccgtcgaccagccgccgcttctccgccacaacttctgcacccgcagcttcgccgtcgaccacgggctgggcgcccccgtcgccgccgccttcttcacctgtcagcccgagggtggcac

SEQ ID NO: 110150 - DNA, 774 bp, Zea Mays
ccatcaaaaaaatggaggagaaaaaaaaaccctgcaagctagagccagctagctgcacacagttcacacaccaccatcgtacaacaggcaaccaacccacggcgcacgcagagatgcacacgcttcgggatcgatggagggcggatcgagaggagggaggtcgcgaatcggcggaagctgcggctcggggaccgcgggaaggtacgagatctggcggcgcggggcgcagagaaggggcggcggcggaggcggcgtacctggcggtaggtggtgccgtcgggctcgacgacccagccggcctcgttgcagagcgccttgagcacctcgttgttgtcgcagtgcttgggcagcttgtagccgccgtgcgcgcggaggccggcgaagatcttggcggcgatcgcgcggcggcggcgctcccggcgcttgttgttctcgcgctccctccacgtgggcatccggcctcccgcgccagccgcacccaggcccccgccgccgccgctcgccatgggccgaccgcgcgagcagcgctcgcagctcggctcgcttggggaggaggggatgggagtccggctgactgggtccgggtcgccgcgcgcgctcgtctgggtggggagcggaggggaggggaggagagaaggagcgggcgagcgaaggaggtgtggatgttggggtgggcgggtggagaagcctggggcgagaagagaccacacggaaaggcaacacgccgcgcgaggcgagcgagggagacgggggtgtgggggtgggtggggaact

SEQ ID NO: 110151 - DNA, 332 bp, Zea Mays
attgccaggaatgagtcactaagtaaaaactccaagttaaaaaagtgttgcatgtatctcttgtttattttactaggtgagtgaccgtgcgttgcaacggaaccgtataataacacgataacttatgtacatgcgtgtgttatatgtatatgcccgtgcgttgctacggagttaatattataaaacacaatattttttgtatattaatgtattttatcgtagcaacacacgagcatatacctagttagattcttatgtggtgaggtcacaactatttaattccattatgctctataggttgcatgtacacgagatagttcacgggcaactac

SEQ ID NO: 110152 - DNA, 477 bp, Zea Mays
acgagcaccagcagcagagggcaagaggaagcccaaacaacgtagtacgggcgaacagcaagtatagtacgcacgcatgcagctttccatgcctccctcccgcctacgccgccgcacggcggcggcgttcgtcttcgtcgcgctcctcgtcctcccgtccatgctgcaagcggccaggacgacgccgagcgatggccgccacggacgtgtacagcagcagcaggaggaggaggaggtgcgtgccgcggcggcgacgacaacgacgagtggcggcggcggctgtgccgggtccacacctgcgccagcgtcgtcgtcggtgcaagaaaggccgcacccgctcacactgctgccgccgccgccgccgccgctcaccaccaccaccaccgttgaggaggaggcatcatcgtcgtcgtctccccgcagccggatgctcggctcggtgcccagccccggcgtcggccactagtagcgcgctac

SEQ ID NO: 110153 - DNA, 100 bp, Zea Mays
ctcttatcttgaagatcaggaacactggaggctgggttactccttgattcttacatggattaacgcatggatcgaggaagcatgatgacaagcctgatag

SEQ ID NO: 110154 - DNA, 2171 bp, Zea Mays
caaacaggggcatgatacgctgatcgatctctatgcgtctccttcgcgcgtcctcaagtgctctgcgctgcagccgccgcctgatttccgccttcgccgtggaccagccaatccgctgccacccgccgactgacagtgccgtcccatggaacaagctcctccgcgaccacatcgccggctcccggccgggcctcgcgctagcgctctaccgcctcatgcgcgcgctctcccccgcgctgcccaactcctacacgctgccgctcgccctccgcgccgcgccttcctggcgcctcgccgccgtcgtacacggccacgcgcttcacctcggcctccacacccacccggacgtcgccggccaggtcctcgccgcctacgccaggctcggccgcgcggccgaggcccgctgcgtgttcgacgcattgccgttgaggaggagcaccctctcctggaacacgctcatctccgcctactccgccgggtgtgaccccgacgcggcgtgggtcgcgttcgcgcgcatggtggcggccggggcgcggccggacgccgtgacgtggaccgcgctgctgtcggcgcacgcgaggtgcgggaggcacccggaggctcttcggctgctcggggccatgcaccgcagcgggtgcgagggcaatgccgaggccgtcgctgtggcgctctcggcgtgcccgtacgccggcggccctgcactggggagagggaggtcgatacatgcctacggctttgtgaagggcgtcgtccatggctacctgttcgtcaccaactcactggtgtgcatgtacggcaagcttggagagatggaggaagctgagaaggttttctgggatgccggggcgaagaagaacgccgtgacatggaatgcgctcatcactagctacgccgccgccgggttgtgcggcaaggctctcggtgtgcttgcccagatggaacagtgtggcggcatggtcgcgcccaatgtcgtgagctggagcgctgtcattggcgggttcgcgtcatcaggggacatggagcaagcactgcagctgtgccggcaaatgcagcaacagtggcttttgccgaacgcggtgacattagcgaccgttctttcagcctgcacacaactgctggcgttgcggctgggtcaggaggtccatggccacacgatcaaagcagcgctagaccggcactcgctggtgcagaacggtctggtcaacacgtacggcaagtgcgggaaggttgctactgcgcgcaaggtgttcgacgggatgaagagcagggacttgatctcatggaactcgatgatcgggagctatggcgcacatggtatgtgtgacgaagcccttgcaatgttccaagacttgaccagggctctgattgagcctgacggcgttacgtttgtcgccgtgctttctgcgtgtagccacacagggcgtgtcgcagagggccgccgcttgttcgaccagatggtgcgggagcacaagatctccccaaccatggagcactacacctgcatggttgacctcctggggcgtgctggcctgctgaggggcgcgtgtgagctcattgatacgatgccgatgaagcctgacctgtgcgtgtggggagcgctgctcaactcctgcaggattcacggggatgcagcactggccgaagctgccatggccaaagttctgcaggctgagacggcaaccaccggcaaccgcacgctgatcacaaacctgtacgccgcgtgtgggatgtgggacgactccaagagggtgaggatgacgatgaaggaggcagggttgaggaagaatccggggcagagctggattgaagtgaggaacaaggtgttcgccttcacggcctggagcgcgccgccgtctgaagctgaggaggttttcagggtgcttgacgatctgtacggggaaatgaaagacgagaagcgctccactgccatgtatgatgtcattgcaagcattgcgtagaacaattgccatctaattctaccccgtggtttgtggcaagattgctatgctaggtcaagcaagggacacatctcatcatacataaaggagcaaagaactgaggagcttggcgactgctaaagatgttgcggaccgaagaagagcatgagggtcttgcagatctccgacggctccgccatcgcgccattgaccggcgggacgacggacatgccg

SEQ ID NO: 110155 - DNA, 1926 bp, Zea Mays
atgcgtctccttcgcgcgtcctcaagtgctctgcgctgcagccgccgcctgatttccgccttcgccgtggaccagccaatccgctgccacccgccgactgacagtgccgtcccatggaacaagctcctccgcgaccacatcgccggctcccggccgggcctcgcgctagcgctctaccgcctcatgcgcgcgctctcccccgcgctgcccaactcctacacgctgccgctcgccctccgcgccgcgccttcctggcgcctcgccgccgtcgtacacggccacgcgcttcacctcggcctccacacccacccggacgtcgccggccaggtcctcgccgcctacgccaggctcggccgcgcggccgaggcccgctgcgtgttcgacgcattgccgttgaggaggagcaccctctcctggaacacgctcatctccgcctactccgccgggtgtgaccccgacgcggcgtgggtcgcgttcgcgcgcatggtggcggccggggcgcggccggacgccgtgacgtggaccgcgctgctgtcggcgcacgcgaggtgcgggaggcacccggaggctcttcggctgctcggggccatgcaccgcagcgggtgcgagggcaatgccgaggccgtcgctgtggcgctctcggcgtgcccgtacgccggcggccctgcactggggagagggaggtcgatacatgcctacggctttgtgaagggcgtcgtccatggctacctgttcgtcaccaactcactggtgtgcatgtacggcaagcttggagagatggaggaagctgagaaggttttctgggatgccggggcgaagaagaacgccgtgacatggaatgcgctcatcactagctacgccgccgccgggttgtgcggcaaggctctcggtgtgcttgcccagatggaacagtgtggcggcatggtcgcgcccaatgtcgtgagctggagcgctgtcattggcgggttcgcgtcatcaggggacatggagcaagcactgcagctgtgccggcaaatgcagcaacagtggcttttgccgaacgcggtgacattagcgaccgttctttcagcctgcacacaactgctggcgttgcggctgggtcaggaggtccatggccacacgatcaaagcagcgctagaccggcactcgctggtgcagaacggtctggtcaacacgtacggcaagtgcgggaaggttgctactgcgcgcaaggtgttcgacgggatgaagagcagggacttgatctcatggaactcgatgatcgggagctatggcgcacatggtatgtgtgacgaagcccttgcaatgttccaagacttgaccagggctctgattgagcctgacggcgttacgtttgtcgccgtgctttctgcgtgtagccacacagggcgtgtcgcagagggccgccgcttgttcgaccagatggtgcgggagcacaagatctccccaaccatggagcactacacctgcatggttgacctcctggggcgtgctggcctgctgaggggcgcgtgtgagctcattgatacgatgccgatgaagcctgacctgtgcgtgtggggagcgctgctcaactcctgcaggattcacggggatgcagcactggccgaagctgccatggccaaagttctgcaggctgagacggcaaccaccggcaaccgcacgctgatcacaaacctgtacgccgcgtgtgggatgtgggacgactccaagagggtgaggatgacgatgaaggaggcagggttgaggaagaatccggggcagagctggattgaagtgaggaacaaggtgttcgccttcacggcctggagcgcgccgccgtctgaagctgaggaggttttcagggtgcttgacgatctgtacggggaaatgaaagacgagaagcgctccactgccatgtatgatgtcattgcaagcattgcgtag

SEQ ID NO: 110156 - DNA, 2092 bp, Zea Mays
tatttccaggaaaacgttttctgggcctcgtctcgactgaaactcttcgagccttcgacgtgcctctcctccgctcgtggccaccgatttcactggcttcatttcgaatcataaatttcatctcctggagtgttgctttgcttgctcctggaatcttcggaaccgaaggccaccgcgccaaccgcccaattaccgaaccaaaccctaccggtcgcggctcctccatagtccatactctcgcgcgcctaaaccctagccatcctcctcgccgccggcgaccgccgccatgagccgctacgacggccgcgctgcggacgcgggctcctaccgcgaccgccgcagcgagggggcgttcggaggcgggtcgagggcgttctcggcgccgagcaaggcggacgcttccgcggcggcctcggagctagatgggctgccgcgcttcgagaagaacttctacgtggagtcacccgcggtggccggcatgacggaggaagaggtggaggcgtaccgccgccgccgggagatcaccgtcgacggccgcgacgtgcccaagccggtgcgtgagttccgtgatgtgggcttcccagaatatgtgttgcaagagatcacaaaagctggttttgtggaacctacccctatccaatcgcaaggttggccgatggcattgagaggccgcgaccttattggcattgcagagacaggatcagggaaaactcttgcttaccttttacctgccattgttcatgtgaatgcgcagcctattctttcccctggcgatggtccaattgtcttggtgttagctcctacacgtgaacttgctgttcagatacagcaagaagcaaccaagtttggtgcatcatcaaagataaaaagtacttgcatatatggtggtgtgccaaaaggtccacaagttcgtgatcttcaaaaaggtgttgaaattgttatagctacaccaggacgactaattgatatgattgaatcacatcatacaaacttgcgaagggtcacatatcttgttttagatgaagcagaccggatgctagacatgggatttgaacctcagattaagaaaattgtttctcagattcgtccagatcgccaaacactttactggagtgctacctggccgaaggaagttgagcagctagcaaggaatttcctttttgacccatacaaggtcactattggttctgaagacttgaaggctaatcatgccattgttcagcatgtagagatattatctgagagtcagaagtataacaagctggttaatctactggaggatataatggatggtagccgaattttaatatttatggacaccaagaagggatgcgatcagactactagacagcttcgaatggatggttggcctgctttgtctatccatggtgacaagagccaagcagaacgggattgggtcctttctgaatttaagtcagggaaaagtcctattatgacggccactgatgttgctgctcgaggcctagatgtcaaggatgtgaagtatgtcattaactatgactttccggggtcactcgaggattatgttcatcgtataggtcgaactggcagagcaggtgcaaaaggaacagcgtacacctttttcactgcagctaatgccagatttgccaaggaacttattaatattctggaagaagctggacaaaaggtcagctctgaattagctgctatgggtcgtggtgcacctcctccatcttcaggttaccgtgatagatatagggggtatgggggtggccgatcgtggagttgacgttcaaatgcttagttgctgctaagagcaatgctttacgtttgtttgttgatggatatgttgttttggcgcactgataagagcaatgctttacattttggctagtattcggtaatgatggattcacatactcttggatattgacctgtctcgatgctagaaaagtggcatgatatcatgcctgcaatatcattagtttatttttagccatagtttcagattgacagcattgcccataattagctcacatcagaggtaagaatttgtagtaaacatcattccatccatgatttggtgctcatttttactcttcattttgga

SEQ ID NO: 110157 - DNA, 1540 bp, Zea Mays
atccatcagtgtggactgtcgaaccgggggatgggttgggacgttgggtcctggtccacgtgaccacgtctagcagtagcagactagcaggctctcgaaactcacgttcccgtgtcgctcaactggcacaggactggacccgtcccgtacggcatcgcaccccgcagccgcaggccgcatcttcctcgcgtgctctgccctctgtgcctgcccatccgttgatcccatcggcttccccttcctcttccccgatccccttcctcccccgatcccatccaattccacttccacaccgcgggcctcgccgccgacgccgacgccgccggccatgtccaagtacggcaccattcccacctcctcctccgcgggcggagggcccgtgcccctcggcggcgcctccccgctcgatttcatctcccgcgccaaggctcggggcgcctcggcgctggcgacgcgccggccctggcgcgagctcgtggacgtccacgccgtcggcctgcccccgagcctcggcgacgcgtacctccgcgtgcgcgccaacctcgcccacttcgccatgaactatgccatcgtcgtcctcgtcgtcgtcttcctctccctcctctggcaccccgtctccctcatcgtattcctcgtctgcatgcttgcctggctcgtcctctacttcctccgcgacgagcccctcgtcctcttcggccgcgtcgtcgccgacggctacgtcctcgccgtgctcgccgtcgtcacgctcgtcctgctcctcctcaccgacgccaccgccaacatcctctcctcgctgctcatcggcctcgtgctcgtcctcgtccacgccgcgctgcacaaggcggaggacaacgccgccgacgaggctgaccgctggtacgcgccggtgtcacagcagccgtcgcactgaggatctgaatgtggccgttctgcgccttggctgtgatcctattctgtactccctgtttccgagttcctccagctgcgcgagctgggccatccccatctcatctgcgatgaaaaacctgtccctgttggttgtgattcacctgctgccggttccatgggaagttttggatccagcgacgacgcagggctgttaaacttgttctccacgcccatttctgtggtacgtttaaagcgtctcgttcacgtgtatcaaatccggactgaagtctagtgtacattttgagttggagaaatgtgatgccagggacctgcgttcagattttatcgacgccatgcatgtaggcaagggatgctgatatttcagacatggttttattctacgtggtgtctgggagcctgggaagaaatctcgttttgcttgattgccggtttctctcttttttttttgaaatagaaatgaggtgtaactctgggattaggcctgatcccagttgtttcggctgcgcaggcaccaaccgagtgctaaactgctaattagtctgtctccagcggattgtggtcggaccatataaactgtactgtttatcccgaaatttaaaatatgagatgtgataggccgctgaagacacat

SEQ ID NO: 110158 - DNA, 1296 bp, Zea Mays
tccatcagtgtggactgtcgaaccgggggatgggttgggacgttgggtcctggtccacgtgaccacgtctagcagtagcagactagcaggctctcgaaactcacgttcccgtgtcgctcaactggcacaggactggacccgtcccgtacggcatcgcaccccgcagccgcaggccgcatcttcctcgcgtgctctgccctctgtgcctgcccatccgttgatcccatcggcttccccttcctcttccccgatccccttcctcccccgatcccatccaattccacttccacaccgcgggcctcgccgccgacgccgacgccgccggccatgtccaagtacggcaccattcccacctcctcctccgcgggcggagggcccgtgcccctcggcggcgcctccccgctcgatttcatctcccgcgccaaggctcggggcgcctcggcgctggcgacgcgccggccctggcgcgagctcgtggacgtccacgccgtcggcctgcccccgagcctcggcgacgcgtacctccgcgtgcgcgccaacctcgcccacttcgccatgaactatgccatcgtcgtcctcgtcgtcgtcttcctctccctcctctggcaccccgtctccctcatcgtattcctcgtctgcatgcttgcctggctcgtcctctacttcctccgcgacgagcccctcgtcctcttcggccgcgtcgtcgccgacggctacgtcctcgccgtgctcgccgtcgtcacgctcgtcctgctcctcctcaccgacgccaccgccaacatcctctcctcgctgctcatcggcctcgtgctcgtcctcgtccacgccgcgctgcacaaggcggaggacaacgccgccgacgaggctgaccgctggtacgcgccggtgtcacagcagccgtcgcactgaggtgtgatatcctccctgcccctgccccgttctccttatgatgattgtgtcaccgttggtgctgctgcttgctcctgtatgatttgctaatgtgttcctttcaattgtcatgctgttgcagcgttgttagttgtaatttgttcttgtgcacgagcacaaatgttcacagatagtcatatactgctttgctatgaacgatttagtcttggcttctctactgtctactctttccgcgaattttagttatcttgtagctatcgacagactagagcagctgtttgtgcaattggagctcctatttgtacattcttgtgactcatgtgcagctgtgctgattttaagaggaataatatatagctgtgctgattttaatcagctccttgaagg

SEQ ID NO: 110159 - DNA, 104 bp, Zea Mays
caagattcttttgaaaatgacgagcaaatctgttagactagacggctacgataagacaggaaacagcagccggccaatttgcccacaatgtggggtcacttcgc

SEQ ID NO: 110160 - DNA, 84 bp, Zea Mays
ccaacgtgtttaccaactgatgatgttacagtgcaactgtgtcgtgacaagatacaaggatagctcaactatgcaatgactggc

SEQ ID NO: 110161 - DNA, 1283 bp, Zea Mays
cgaagaaagcggcgatggcagcggagaagccggctccggtgcgcgtgctgtactgcggcgtctgcggcctcccggccgagtactgcgagttcggccccgacttccagcgctgcaagccctggctgcgggcgcacgcgcccggcgtctaccccgacgacctcgtcgccggtccctcctcgtccggcggtgcgggtggcgacagggacgtcgacaaggtcggggagcgcctccagggcgtcgggatctccgacggctccagcagcgccgcaggggatgcttccgcgtctaagcccgaagaggtcaaacgcctgcctggtggtgtaaagctgagtgatgcttcaaagaagcttgggaagaagtttgcaaccggagcttctgttgttaagggcccgaccgagaaggaacagattgacgtgcaaggggacatatcatatgatattgtggagttcattacagatacatggcctgatgtacctgagtcggccattttcttcattgaagatggaaggaaggttcctgccgcttgatgtcactatgaggcgcaggaccaatggatttacaattataacacagagataaagcaaaggcgtggctgtcaaggcatgtagcggccataccagttcgtctctttgtccgaagtcatggactgttcttccaagttttatcaggagtggcgttttgtttaccaccgtcacctgcttccatgtatgagatcaaatctatacagttaccagtttgttatatgtgtgatgtctgttgtccgtggcttccatgtttcgtcaaatatatataccgtggtccgtggcctgtgttagcaatagcgtggaggagaagggaagaggagacgaagaaaggagaggaacacgggaagcgcgtgcaggtggtttgcgacatccaatccaacactgctctggtgcgagcagcagccagccacttgtattgtcccccgagccacgctacagcctacagctggactgccggaggcgtcgcaccagcaagagccgcgcaaaacatgtcagtgtcactgcctcactggcttcctgcatcgcttcgctccggtagttagtgcgacggtgatcgctggggcaagcgtatgcgtgtcttcttactgtgctgctggttggatttgcacgccaaatatgacgtggacgcctatcacatcagcacatgtataatagtctgcaacacttatatagccacatactccatgtaatgtccagcttttaatcaccctgccctaaagcttgggcattaactaatgcaagcatcgggttcactgtatc

SEQ ID NO: 110162 - DNA, 1349 bp, Zea Mays
cgaagaaagcggcgatggcagcggagaagccggctccggtgcgcgtgctgtactgcggcgtctgcggcctcccggccgagtactgcgagttcggccccgacttccagcgctgcaagccctggctgcgggcgcacgcgcccggcgtctaccccgacgacctcgtcgccggtccctcctcgtccggcggtgcgggtggcgacagggacgtcgacaaggtcggggagcgcctccagggcgtcgggatctccgacggctccagcagcgccgcaggggatgcttccgcgtctaagcccgaagaggtcaaacgcctgcctggtgagattcgtcagattgtccgcaacaagcgcaaatgtgttactgtggtgaagggacttgaatggtttggtgtaaagctgagtgatgcttcaaagaagcttgggaagaagtttgcaaccggagcttctgttgttaagggcccgaccgagaaggaacagattgacgtgcaaggggacatatcatatgatattgtggagttcattacagatacatggcctgatgtacctgagtcggccattttcttcattgaagatggaaggaaggttcctgccgcttgatgtcactatgaggcgcaggaccaatggatttacaattataacacagagataaagcaaaggcgtggctgtcaaggcatgtagcggccataccagttcgtctctttgtccgaagtcatggactgttcttccaagttttatcaggagtggcgttttgtttaccaccgtcacctgcttccatgtatgagatcaaatctatacagttaccagtttgttatatgtgtgatgtctgttgtccgtggcttccatgtttcgtcaaatatatataccgtggtccgtggcctgtgttagcaatagcgtggaggagaagggaagaggagacgaagaaaggagaggaacacgggaagcgcgtgcaggtggtttgcgacatccaatccaacactgctctggtgcgagcagcagccagccacttgtattgtcccccgagccacgctacagcctacagctggactgccggaggcgtcgcaccagcaagagccgcgcaaaacatgtcagtgtcactgcctcactggcttcctgcatcgcttcgctccggtagttagtgcgacggtgatcgctggggcaagcgtatgcgtgtcttcttactgtgctgctggttggatttgcacgccaaatatgacgtggacgcctatcacatcagcacatgtataatagtctgcaacacttatatagccacatactccatgtaatgtccagcttttaatcaccctgccctaaagcttgggcattaactaatgcaagcatcgggttcactgtatc

SEQ ID NO: 110163 - DNA, 1549 bp, Zea Mays
ccacctccaagcagagaaaacaaaagttccgggggaaaaaattacgcgctgccaatcaggtgaggtgagcaaaggagaggagggtggaggaagacgaagaggacaagaaaaaaacggcagcggcagcggcagcggcaggaacagcaacatcaagccagcaacaaatatgatttggtgaggttgaagttgaaccatccgtgaggtggcccgtcccttttcccctcagcttctccacctcgcgcctatagatccctctcccccattacacctcaccgccaagctcacggagtagcagtgacaccgcagcttccaagaaccgccccccggcctgcggagcagagcagagcaatgtcttccaacggcaagcccaccccgcagcccccggcgggcggcaacggcccgcccaagatgtaccagcggcccatctaccggccgcagcaggcgcccgccaagcggcggcgcggcgggcggtcctgcccgttcagctgctgctgctgcttcttctggacggcgctcgtcgtcctgctcctcgccttcctggccgcagtggcgggcggcgccttctacctgctgtaccgcccgcagcggcccgcgttcacgctgaccgcggcgcgcgtgacgaggctgagcctgtcgccgtccgccacggcgcccgcgctgagcgacgccatcgacgtgacgctcacggcccggaaccccaacaggaagctcgcctacctctacgacgacttcgccgtgacggccgccacggccgccaacgccgtcccgctgggcgaggcctccgcgcccgggttcgcgcacggcgccggcaacgtcaccgtcatccgggccaccgtctccgcgtccgcgctcgcggtcgaccccgccgcggccgcctccgacgtcaagaggtccggcgagttcaccatcgctctggacctggagaccagggccggcgtcagggtgggcgcgctcaagactaagaagatcggcatcctggtgcactgcgacggcgtcaaggtggccgcgcccgcgcccgcgcccgcggcgccggccaagagcaagaagaagcttgcgaaggcggcggtagcggcagcggtggcgccggcggccgacgccccggcacccgccgcctccgcggctgtcgacgacgcgccggcgccgcccgccgcggccaccagcgtcgcgcgcgtgtgccaggtcaggatccgggtcaagatctggaagtggaccttctagtcacgtcggcagcctccgaggggccgcattgcaattttttcgggtataaaatggaaaatatggcgttgcttttcgcgtcggatgaagtttctcaactggaaccgaaccaaataccggtcgctgtaatttttttttgtgcttgaattttaccaaaaatttggcgggggaggtcgagaggcaggaagtgacttgcgtgctcaagccagtcagaggaggctatacatttctgttctgtagtgtgaggttttcttttttgtttttgtttttttttgtagtgccgtttcttcattttcattcatcttgctgtaggagtgcacggcggcactgggga

SEQ ID NO: 110164 - DNA, 605 bp, Zea Mays
agtagcgccgacccggccgcgataaccccacccaccaaccaaccgcctcgcgtgtctctctcaatctccgtgcgagcgcggccggcggttgcagcatggaggacgcggaggccggcgcggcgcggaagcggaagaggggcggcgccggcgaggaggccggcgggggcgcgtacgacggcaaggagaaggagctgctgggcgaggacggcgacgacgggcggtacgagggcatcgcggaggaggccgtggcggaggtgatgcggtggctggaggcggagatcgcggacgacagcgccccgcagccggcggcggggttcgtgaccatcaacggcaacgaggagagctgcgggccgtccttctccgccgcggcgtccacggtcatggcctccgtcgacacccgcgccggagcgccgcccccgccgcccgtgccgtggccgtggccggagccggatcccgagccggagcgtgtcgtccccgcgccgggcgtcggagtggacgtggcggcgatggaggtggaggcggggacggggacgggcggcgaggcggccgacgaggagtggctggcgcgcctgctcacctgcggggccctgctggagggcgtctag

SEQ ID NO: 110165 - DNA, 106 bp, Zea Mays
gaatcggtagtagtcattgtcattgtcaggatgatgccgtctttgatcccggtaatctacgcgtaacgaaaccatgtggtctcctcctttccctcaaggaaaaggc

SEQ ID NO: 110166 - DNA, 1865 bp, Zea Mays
ctcctctcccaccgctcggcctcctccaccacacgcgctcggcggtgccctccccggcgcggcgccgaaatgcaggtggggcctcgtcggcttcccgcggctgcgacgggccggagcagctaacgccgcggcctggggctgtgatctggggccgcgccgcattgccgactgcctgccgccgggctcgcgcgcgcagttcctgcctgccggtggcgaggggaggcaagatgcggcatctcgctctcctcgcgcttcttctcgctcccgttctcggatccacaggcaccactctgtccccttctccggccgccactgattctcctgcaaaccaaggacaggcttctagtcctcctcaatctgcatttgctcttggtccagtagctgttccaactgcgccgaccactccatcggcgagtccttccccggagaaagccgcggctgtaagtcctgctgctcccacggagccacgaattgccccggctccagtggctcctcctaaagagtatagtgcacctcctccagttgaggttgcacccactgatcccaccgatgaggttcctccaccagtagctccaccacaagctgcagttggaaatcccactccaattcttcctgggacacctgcattgctaccttatgttcaggctcctgctccatctgtcgttctcaagcctaatccaccagtcgtggtgtcacctccacctgcgaataatcaaccaagtaggccggttgggtctgtccctccttatccaccccctgcatcgccccctccggcaaatggcattccaccatacccaccttcaggaaggtttcctgctattcctcctgccacttcaggaaacgcagtgccgccagcaaatacttaccctcctacaaatctcaagaagcatcatgttccacatgcatcccctccaaagggatccactggtcaaactgtcccaggtcacaaatcaccagttacaggatctgcgcctgcaacaagtcctttgccccagaacacaaacatgccttcaatcccgaagaatgcttcatcagtgccacatgcccatccctcaccaccaagtatagctccagaattggcacccactggtagatctcatgctcagggatggaaatccagtaatcccaataacaaaacaaatagattacatgccccatcttatccaccgcctcgtgctcaagggcccgaggtctcacgaaccccaagacagactgggactaaaaactatactcaccatgcgcctccaccattccctcaagaactgctggattccacaggaaatcatatttctcctactcttccttcaatccctcccctaccagagccaaaagcaccgtcagcgcatcctatttggacattacctccaccaccacctaattcagattgcaattccttatcatgcccagagcctctaacagatccacctgcgggagcaccatgtgcatgtgtgctaccaatcagagttggaattcgtctaagcgttgacctttactcattttttccattggtctctgattttgctgaagaggtagcttcaggggtaaacatggcacagaggcaggtccgtgtaatgggtgcgaacgttgcaggtgatcaacctgacaaaacaatggttcttgttgatctagttccagtgcaagtgaagttcgacaatgctacagcattttcagcatttgaaagcttgtggagcaaaaaagtttctttaaaaccatcagtctttgggaactatgagattctctatgttgtatatccagggcttcctccttcaccaccttcagggcaaggtgttggggatggggcgtttggcaacaacagaaatgcaagggccgtgaagccccttggggtcgatctctttgattcgtag

SEQ ID NO: 110167 - DNA, 2459 bp, Zea Mays
ctttcccggcgcccccttcctcctttctggctcgctagcctcgctccgcttcgcttcgacttggacttcgtcgcgccttccccgccatctccggcgaccggcgccacagccaatggagcccatggacagccagctcacggctctcgcgctctccgactccgacagcgcctccgtcgagggcgccgcagctgacgcggcggacgccgacctgcaggcgctccgccgcctctccgacaacctcgcggcggcgttccgctccccagacgacttcgccttcctcgccgacgcgcgcatcgtggttcccggcgcgcccgacctccgcgtgcaccgctgcgtgctctgcgcgcgcagccccttcctgcgcgacgcctttgcgcgccgcgccgccagcgccggcgaggaggagaaggacaaggacagttacatgtgcaaggtggagctccgggatctcctcggagacgaggtcgaggtcgggtacgacgcgctgcggctggtgctcgactacctctacagcggccgcgtcgccgccctgcccaaggcggcctgcctctgcgtcgacgaggacgcctgcgcgcacgtcggctgccgccccgccgtcgccttcatggcgcaggtcctcttcgccgcgtccaccttcgacgtcgccgagctcaccaatctcttccagcggcggctccttgatgtccttgataaggttgaagtggacaacctcccattggtcttatctgttgccaacttatgtagcaaatcttgtgtgaaactgcttgagaggtgccttgatgtagtagttcgttcaaatcttgatatgattgctcttgaaaaaaagttgcctccagatgttgtcaaagaaattgttgatgcaagggtaagccttggattagtttcaccggaagacaagggcttccctaacatacatgtaagaagaatacacagagcactggattctgatgacgtggagctagtccggatgctactcaaggaaggaaaaactaatcttgatgatgcatatgcattacactatgccgtcgaacattgcgactcaaagatcacaacagaacttctggatctcgcgcttgcagatgtcaatcataggaacccaagaggttatacggtccttcacattgctgctatgagaagggaacctaaaatcattgtctctcttttgaccaagggagctcggccatcagacctcacatttgatgacagaaaagcagtgcagatctctaaacgacttacaaagcatggggattactttgggcctactgaggacggaaagccttctcctaaagatagattatgtattgaggtactagagcaagctgaaagaagggacccgcaacttggagaagcatcagtttctcttgcgatagaaggagactctgcgcgtgggaggctactctaccttgaaaaccgagttgctctagcaagaatactgtttcctatggaggcaagggtagcaatggacattgctcaagtcgatggaacactggaattcacccttgtttctagtgtgaatctgcctgccgagatacaacggacagttgacctgaacgatactcctttcacaatgaaggaagaacacctggctcggatgagagccctatccaagacagtggaagtcgggaagcgtttcttcccgcggtgttcgaaggtacttgacacgatcatggacgacgaagccgagatggcttccctcgggcgagacacatccgcggagaagaagaggaggttccatgacctgcaagacctggtccagaaggcattcagcgaggacaaggaggagaacgacaggtccgcggcgcggtcaccttcctcctcgtcgacgacgacgacgtcgatcggggccgtccggcctcggaggtgaaagggaaaacatgcatgggttctgtttccgtcccgccattttggtagccgatgcggtggccacatagagaccgtaatcatgctcacttttgctggcgtatagcattaatgcagaacacgtatactaactaactatataatatacgagtaggtgtagatcggtactggaggttgtaatggcagtagcgaaacatagtgcattctggcgggcgtgtgtgtcgagcaggtagctggctgctcttgattgtaatggcgttttgagcagctaactaggatccctcttcacttcactcgaaaagggtctggcatggcttgtggaattgtggtgtgctggatagtgtcaggttcagtgtcgcaaaccctgaagaaatgcaaacatgtagtgctgcactatctaccaagagccaaggggaagtgtttgtcagccgttggtgtatgaatggatggcacaccttaatttcacttttctactacgctaatagctaatgactgagactgtaattttgacacctgtaattactaccggaagtagcgattcggtgcgccggattataggaagaaaaaagaagaaggaaaattcacatccttaaacttgc

SEQ ID NO: 110168 - DNA, 2185 bp, Zea Mays
cttgctttcgtccccgctgttgctttatacaagtgacactgatttgcaggcatggccatttactgttcttgcttagtacttcctccgtttcgtcttacaagtcgtttccaacagctttgtacagattaaggaatctatgaattgactattttgccctcccacaagcctccgcttaggccttggcatttcgtccaaccttagctggtaaacacctgctggaagggcaaaaatggtagtttactttttactttaactagagcgacaactattatgactcgttttgttttgcactagcggcgacaactaaaacgaaacggagggagtatctactagtgtgttacgaaattttctgttttaacatgccattactaagccaagtgattctctccacagcggcggctccttgatgtccttgataaggttgaagtggacaacctcccattggtcttatctgttgccaacttatgtagcaaatcttgtgtgaaactgcttgagaggtgccttgatgtagtagttcgttcaaatcttgatatgattgctcttgaaaaaaagttgcctccagatgttgtcaaagaaattgttgatgcaagggtaagccttggattagtttcaccggaagacaagggcttccctaacatacatgtaagaagaatacacagagcactggattctgatgacgtggagctagtccggatgctactcaaggaaggaaaaactaatcttgatgatgcatatgcattacactatgccgtcgaacattgcgactcaaagatcacaacagaacttctggatctcgcgcttgcagatgtcaatcataggaacccaagaggttatacggtccttcacattgctgctatgagaagggaacctaaaatcattgtctctcttttgaccaagggagctcggccatcagacctcacatttgatgacagaaaagcagtgcagatctctaaacgacttacaaagcatggggattactttgggcctactgaggacggaaagccttctcctaaagatagattatgtattgaggtactagagcaagctgaaagaagggacccgcaacttggagaagcatcagtttctcttgcgatagaaggagactctgcgcgtgggaggctactctaccttgaaaaccgagttgctctagcaagaatactgtttcctatggaggcaagggtagcaatggacattgctcaagtcgatggaacactggaattcacccttgtttctagtgtgaatctgcctgccgagatacaacggacagttgacctgaacgatactcctttcacaatgaaggaagaacacctggctcggatgagagccctatccaagacagtggaagtcgggaagcgtttcttcccgcggtgttcgaaggtacttgacacgatcatggacgacgaagccgagatggcttccctcgggcgagacacatccgcggagaagaagaggaggttccatgacctgcaagacctggtccagaaggcattcagcgaggacaaggaggagaacgacaggtccgcggcgcggtcaccttcctcctcgtcgacgacgacgacgtcgatcggggccgtccggcctcggaggtgaaagggaaaacatgcatgggttctgtttccgtcccgccattttggtagccgatgcggtggccacatagagaccgtaatcatgctcacttttgctggcgtatagcattaatgcagaacacgtatactaactaactatataatatacgagtaggtgtagatcggtactggaggttgtaatggcagtagcgaaacatagtgcattctggcgggcgtgtgtgtcgagcaggtagctggctgctcttgattgtaatggcgttttgagcagctaactaggatccctcttcacttcactcgaaaagggtctggcatggcttgtggaattgtggtgtgctggatagtgtcaggttcagtgtcgcaaaccctgaagaaatgcaaacatgtagtgctgcactatctaccaagagccaaggggaagtgtttgtcagccgttggtgtatgaatggatggcacaccttaatttcacttttctactacgctaatagctaatgactgagactgtaattttgacacctgtaattactaccggaagtagcgattcggtgcgccggattataggaagaaaaaagaagaaggaaaattcacatccttaaacttgc

SEQ ID NO: 110169 - DNA, 737 bp, Zea Mays
ggcctctctgctcgctcagctctggccagcggaggagaagaagagagtccccgtgacgaccgtgagtgaccgacctctgccgtggggcgctggcagccatttgcttgctgccgtcgttgcgcgatgagcgcgggtgcagcccggtccgtgctcgtcgtcgtcttcttcgccctgcctcttctcgtctccatgacccacggcggccaccagcagccggcgcatgtcggagcggacccgcgctcaccaccgatcgatggcggcgagcacgcagagcagcggcagcagcttagcaggctgggctccaggccgccgtgctgcgaccgcaagtgcggcgcgtgcgcgccgtgcaaggccgtgcaggtgcgcgccggcgccggcgccgcggcggagcgccgcctccgcccgcgctgcgccaactacgagcccgtcgggtggaagtgcaggtgcggcgccgccgtcttcgacccttgacgtggctagctaactgcccgctacgtacggctgccagctccagcttcgaccagtccgtggccctgctgaattgtaatcgtcgcatgcacacgctggtgacgctgctgcctgctggatggtagcgagcatgtgggcttgtttgcgtctgcattagacttgtgctacgccacacttgtgtacgtagacgtagcctgcatactactcccaccgcatgtctatctgcaacacgattgtgggtttgtgacaatgaattttgcttagatttt

SEQ ID NO: 110170 - DNA, 828 bp, Zea Mays
ggcctctctgctcgctcagctctggccagcggaggagaagaagagagtccccgtgacgaccgtgagtgaccgacctctgccgtggggcgctggcagccatttgcttgctgccgtcgttgcgcgatgagcgcgggtgcagcccggtccgtgctcgtcgtcgtcttcttcgccctgcctcttctcgtctccatgacccacggtgagctgaggcgccctccgtttcgccttaaacgcttcccttgtgtctctgcacctgatgaaagaagcagtgttgccaacctgctatgcaggcggccaccagcagccggcgcatgtcggagcggacccgcgctcaccaccgatcgatggcggcgagcacgcagagcagcggcagcagcttagcaggctgggctccaggccgccgtgctgcgaccgcaagtgcggcgcgtgcgcgccgtgcaaggccgtgcaggtgcgcgccggcgccggcgccgcggcggagcgccgcctccgcccgcgctgcgccaactacgagcccgtcgggtggaagtgcaggtgcggcgccgccgtcttcgacccttgacgtggctagctaactgcccgctacgtacggctgccagctccagcttcgaccagtccgtggccctgctgaattgtaatcgtcgcatgcacacgctggtgacgctgctgcctgctggatggtagcgagcatgtgggcttgtttgcgtctgcattagacttgtgctacgccacacttgtgtacgtagacgtagcctgcatactactcccaccgcatgtctatctgcaacacgattgtgggtttgtgacaatgaattttgcttagatttt

SEQ ID NO: 110171 - DNA, 2117 bp, Zea Mays
atgcttggcccggcttccctccatttcgaatttcaaaacccccagcgcctcctgcctgcgcagtgcccacccacccgctcccactccaaaggctccaaagccaaagcaggcgcacgcgccacgcgcacctctgtctcgtctctcgcccgctctccactcttcctcccaaagcctgccgccgcgtggggggttgcttgcttgctgcccgctcctctccctgctcctgtgtctctgccgcccaccgcttccgggaacaagtccggttgccgccgccgccgctctgtgcgagaggagggagggacggagcgggatgggagggtccgggaagtgggtcaagtcgctgatagggctcaagaagcagcccgagaaggaagactgcaagatgagcaacgtttccgtgcctgcccaggacaagctgcagctcccatcagtccacggcggaggattgcgaggcaagggccgcaggtggaagctgtggcggacctcctccggcgaccagggctccatgtggcgcggctccagaggcggcagccagcgctcggcggcgtcggaggcctcggacgacgcgtcctcggtggccgccgtccccgccgacccgttcacggccgccgtcgccaccgtcgcccgcgccccggccagggacttcatggccgtccgccaggagtgggccgccatccgcgtccagaccgcgttccgcgggttcttggctcggcgggcgctccgggcgctcaaggggctggtgcggctccaggcgatcgtgcgcgggcggcaggtgcggaagcaggcggccgtgacgctgcggtgcatgcaggcgctggtgcgggtgcaggcgcgcatccgggcgcgccgcgtgcgcatgtccaccgagggccaggccgtgcagaagctgctcgaggcgcgccgcacccagatggatatcctcagggaagccgaggtctcaattgccttctccttttctacaagatgattctggcctggttctcaaacgcatcgggtagaagacgaacagaccctcattgctgctgtaatctctctctttcccaggaaggatggtgtgacagccagggaacacttgaacaagtgagggtcaagctgcagaagcggcaggagggcgcaatcaagcgtgagcgggctatcgcctatgcatattcgcagcaggccgacggtgctgccaaatgcaatccaccgaagcttacttccaatggactggtgaaccactccggcatgctgctcaagcaccagaacttagacaagggcaacggcaactggagctggctggagaggtggatggcagcgcggccatgggagaacaggctgatggaggagcacaactccagctccccggacttccggtcctccaagaactgcgaggactcctttggtgtgctcggcgacttctctgaaccgaactcagtgaaggtgcgcaagaacaatgtcagcaagcgggtctgcgcaaaacctccagggccaacacacgcccacggacatcatcagcgcctcaaggcccagtcgatctcgtctctgagcactgagctgcacaacgacgagagctccgcgtcctcctcgtcttgctttgcgtctacccctatatcattcacacttgtggcttcggagaagacagaggacagcgtcaggacgagacccaactacatgagcatgacggagtcgatcaaggctaagcagaaggcatgcagcgcccagaggacggtggcgctgaagcaatgtgatgataggaaagccatgagcgccgagctgaaggtcgctcaggtgtgactgtttcgtggaactccatgcagagatagatggagccgacttcgacatcctctctatgctaggatgttttgcttggtgtcttgccacattcttgagtggctcggtgctgcattcctgagttgtcctcctgttgctgggtgtctgattgttcaacttcttgttgtcagattgcatctttgttcactcattgtggctgcatctttgttcagccgttgtggctttgtcagtggtagagtctctgtaagatagttctttgagtagacaacattgtggatttctttcctgggtgttgatttcaggtcaaaaaagacaggataatttacaacgtcctgcttcccaagata

SEQ ID NO: 110172 - DNA, 2109 bp, Zea Mays
atgcttggcccggcttccctccatttcgaatttcaaaacccccagcgcctcctgcctgcgcagtgcccacccacccgctcccactccaaaggctccaaagccaaagcaggcgcacgcgccacgcgcacctctgtctcgtctctcgcccgctctccactcttcctcccaaagcctgccgccgcgtggggggttgcttgcttgctgcccgctcctctccctgctcctgtgtctctgccgcccaccgcttccgggaacaagtccggttgccgccgccgccgctctgtgcgagaggagggagggacggagcgggatgggagggtccgggaagtgggtcaagtcgctgatagggctcaagaagcagcccgagaaggaagactgcaaggacaagctgcagctcccatcagtccacggcggaggattgcgaggcaagggccgcaggtggaagctgtggcggacctcctccggcgaccagggctccatgtggcgcggctccagaggcggcagccagcgctcggcggcgtcggaggcctcggacgacgcgtcctcggtggccgccgtccccgccgacccgttcacggccgccgtcgccaccgtcgcccgcgccccggccagggacttcatggccgtccgccaggagtgggccgccatccgcgtccagaccgcgttccgcgggttcttggctcggcgggcgctccgggcgctcaaggggctggtgcggctccaggcgatcgtgcgcgggcggcaggtgcggaagcaggcggccgtgacgctgcggtgcatgcaggcgctggtgcgggtgcaggcgcgcatccgggcgcgccgcgtgcgcatgtccaccgagggccaggccgtgcagaagctgctcgaggcgcgccgcacccagatggatatcctcagggaagccgaggaaggatggtgtgacagccagggaacacttgaacaagtgagggtcaagctgcagaagcggcaggagggcgcaatcaagcgtgagcgggctatcgcctatgcatattcgcagcaggccgacggtgctgccaaatgcaatccaccgaagcttacttccaatggactggtgaaccactccggcatgctgctcaagcaccagaacttagacaagggcaacggcaactggagctggctggagaggtggatggcagcgcggccatgggagaacaggctgatggaggagcacaactccagctccccggacttccggtcctccaagaactgcgaggactcctttggtgtgctcggcgacttctctgaaccgaactcagtgaaggtgcgcaagaacaatgtcagcaagcgggtctgcgcaaaacctccagggccaacacacgcccacggacatcatcagcgcctcaaggcccagtcgatctcgtctctgagcactgagctgcacaacgacgagagctccgcgtcctcctcgtcttgctttgcgtctacccctatatcattcacacttgtggcttcggagaagacagaggacagcgtcaggacgagacccaactacatgagcatgacggagtcgatcaaggctaagcagaaggcatgcagcgcccagaggacggtggcgctgaagcaatgtgatgataggaaagccatgagcgccgagctgaaggtcgctcaggtgtgactgtttcgtggaactccatgcagagatagatggagccgacttcgacatcctctctatgctaggatgttttgcttggtgtcttgccacattcttgagtggctcggtgctgcattcctgagttgtcctcctgttgctgggtgtctgattgttcaacttcttgttgtcagattgcatctttgttcactcattgtggctgcatctttgttcagccgttgtggctttgtcagtggtagagtctctgtaagatagttctttgagtagacaacattgtggatttctttcctgggtgttgatttcaggtcaaaaaagacaggataatttacaacgtcctgcttcccaagatagctctttgagcagaaaacattgtcggtactatgctgatgctgtggtcttaactggaagctggagccagtgtgctaaactattgcaatggttaatttccatctgacctcataatgtgaggtacttataat

SEQ ID NO: 110173 - DNA, 1418 bp, Zea Mays
cacatttccacccccgcgacacatgacatgacgtttcttgttttgtttgcgccggtactggacggaggatgcgagattcgtgacgggttttcgcgtctttgttcgtggttgctgaaggctcggcgggcgctccgggcgctcaaggggctggtgcggctccaggcgatcgtgcgcgggcggcaggtgcggaagcaggcggccgtgacgctgcggtgcatgcaggcgctggtgcgggtgcaggcgcgcatccgggcgcgccgcgtgcgcatgtccaccgagggccaggccgtgcagaagctgctcgaggcgcgccgcacccagatggatatcctcagggaagccgaggaaggatggtgtgacagccagggaacacttgaacaagtgagggtcaagctgcagaagcggcaggagggcgcaatcaagcgtgagcgggctatcgcctatgcatattcgcagcaggccgacggtgctgccaaatgcaatccaccgaagcttacttccaatggactggtgaaccactccggcatgctgctcaagcaccagaacttagacaagggcaacggcaactggagctggctggagaggtggatggcagcgcggccatgggagaacaggctgatggaggagcacaactccagctccccggacttccggtcctccaagaactgcgaggactcctttggtgtgctcggcgacttctctgaaccgaactcagtgaaggtgcgcaagaacaatgtcagcaagcgggtctgcgcaaaacctccagggccaacacacgcccacggacatcatcagcgcctcaaggcccagtcgatctcgtctctgagcactgagctgcacaacgacgagagctccgcgtcctcctcgtcttgctttgcgtctacccctatatcattcacacttgtggcttcggagaagacagaggacagcgtcaggacgagacccaactacatgagcatgacggagtcgatcaaggctaagcagaaggcatgcagcgcccagaggacggtggcgctgaagcaatgtgatgataggaaagccatgagcgccgagctgaaggtcgctcaggtgtgactgtttcgtggaactccatgcagagatagatggagccgacttcgacatcctctctatgctaggatgttttgcttggtgtcttgccacattcttgagtggctcggtgctgcattcctgagttgtcctcctgttgctgggtgtctgattgttcaacttcttgttgtcagattgcatctttgttcactcattgtggctgcatctttgttcagccgttgtggctttgtcagtggtagagtctctgtaagatagttctttgagtagacaacattgtggatttctttcctgggtgttgatttcaggtcaaaaaagacaggataatttacaacgtcctgcttcccaagata

SEQ ID NO: 110174 - DNA, 3295 bp, Zea Mays
cagaaacgcaaaccggccaccccgcccgcactcgccgccccatctcttccgctcccgtcctctccgatccatccacgacgcgggaaccagcctccgaacagcagcttcccgccgccggcccccaagcctctgcgggcgtggttgcgtctccgcggtggcgccaccggagcggctcttgcgtccgagaggcgccctcgtgcgcgcgattttggccagatccgaccagcaatatttgtcgattctgaacaagcaccgtttgatgggcccggcaaagggttctcgaacaattaacaagaccatagtaaaaggatatgaagatcaacagcagcatgatgacccatctagttcaagcaaagctaaacagaaaaagaggaaaatttcagatttagatcccaaatggagcaaggatgaacttacacgcttttatgaagcctaccgtcaacatgggaaggattggaaaaagatcagcatagcgataggcggtaagtcgtcggacatggtgcggtctctttacagtgcacatcggactttcttatctcttccagaacatcaagctactgccatggggtttatcgcgctggtgactggtcatcacaatgcttcggagaaaaccacgagtcatagaggatatgatcacatagccagagcatctggaaaggcaaggaaacatggagaacaacagaaatcaattgatggacctgacctgcacaactgtcatgaaggggaaattactggattttcagcttccttcaaaaaacgatactatggcgaattggtcaggaacagccgaaatcatgctgttcagaggcgtactcctcttataccagttatagctcctgcagacaggagtaccattgatgagcccacaccaggaattgaaaacgtcatcaattttaattctaccaagagaaaatatgaagcggccaatcatggctgtgctgttgctccaacaaataagtactcttcggacagagtttctggattcgctgaaacatgcaaggctgatcaagattttaagaaaacacgaattcagcaaactgtggaggaaagtcagactggtatagttgagcatgagacaacgatggcatctaaagaagggaataagctagtctcttctgtaaacaacaatcagatacttatcgacagtatttctgaagatgatatgttggtcttggatgtattgaatagcctggtgaatgcaccctctaaaatgtcagaactagagattaatattccttcaggttcgcttggaaaaactgactctgtgttaagggaggaaggccaccctaccattgatctgtctaaacaagggaagccagttcgtaaatccagtgcttccaagactaggaagaaaaaacataagaagatattaggtgcagaggtgcctgctgaagcacaaaaaaaatgtgacgataatttagtcctgccggaaacactgagggttggtatcactgatgattcttccttgtgtactgactctggaagagcgaggacaccggaagcatctgaagatatttctgctgaagtccccaatacacaaacagaagccaagcctgaatttataatgtctggaaggaccaggttgaaatctcagatgcattgcaaaacaaagcctatgtcgtgcaatgaaggttcagataattttcaggcaaagaagttgctgcactgtttgtcatctgaaccacttcgtagatggtgcacatatgagtggttctacagtgcagttgattatccatggttttcaaataatgagtttgtgcactacttagatcatgcaaaattgagtcatctttcaaggttgactagatcagaatggagcgcgattcgaagctcccttggtaaaccgcggcgattttcaaatcattttctggcagtggaaaaagaaaaacttgaggattatcgggagaaagttagaaaaatctacgctcaactcaatgatggttcacgggattctctacctgcagacctagctaggccattttcaattggtcagcaggttattgttcgtcatccaagttctagggaactttgtgatggcaaagtggtgatgatggggccggattgttacaaggtccattttgatgatcctgaccttggtgttgatactgtgaaggacactgattgtatgccagttaattggctgcataatcgtcctgacaacatgagaaggaactacctttcaaatgatgtgtacaacatactggagatggatcacattcctgaccttacaccaagtgagaaccggaatcatgctataaatggaactactgtattcgaggagctcaaaagtctgcgcttaacatcagatagacagcctaaggcagaatctattatacatagtgaacggccaccatataggagtacatctgatggccctacaagttctagtggtttctcttgcccagacaataatgctggtcacaacggtgaactagagtcatatgtagctgcattttttgaaaactcactatcacaagccaggcagatggttgacgaagccatccaggcaaactctggtggtagtgatgatgaaaaggtatgcatgttaaatcaagtgacaggatgtctaggctcagattctcgtggcgtgcaacttccatctgacctgatatcaaactgcatcgcaacggttatttcaatcaagcgccttagcgactcgcgacatccatttggtaacgtagcaggcgtcttggagcatgctttatcaatgctgcgtccaagctgtccacagaacctcggagtttacacagaaataaagagagacctttgcaccatagcgaaccagatttttgcacttgtgccaacagcatcgggcaattgcagccctcctgtctcgcccatgtaactgggacctgccccggatagacccgttgccttcttgcaggccctgcagtagacacgctgcttcctctgctgtgagttcaaaacagaggttttgctgctgttggagcttgatgttatgaagtccggttgaatggtagcatacggaggacgcaagtctgatgtgctgacttgagcttgtatatgcagcgtgcgatcattaattggctagcctccttgtaacctgtgtatatacctgaatgaataatttataggtccatatacagattcaggatagttaatatctgatacagtagtgaataaagatgtatttctgcagtcatgattctcgtcttctcgatgtaatgtcacaggaacgtttcttgataggaaatttacataataatattaaaatgagcgagccaagagttcaagacccgttcgctgtgaaccgcgacaggtttccttagtgcct

SEQ ID NO: 110175 - DNA, 1844 bp, Zea Mays
ggcatgcttgatttatgatgtattttttgtattcatactttgggtcgtattttcctagaacttggtgagcatttgctagttattcacaaacttttgcgttcatgtgcttgagaattttaatgacagtctgatgctatgttacatacatacctaaacttatttggtttcaggacactgattgtatgccagttaattggctgcataatcgtcctgacaacatgagaaggaactacctttcaaatgatgtgtacaacatactggagatggatcacattcctgaccttacaccaagtgagaaccggaatcatgctataaatggaactactgtattcgaggagctcaaaagtctgcgcttaacatcagatagacagcctaaggcagaatctattatacatagtgaacggccaccatataggagtacatctgatggccctacaagttctagtggtttctcttgcccagacaataatgctggtcacaacggtgaactagagtcatatgtagctgcattttttgaaaactcactatcacaagccaggcagatggttgacgaagccatccaggcaaactctggtggtagtgatgatgaaaaggtatgcatgttaaatcaagtgacaggatgtctaggctcagattctcgtggcgtgcaacttccatctgacctgatatcaaactgcatcgcaacggttatttcaatcaagcgccttagcgactcgcgacatccatttggtaacgtagcaggcgtcttggagcatgctttatcaatgctgcgtccaagctgtccacagaacctcggagtttacacagaaataaagagagacctttgcaccatagcgaaccagatttttgcacttgtgccaacagcatcgggcaattgcagccctcctgtctcgcccatgtaactgggacctgccccggatagacccgttgccttcttgcaggccctgcagtagacacgctgcttcctctgctgtgagttcaaaacagaggttttgctgctgttggagcttgatgttatgaagtccggttgaatggtagcatacggaggacgcaagtctgatgtgctgacttgagcttgtatatgcagcgtgcgatcattaattggctagcctccttgtaacctgtgtatatacctgaatgaataatttataggtccatatacagattcaggatagttaatatctgatacagtagtgaataaagatgtatttctgcagtcatgattctcgtcttctcgatgtaatgtcacaggaacgtttcttgataggaaatttacataataatattaaaatgagcgagccaagagttcaagacccgttcgctgtgaaccgcgacaggtttccttagtgcctctgtacattgggacaggacataaattattcgatcctgatcgtacatacacacatttgggaacacgtattttatcaaataaatttgtgtcggcctggtaccttcacagtatcaacacaaatttattcttcctaattcctggacaaagaaatttacggatgataacaacacaactgcttcatcctcaactgtgttcttaacagaacatcatccttgaatcctgcaattacggtcattagatcctaattatgtcaaacgacactcaattcatagctcaattagagtattagaaaagagaaatttctcaagaataaactaacctttaatcagtatagtacaagagcaaggatttttcacattccccacaaatgtgtacttttcttctacgagaacatactcatagacaagatcagatgagcctagacaattttcagtcaagtcatcaactgaattgatagctccaccaccacgtgatagctcgaagagcaataatc

SEQ ID NO: 110176 - DNA, 186 bp, Zea Mays
acccggctctttgtgggcgcctcaacgaggaagtagggcaccttggtggtgtgaccgaacctcgggatatatcttgtgtctgttttgcgtctgcaggctcgttactagcagaatttttttgccctgtcatagcagagcatgtgccccccattttttgctttcctacagcagatggcagactctcgg

SEQ ID NO: 110177 - DNA, 1687 bp, Zea Mays
cttgctcgcacgccacatccacagaatccatctccagatgtcagcctccggcgaccccctggacgtcctcccggcggcggtcctcgccgacgtcctgggccgtgtagctgacgccggagacatcgcggcttgccgcctggcctcgcggacgcttctcgccgcgtcctacatctgcccccgcgttcgcctctgcgccgccgaccgcgcccgccgccggcgcgagggcggtggtggttcccccgctttccgcgcgaccactgcaaacctcgcctcgcttctcgggcctcacctccggtccctgtcgctcgacacggccggcggtcagggttcccccgatgacgcgatgtgggtggaggagggagagttcgatgaggccgacggcctgcatctcacctgcggcgaggccgtggcggcctgggcgacgacctccgccggaacggtcctccgggagcttgatatcgccgactactggccgcaagcgtgctggcggaaggccgaggcgctccccctcatctcacactactgtatgcgagcttttttttaaggagattacctctggttatacgcgagttctacagatactactgcatgcaaggtcaaaatctcgtcaagttgtgccttaaaaatgcatggctttctgttgacaggctcaagaaaatgccaaatctgacttatctgacgcttgagttcattagactggatgatgaagacctcaaccaattgaatgaatgttttccttgccttcacacccttaatcttataggagtcggagggctcaaggaccctaagatccaccttcttcaactaaaggcttgctgctgggaggtatcaaatgtcccacggtctttggttgtccatgcaccagacttggtttttctggagttgaaatgtatcagaccagatacactcattttggacactccatccttgtctactctaaagctcaccattgataaacttggtgcaactgcccgagttgatggccttctgcgtttgtcgaatcttcgcatagaatcactggattttagttccctttttccagcattcatggacaatcaagctatcaggacattggagctcgagctacctgagtcttcaagtcaatatgaacttcttgaagcagttaacccggattatcttctaagacggctagccagctttagtgaagtcaagctgggcccaagattttcacgtgaactgaaactatgtcttgcccaatacaaagatatccagtttggaagttgcctgaagaagctcctaattcatgtcccacaatcagggagttgtttccatctcatgcccctgtttgagatctgtgcacctttgtgtgaggtgactgtgcttttccacgctgaatcagctgatgctgtccgtcgtcaagatgcaatgtcgatttgtatgcagaacttcccagagatcagatggcagtggggtacctggcagtagtaatactgtctatatatgcatattcgtacttgtaggcatattggttacataactgaaattatctgtgtgactgatacttgtagttttgctaacatagcagccccttctacacgattgggagctggttttgtttgatgacatactgtgcactagcattgtacgctgcaagtatggttgtctctgtttagtccattctatattactatatttcttgttgtctaaatattttacttgttgaaaa

SEQ ID NO: 110178 - DNA, 678 bp, Zea Mays
catccacagaatccatctccagatgtcagcctccggcgaccccctggacgtcctcccggcggcggtcctcgccgacgtcctgggccgtgtagctgacgccggagacatcgcggcttgccgcctggcctcgcggacgcttctcgccgcgtcctacatctgcccccgcgttcgcctctgcgccgccgaccgcgcccgccgccggcgcgagggcggtggtggttcccccgctttccgcgcgaccactgcaaacctcgcctcgcttctcgggcctcacctccggtccctgtcgctcgacacggccggcggtcagggttcccccgatgacgcgatgtgggtggaggagggagagttcgatgaggccgacggcctgcatctcacctgcggcgaggccgtggcggcctgggcgacgacctccgccggaacggtcctccgggagcttgatatcgccgactactggccgcaagcgtgctggcggaaggccgaggcgctccccctcatctcacactactgtatgcgagcttttttttaaggagattacctctggttatacgcgagttctacagatactactgcatgcaaggtttcactctgagagtgtcattttcgtttggtgtgtctgtcttcggttatgccatgcttgattgatgtaaacatatagctgaatatccggcacactaa

SEQ ID NO: 110179 - DNA, 1596 bp, Zea Mays
acagaatccatctccagatgtcagcctccggcgaccccctggacgtcctcccggcggcggtcctcgccgacgtcctgggccgtgtagctgacgccggagacatcgcggcttgccgcctggcctcgcggacgcttctcgccgcgtcctacatctgcccccgcgttcgcctctgcgccgccgaccgcgcccgccgccggcgcgagggcggtggtggttcccccgctttccgcgcgaccactgcaaacctcgcctcgcttctcgggcctcacctccggtccctgtcgctcgacacggccggcggtcagggttcccccgatgacgcgatgtgggtggaggagggagagttcgatgaggccgacggcctgcatctcacctgcggcgaggccgtggcggcctgggcgacgacctccgccggaacggtcctccgggagcttgatatcgccgactactggccgcaagcgtgctggcggaaggccgaggcgctccccctcatctcacactactgtcaaaatctcgtcaagttgtgccttaaaaatgcatggctttctgttgacaggctcaagaaaatgccaaatctgacttatctgacgcttgagttcattagactggatgatgaagacctcaaccaattgaatgaatgttttccttgccttcacacccttaatcttataggagtcggagggctcaaggaccctaagatccaccttcttcaactaaaggcttgctgctgggaggtatcaaatgtcccacggtctttggttgtccatgcaccagacttggtttttctggagttgaaatgtatcagaccagatacactcattttggacactccatccttgtctactctaaagctcaccattgataaacttggtgcaactgcccgagttgatggccttctgcgtttgtcgaatcttcgcatagaatcactggattttagttccctttttccagcattcatggacaatcaagctatcaggacattggagctcgagctacctgagtcttcaagtcaatatgaacttcttgaagcagttaacccggattatcttctaagacggctagccagctttagtgaagtcaagctgggcccaagattttcacgtgaactgaaactatgtcttgcccaatacaaagatatccagtttggaagttgcctgaagaagctcctaattcatgtcccacaatcagggagttgtttccatctcatgcccctgtttgagatctgtgcacctttgtgtgaggtgactgtgcttttccacgctgaatcagctgatgctgtccgtcgtcaagatgcaatgtcgatttgtatgcagaacttcccagagatcagatggcagtggggtacctggcagtagtaatactgtctatatatgcatattcgtacttgtaggcatattggttacataactgaaattatctgtgtgactgatacttgtagttttgctaacatagcagccccttctacacgattgggagctggttttgtttgatgacatactgtgcactagcattgtacgctgcaagtatggttgtctctgtttagtccattctatattactatatttcttgttgtctaaatattttacttgttgaaaa

SEQ ID NO: 110180 - DNA, 1533 bp, Zea Mays
ccataaacgctcgtgggtatgtatctatacccatacccgtacacactaggtatccgctacccgacggatacctgctaaccacccactacaatttctgcattcaacacaaaacaacaatttcatcattccatcagcatcaaacaacaatttcaccaccaaacaacaattttggtattcaagtagcatcaagttattggacgataatacaagcaatatttgtggaatgataatgcacaacattctagcaacaatataatttacccgcgatgagcccaagacttgatcacttgatatgatttctttctatggaagtaaatcgtttgtggcattttgttatatacgcacagatttaccatgttcttgatgaaaaagccatccattatactctgtttaaggtatcttgctgattaatcttgcctgcaatgatctggttctgcgcaggtcaaaatctcgtcaagttgtgccttaaaaatgcatggctttctgttgacaggctcaagaaaatgccaaatctgacttatctgacgcttgagttcattagactggatgatgaagacctcaaccaattgaatgaatgttttccttgccttcacacccttaatcttataggagtcggagggctcaaggaccctaagatccaccttcttcaactaaaggcttgctgctgggaggtatcaaatgtcccacggtctttggttgtccatgcaccagacttggtttttctggagttgaaatgtatcagaccagatacactcattttggacactccatccttgtctactctaaagctcaccattgataaacttggtgcaactgcccgagttgatggccttctgcgtttgtcgaatcttcgcatagaatcactggattttagttccctttttccagcattcatggacaatcaagctatcaggacattggagctcgagctacctgagtcttcaagtcaatatgaacttcttgaagcagttaacccggattatcttctaagacggctagccagctttagtgaagtcaagctgggcccaagattttcacgtgaactgaaactatgtcttgcccaatacaaagatatccagtttggaagttgcctgaagaagctcctaattcatgtcccacaatcagggagttgtttccatctcatgcccctgtttgagatctgtgcacctttgtgtgaggtgactgtgcttttccacgctgaatcagctgatgctgtccgtcgtcaagatgcaatgtcgatttgtatgcagaacttcccagagatcagatggcagtggggtacctggcagtagtaatactgtctatatatgcatattcgtacttgtaggcatattggttacataactgaaattatctgtgtgactgatacttgtagttttgctaacatagcagccccttctacacgattgggagctggttttgtttgatgacatactgtgcactagcattgtacgctgcaagtatggttgtctctgtttagtccattctatattactatatttcttgttgtctaaatattttacttgttgaaaa

SEQ ID NO: 110181 - DNA, 613 bp, Zea Mays
tataggagtcggagggctcaaggaccctaagatccaccttcttcaactaaaggcttgctgctgggagcattcatggacaatcaagctatcaggacattggagctcgagctacctgagtcttcaagtcaatatgaacttcttgaagcagttaacccggattatcttctaagacggctagccagctttagtgaagtcaagctgggcccaagattttcacgtgaactgaaactatgtcttgcccaatacaaagatatccagtttggaagttgcctgaagaagctcctaattcatgtcccacaatcagggagttgtttccatctcatgcccctgtttgagatctgtgcacctttgtgtgaggtgactgtgcttttccacgctgaatcagctgatgctgtccgtcgtcaagatgcaatgtcgatttgtatgcagaacttcccagagatcagatggcagtggggtacctggcagtagtaatactgtctatatatgcatattcgtacttgtaggcatattggttacataactgaaattatctgtgtgactgatacttgtagttttgctaacatagcagccccttctacacgattgggagctggttttgtttgatgacata

SEQ ID NO: 110182 - DNA, 120 bp, Zea Mays
atggccaggattcctcggaggttgtctcggccatgtggtgcccgttccctactcctcgcaggtgtaaaatttgctcaaagatatgctttcaggtttctggatcacagacttagtgcataa

SEQ ID NO: 110183 - DNA, 120 bp, Zea Mays
atggccaggattcctcggaggttgtctcggccatgtggtgcccgtttcctactcctcgcaggtgtaaaatttgctcaaagatatgctttcaggtttctggatcacagacttagtgcataa

SEQ ID NO: 110184 - DNA, 1836 bp, Zea Mays
ccagatcgaccaccgcatcacacagcagcagcctcttgtgctcctctctgtcctttgcttgctcatccctcgacctcgagcggcggcggcggtcactgcactgcgtgtgcgtatccatccatcttgcaggcatcgtcgtctgcaccgcgcgcttgtgcgtgagccaagggcggcagaggcgatgggtggcaagctgttgctgggcgcgagccagagccgccacgcgcacgcggtggcgtcgcctcccctgtcaaaggtggccacttccggcctccacggcgaggactcgccctacttcgccgggtggaaagcctacgacgagaacccctacgacgccgtctccaaccccggcggcgtcattcagatgggcctcgccgagaaccaggtgtccttcgacctcctcgaggggtacctcagggaccacccggaggccgcgggctggggcggctccggctccggcgtcgccagcttcagggacaacgcgctgttccaggactaccacggcctcaaggccttcagaaaggcgatggccaacttcatggagaaggttaggggcggcaaggcccggtttgaccccgaccgcatcgtgctcaccgccggcgccacggcagctaacgagctgctcacgttcgtcctggccaacccgggagacgcgctgctgatccctactccttactatcctggtttcgacagagacctgcggtggaggacgggggtgaacatcgtgccggtgcactgcgacagcgccaacgggttccaggtcacggccgccgcgctccaggcggcgtacgaggaggccgaggcagcggggacgcgcgtccgcgccgtcctgctcaccaacccgtccaacccgctgggcaccaccgtgacgcggccggccctcgaggacgtgctcgacttcgtggcccgcaacaacatccacctcatctccgacgagatatactccggctcggtcttcgcggcgccggacctggtcagcgtggcggagctggtcgagtcccgcggcgaccccggcgtcgcggagcgcgtccacatcgtgtacagcctgtccaaggacctgggcctcccggggttccgcgtcggcgtcgtgtactcgtacaacgacgccgtggtcaccgcggcgcgccgcatgtccagcttcacgctcgtgtcgtcgcagacgcagaagacgctcgccgccatgctctcggacgccgggttcgcggacgcctacgtccgcaccaaccgccagcgcctccgggcgcggcacgaccacgtcgtcgccgggctggcccgcgcgggcgtgccgtgcctccgcggcaacgccgggctgttcgtgtggatggacatgaggcggctgctcggcgaggccaccaccgtcgccggcgagctccgcctgtgggaccggatgctgcgggaggcgaagctcaacatctcgccgggctcgtcgtgccattgctcggagcctggctggttcagggtgtgcttcgccaacatgagcctggacacgctggatgttgcactcgctaggatgagccgcttcgtagacacgtggaacaaggaaacgacagcgtcgacgcagcagcactagcagcagcagcagcatacgaagtaaattttttggagggtaaattacgtcattggacagattaaatcacagagtagttatacagggggattcttttatggtttttcgattgatggtaacatcgattttgtaacaataactatcgcctctcagatggaggagggacacatatatgtatgtatttataaaaattcttactttggcccaagcaaaagcgtctccgctacacattcagtattattgttttgcttcgtttttccctcctgagt

SEQ ID NO: 110185 - DNA, 1565 bp, Zea Mays
gcgaggagttcaggggcggagccagcgaaagacaagacaagacaagccaggccagcggcggaggagagggagagagagagagagagcacgcgacaggaggcaggagggcgaggaggagcttgtagagggttaaggaaggccaccgccatgggggactccagcggctccgtgtcggtcgacgtcgagcggatcttcttcggcggcaaggagcatagagtaagaacgaggcatggctctctttcggtttctgtgtatggagacgaggacaagcccgcgctcgtaacttatccggatgtagccttaaatcacatgtcttgcttccaaggattgttcttctgtccggaggctgcgtccctgttgcttcacagtttctgcgtgtaccacatcacacctcaaggacacgagttgggagcagctccgatttcagctgatgtgcctgtgccatctgtcgacgaccttgcagatcaggttgctgatgtcctcgattttttcagtttagggtctgtcatgtgcttgggtgtcactgctggtgcctatgttctcaccctctttgcaactaagtatcgggagagggttcttggcctcatgttggtttcacctgtatgcaaagccccctcctggagcgagtggctgtataataaggtattatcaaacttgctttattactacgggacacgtgggttagtcaaggaaagtttgcttcagcggtacttcagcatggacgttcgtggtaacgggcaagatcctgagtcagagattgtccaagcctgcagaagtttacttgacgagaggcagggagctaacgtctggcggttccttcaggcaattagcaggcggcatgacttaacggaatcgctgaagaagctcaagtgccggacgctgatctttgttggagaaaactcacagttccatgcggacgctgtccacatgaccacaaagctggaccggagatactgcgctctagtcgaggtaacatacagttcaaaaaacttgatcccttcagtacacacaggagtaaaacggctgatggccaaggtggtttttcgtggccaaaactgtgcaggttcaggcttgtggttcacttgtcacagaagagcagccccatgcgatggtgatcccgatggaatacttcctcatggggtacgggctctacaggccatcgcagcaggaaagcagcccccggagcacactgagcccgttctgcatatcacccgagcttctgtcaccggagagcatgggggtgaagctgaagcccatcaagacgcgcatctcgcttaacgtttagcatgggtggatctcggatggccatggcttgacaaccacagctcagctcatgaaagtgaagactccttgggctgagttgtgcagacacagttttgatgcctttcggcacctagcgttcgaagatctacaggtagaaggcagatttgttgttaatggctgtttttgttcatatatataatatatgatatgtaacttagtacacatgtatatctcaacacgtcatcgtttcatacagtacagaaaaactaaatgtgaaagctgaatccacgtccgattctcac

SEQ ID NO: 110186 - DNA, 2213 bp, Zea Mays
gcgaggagttcaggggcggagccagcgaaagacaagacaagacaagccaggccagcggcggaggagagggagagagagagagagagcacgcgacaggaggcaggagggcgaggaggagcttgtagagggttaaggaaggccaccgccatgggggactccagcggctccgtgtcggtcgacgtcgagcggatcttcttcggcggcaaggagcatagagtaagaacgaggcatggctctctttcggtttctgtgtatggagacgaggacaagcccgcgctcgtaacttatccggatgtagccttaaatcacatgtcttgcttccaaggattgttcttctgtccggaggctgcgtccctgttgcttcacagtttctgcgtgtaccacatcacacctcaaggacacgagttgggagcagctccgatttcagctgatgtgcctgtgccatctgtcgacgaccttgcagatcaggttgctgatgtcctcgattttttcagtttagggtctgtcatgtgcttgggtgtcactgctggtgcctatgttctcaccctctttgcaactaagtatcgggagagggttcttggcctcatgttggtttcacctgtatgcaaagccccctcctggagcgagtggctgtataataaggtattatcaaacttgctttattactacgggacacgtgggttagtcaaggaaagtttgcttcagcggtacttcagcatggacgttcgtggtaacgggcaagatcctgagtcagagattgtccaagcctgcagaagtttacttgacgagaggcagggagctaacgtctggcggttccttcaggcaattagcaggcggcatgacttaacggaatcgctgaagaagctcaagtgccggacgctgatctttgttggagaaaactcacagttccatgcggacgctgtccacatgaccacaaagctggaccggagatactgcgctctagtcgaggttcaggcttgtggttcacttgtcacagaagagcagccccatgcgatggtgatcccgatggaatacttcctcatggggtacgggctctacaggccatcgcagcaggaaagcagcccccggagcacactgagcccgttctgcatatcacccgagcttctgtcaccggagagcatgggggtgaagctgaagcccatcaagacgcgcatctcgcttaacgtttagcatgggtggatctcggatggccatggcttgacaaccacagctcagctcatgaaagtgaagactccttgggctgagttgtgcagacacagttttgatgcctttcggcacctagcgttcgaagatctacaggtagaaggcagatttgttgttaatggctgtttttgttcatatatataatatatgatatgtaacttagtacacatgtatatctcaacacgtcatcgtttcatacagtacagaaaaactaaatgtgaaagctgaatccacgtccgattctcacatgaactctcaagcccgagggacattgtgttaacatagagctgttgctgttggagctgcaaacaaaaaaaaaagaactttgcatctttcacagttttatgatctgcattcattcacaggaatcacaaaagtacgctgttgttatgttctaccagcaagtcatatgttccttaaacaacacacatggacaccttccgtatccgtttcacagcacccaatatgttgcaagcactccaacacagagatgagagaataaatatgctacagacacagttaatcaactatacaatgctgctctgcagcaccaactgatagacttagcctcacctacctgtcatgtcagagtagggcgtgttgggacaatttcaattgtcagcacatcagactacagctgctagtgatttcatccgattggggaggaggtggggtttttagccttggaacagtgaaacttggcgggaggagcacaggtgacacagcagctttaacttgcagaagccttgtgtaacatctctggttaccctgcacgtggtgacaacatattcaaggaaatagtaccagtagatctgctttctgttattgtaatcttttccatgcatataatctaccaaacagccatttgctcacttgcaggtggtgaaacccaaccctgatgttctaccatatccttacttctagtgtacttgctcattgtagcatctacgactcacataatgctcaccaaaattccatcacatttgttg

SEQ ID NO: 110187 - DNA, 4475 bp, Zea Mays
gcgaggagttcaggggcggagccagcgaaagacaagacaagacaagccaggccagcggcggaggagagggagagagagagagagagcacgcgacaggaggcaggagggcgaggaggagcttgtagagggttaaggaaggccaccgccatgggggactccagcggctccgtgtcggtcgacgtcgagcggatcttcttcggcggcaaggagcatagagtaagaacgaggcatggctctctttcggtttctgtgtatggagacgaggacaagcccgcgctcgtaacttatccggatgtagccttaaatcacatgtcttgcttccaaggattgttcttctgtccggaggctgcgtccctgttgcttcacagtttctgcgtgtaccacatcacacctcaaggacacgagttgggagcagctccgatttcagctgatgtgcctgtgccatctgtcgacgaccttgcagatcaggttgctgatgtcctcgattttttcagtttagggtctgtcatgtgcttgggtgtcactgctggtgcctatgttctcaccctctttgcaactaagtatcgggagagggttcttggcctcatgttggtttcacctgtatgcaaagccccctcctggagcgagtggctgtataataaggtattatcaaacttgctttattactacgggacacgtgggttagtcaaggaaagtttgcttcagcggtacttcagcatggacgttcgtggtaacgggcaagatcctgagtcagagattgtccaagcctgcagaagtttacttgacgagaggcagggagctaacgtctggcggttccttcaggcaattagcaggcggcatgacttaacggaatcgctgaagaagctcaagtgccggacgctgatctttgttggagaaaactcacagttccatgcggacgctgtccacatgaccacaaagctggaccggagatactgcgctctagtcgaggttcaggcttgtggttcacttgtcacagaagagcagccccatgcgatggtgatcccgatggaatacttcctcatggggtacgggctctacaggccatcgcagcaggaaagcagcccccggagcacactgagcccgttctgcatatcacccgagcttctgtcaccggagagcatgggggtgaagctgaagcccatcaagacgcgcatctcgcttaacgtttagcatgggtggatctcggatggccatggcttgacaaccacagctcagctcatgaaagtgaagactccttgggctgagttgtgcagacacagttttgatgcctttcggcacctagcgttcgaagatctacaggtagaaggcagatttgttgttaatggctgtttttgttcatatatataatatatgatatgtaacttagtacacatgtatatctcaacacgtcatcgtttcatacagtacagaaaaactaaatgtgaaagctgaatccacgtccgattctcacatgaactctcaagcccgagggacattgtgttaacatagagctgttgctgttggagctgcaaacaaaaaaaaaagaactttgcatctttcacagttttatgatctgcattcattcacaggaatcacaaaagtacgctgttgttatgttctaccagcaagtcatatgttccttaaacaacacacatggacaccttccgtatccgtttcacagcacccaatatgttgcaagcactccaacacagagatgagagaataaatatgctacagacacagttaatcaactatacaatgctgctctgcagcaccaactgatagacttagcctcacctacctgtcatgtcagagtagggcgtgttgggacaatttcaattgtcagcacatcagactacagctgctagtgatttcatccgattggggaggaggtggggtttttagccttggaacagtgaaacttggcgggaggagcacaggtgacacagcagctttaacttgcagaagccttgtgtaacatctctggttaccctgcacgtggtgacaacatattcaaggaaatagtaccagtagatctgctttctgttattgtaatcttttccatgcatataatctaccaaacagccatttgctcacttgcaggtggtgaaacccaaccctgatgttctaccatatccttacttctagtgtacttgctcattgtagcatctacgactcacataatgctcaccaaaattccatcacatttgttgtttgtccatatatacagcagtctgcaacttatgcgtgttagcacacaaaactctctccggttttcatgaactctggaacacacagactgttattttggtgctgtcgaactagcaggcacgttggagagtaactgactccactaactccactctcctaaagaacagggcaaagccccaacataatagacttggccactactctagctctacctgacgaaactgaattgaaaacagacagatctcacagtaagctagactctgaattggaaagtctacggctaactgaaattgatgtgcaggagttatctacaatgcggaccaccaaaattaggacattgcattaacgatcaaaaccaagagaacaatacacataatttccatcagtttgttatctgtgaacatttagattgaataaaattcatgcagagcacggagcaccatggattaggtattaaaatatgtggacaaaaaaaatattagagcatctccaagagacactctattttcgactctctatatgacactctaattacctctccatatagattacattctatatatagcatctcgttccaacagattatctatttagtttggctagtcagcggctagccaaatttggctagagatggagccaatttgaagagccggatagcttggcgagttggatggctagtctgtttgaaagttattttgctgttgaatagctaaaatttggcttgctgagccatttaactaatctattggagatgctcttagagcattggctatgcacccgaacaagatcgctaacaaactaattagtatagatgatgaaacacaactaacaaattctattgtatccatgcaccatgcttatagcgaccctaaatgtgtgatgatcctttatgagcacctatgactcacatagcactcacctaaatttcatcaacttcattgtttgtccatatttacagcaggacgcaactcatgcggcctaccaagaattaggacattgtacaaaccatataaagtataacattgttatccatcacactatgtttctgtaaatatatggctgtatcagcaataagtaatgaagaatgaaggaatgtatcctgctaggttcttactaatctcttgctagtgaatgtagtcgcattttgagcacttccaaatcatttaataatcaactaaattacatcaaccttattctttgtccatatttatagaaagacataattcatgaagcctgccaagaattaggagatcaagttaagactttagagcacacagaggttcatatttactgtttgcaggctataattgtagaacaggttaacaatccacagttcctcactccagttcattttagcacttccagaaaagactcttctgaaggatacatatttttgaaataatacagagcaaacctaatttctcaattcattaccaatccatatttacagcaagaaagaacccatacatacagcctatcagagccttttagataaactctaggtcagctaaaacatttagtctatttgtttatgcacaattgaaaaacagaccaaattcacttaataaaacaacattagtatagatgatgaaacacaactaacaaattctattgtatccatgcaccatgcttatagcgaccctaaatgtgtgatgatcctttatgagcacctatgactcacatagcgctcacctaaatttcatcaacttcattgtttgtccatatttacagcaggacgcaactcatgaggcctaccaagaattaggacattgtacaaaccatataaagtagaacattgttatccatcacactatgtttctgtaaatatatggctgtatcagcaataaggaatgaagaatgaaggaatgtatcctgctaggttcttactaatctcttgctaatgaatgtagtcgcattttaagcacttccaaatcatttaataatcaactaaattacatcaaccttattctttgtccatatttatagaaagacaactcatgaagcctgccaagaattaggagatcaagttaaaactttagagcacacagaggtacatatttactgtttgcaggctataattgtagaacaggttagcaatccacagttccacactccagttcattttagcacttccagaaaagactcttctgaaggatacatatttttgaaataatacagagcaaacctaatttctcaattcattaccaatccatatttacagcaagaaagaacccatacatacagcctatcagagtcttttagat

SEQ ID NO: 110188 - DNA, 897 bp, Zea Mays
atgggggactccagcggctccgtgtcggtcgacgtcgagcggatcttcttcggcggcaaggagcatagagtaagaacgaggcatggctctctttcggtttctgtgtatggagacgaggacaagcccgcgctcgtaacttatccggatgtagccttaaatcgcagccaaccactaaccattcttttcatgttaggtcagttgggagcagctccgatttcagctgatgtgcctgtgccatctgtcgacgaccttgcagatcaggttgctgatgtcctcgattttttcagtttagggtctgtcatgtgcttgggtgtcactgctggtgcctatgttctcaccctctttgcagtattatcaaacttgctttattactacgggacacgtgggttagtcaaggaaagtttgcttcagcggtacttcagcatggacgttcgtggtaacgggcaagatcctgagtcagagattgtccaagcctgcagaagtttacttgacgagaggcagggagctaacgtctggcggttccttcaggcaattagcaggcggcatgacttaacggaatcgctgaagaagctcaagtgccggacgctgatctttgttggagaaaactcacagttccatgcggacgctgtccacatgaccacaaagctggaccggagatactgcgctctagtcgaggttcaggcttgtggttcacttgtcacagaagagcagccccatgcgatggtgatcccgatggaatacttcctcatggggtacgggctctacaggccatcgcagcaggaaagcagcccccggagcacactgagcccgttctgcatatcacccgagcttctgtcaccggagagcatgggggtgaagctgaagcccatcaagacgcgcatctcgcttaacgtttag

SEQ ID NO: 110189 - DNA, 1728 bp, Zea Mays
gatgactaccttctcgatcgttcttccgttgagtgcttgctaagaatgttatgtacacgcaccatcacagactaagtatcgggagagggttcttggcctcatgttggtttcacctgtatgcaaagccccctcctggagcgagtggctgtataataaggtattatcaaacttgctttattactacgggacacgtgggttagtcaaggaaagtttgcttcagcggtacttcagcatggacgttcgtggtaacgggcaagatcctgagtcagagattgtccaagcctgcagaagtttacttgacgagaggcagggagctaacgtctggcggttccttcaggcaattagcaggcggcatgacttaacggaatcgctgaagaagctcaagtgccggacgctgatctttgttggagaaaactcacagttccatgcggacgctgtccacatgaccacaaagctggaccggagatactgcgctctagtcgaggttcaggcttgtggttcacttgtcacagaagagcagccccatgcgatggtgatcccgatggaatacttcctcatggggtacgggctctacaggccatcgcagcaggaaagcagcccccggagcacactgagcccgttctgcatatcacccgagcttctgtcaccggagagcatgggggtgaagctgaagcccatcaagacgcgcatctcgcttaacgtttagcatgggtggatctcggatggccatggcttgacaaccacagctcagctcatgaaagtgaagactccttgggctgagttgtgcagacacagttttgatgcctttcggcacctagcgttcgaagatctacaggtagaaggcagatttgttgttaatggctgtttttgttcatatatataatatatgatatgtaacttagtacacatgtatatctcaacacgtcatcgtttcatacagtacagaaaaactaaatgtgaaagctgaatccacgtccgattctcacatgaactctcaagcccgagggacattgtgttaacatagagctgttgctgttggagctgcaaacaaaaaaaaaagaactttgcatctttcacagttttatgatctgcattcattcacaggaatcacaaaagtacgctgttgttatgttctaccagcaagtcatatgttccttaaacaacacacatggacaccttccgtatccgtttcacagcacccaatatgttgcaagcactccaacacagagatgagagaataaatatgctacagacacagttaatcaactatacaatgctgctctgcagcaccaactgatagacttagcctcacctacctgtcatgtcagagtagggcgtgttgggacaatttcaattgtcagcacatcagactacagctgctagtgatttcatccgattggggaggaggtggggtttttagccttggaacagtgaaacttggcgggaggagcacaggtgacacagcagctttaacttgcagaagccttgtgtaacatctctggttaccctgcacgtggtgacaacatattcaaggaaatagtaccagtagatctgctttctgttattgtaatcttttccatgcatataatctaccaaacagccatttgctcacttgcaggtggtgaaacccaaccctgatgttctaccatatccttacttctagtgtacttgctcattgtagcatctacgactcacataatgctcaccaaaattccatcacatttgttg

SEQ ID NO: 110190 - DNA, 681 bp, Zea Mays
ctgccaactattcatttcattgtacagtattttagagtgttaacctcagaatctcatgtaccaggtattatcaaacttgctttattactacgggacacgtgggttagtcaaggaaagtttgcttcagcggtacttcagcatggtacttttgatgcccccttcagcttttctcaagctctcgggcttataggcggtagtgggcgttcgggttacccaaaaatttcgggtcgggtaattcaggttttcaaaatttcgggttttaagaatcgatacccgaaattacaacgggttttacaataccgaaaattcgggtacccgaaattttgggttcgggttcgggtattcccgaactatccgaactattgtgtcggcttcataaaaacacatacaccctattaaattagtataaaaatatagtttgaataatgatatacatggacatataaaacacaagcaatctacaatcacaagttatgcacacatacacataattataaatgtacaaattaataattaagcatgacatgagtacatgacacatgaaagttcgggtaattcgggtacccgattgtgatacccgaataacccgaactaaattcgggttttgcaagttgctacccgaaattctcaaacaaaattcgggtttcgggtatttcgggttcgggttcgggtttcgggttt

SEQ ID NO: 110191 - DNA, 1905 bp, Zea Mays
gtccccagcccgcgcactgcccccggtctctctctctcaacacaccgataagcccagtccaccggatctcccgtagtccagagactgagttgaaggaaggaagccatgatgatgatgggcgaaggcgtgagcatgccgccgtggtcccaccacgtccctgtgagcggcgtcgacgaaggcgacgagatgacgccgtacctgctcgcggcgctgcgccagtacctgccgtgcaacgacgccggcgccgaggccgaggaggatgaggcggcggcggcggccgccgccatggcggcgggcgtggacggctacggctgcgacgagttccgcatgtacgagttcaaggtccggcggtgcgcgcgcgcgcgcagccacgactggaccgagtgccccttcgcgcacccgggggagaaggcgcggcgccgcgacccgcgcaagtaccactactccggcgccgcctgcccggacttccgcaagggcgggtgcaagcgcggcgacggctgcgacatggcgcacggcgtcttcgagtgctggctccacccggcgcgctaccgcacccagccctgcaaggacggcacggcctgccgccgccgggtctgcttcttcgcgcacaccgcggaccagctgcgcgtgctcccgcccacgcctcagcagcagtccagccccaggggcgccgcctgctcttccccgctcgccgagtcctacgacggctccccgctccggcgccaggcgttcgagagctacctcaccaagagcatcatgtgctcgtcgccgaccagcaccctcctgtcgccgcccaagtcgcccccgtcggagtccccgccattgtcgcccgacttccgccgtgggtgctggccgggcgccgggtcccccgtcaacgacgtgctcgcctcgctccgccagctccgcctcagcagggccaactcgtccccgtcgggcggctggtgcggctaccctgcatccgcggtcgcgtacggatcgcctacggggggcgcgctctacggcctgtcctccaccccgagggccaccgccgcatcctgctacatggccaacctggaccctctcgacgtcagcttcggcggcgacgacgagcccgtggagagggtggagtccggccgcgccctccgcgcgaaggtgttcgagcggcttagcagggagggcgctgtttccggcgacgccggtggccccgacgtcggttgggtctccgacctcatcaactgagcgcggcggcggcagtggcaataacaatgggcacggagaaaggtgatggtgagccgtaacggagaaggatggtacggagtatccaaaaaaaaaatatttccctatatttaatttcgttcctcagttaattccgataatccccgtgtacatatctatcaccctgtgaatattctcagttggtaagagggaggatgctaggtggtggaagtggaaggaggggtggatttgttttggggttcttgagggtagtagaaaatatccaagaaaaatagaaaaaaaaagtgtacagcagatgcagtagcgcggtggcggtggttgtgtccctcttctgtgcatagggttagggtgttggtggcgaagcatggcgggggctgatgtgacgacgaaggcgggccggatttccaccacggcttggtatttctgtgattccggaacatggtagtttgatgttgttttttttaagttagtggactagttggcgattgcaacctgcttgtggattactctcccattttgttatgtaatctgttaagacatcagcattccctacagcatattttgtgtacctacgtcttagtagttgccgaaatctcaatcaaaatcacccgctattggaggtgaatttcccatgtaatcttctgctcatgtaaatggttttctttttaatgaatcgatgtttatcgccct

SEQ ID NO: 110192 - DNA, 1607 bp, Zea Mays
ctgcccccggtctctctctctcaacacaccgataagcccagtccaccggatctcccgtagtccagagactgagttgaaggaaggaagccatgatgatgatgggcgaaggcgtgagcatgccgccgtggtcccaccacgtccctgtgagcggcgtcgacgaaggcgacgagatgacgccgcgacccgcgcaagtaccactactccggcgccgcctgcccggacttccgcaagggcgggtgcaagcgcggcgacggctgcgacatggcgcacggcgtcttcgagtgctggctccacccggcgcgctaccgcacccagccctgcaaggacggcacggcctgccgccgccgggtctgcttcttcgcgcacaccgcggaccagctgcgcgtgctcccgcccacgcctcagcagcagtccagccccaggggcgccgcctgctcttccccgctcgccgagtcctacgacggctccccgctccggcgccaggcgttcgagagctacctcaccaagagcatcatgtgctcgtcgccgaccagcaccctcctgtcgccgcccaagtcgcccccgtcggagtccccgccattgtcgcccgacttccgccgtgggtgctggccgggcgccgggtcccccgtcaacgacgtgctcgcctcgctccgccagctccgcctcagcagggccaactcgtccccgtcgggcggctggtgcggctaccctgcatccgcggtcgcgtacggatcgcctacggggggcgcgctctacggcctgtcctccaccccgagggccaccgccgcatcctgctacatggccaacctggaccctctcgacgtcagcttcggcggcgacgacgagcccgtggagagggtggagtccggccgcgccctccgcgcgaaggtgttcgagcggcttagcagggagggcgctgtttccggcgacgccggtggccccgacgtcggttgggtctccgacctcatcaactgagcgcggcggcggcagtggcaataacaatgggcacggagaaaggtgatggtgagccgtaacggagaaggatggtacggagtatccaaaaaaaaaatatttccctatatttaatttcgttcctcagttaattccgataatccccgtgtacatatctatcaccctgtgaatattctcagttggtaagagggaggatgctaggtggtggaagtggaaggaggggtggatttgttttggggttcttgagggtagtagaaaatatccaagaaaaatagaaaaaaaaagtgtacagcagatgcagtagcgcggtggcggtggttgtgtccctcttctgtgcatagggttagggtgttggtggcgaagcatggcgggggctgatgtgacgacgaaggcgggccggatttccaccacggcttggtatttctgtgattccggaacatggtagtttgatgttgttttttttaagttagtggactagttggcgattgcaacctgcttgtggattactctcccattttgttatgtaatctgttaagacatcagcattccctacagcatattttgtgtacctacgtcttagtagttgccgaaatctcaatcaaaatcacccgctattggaggtgaatttcccatgt

SEQ ID NO: 110193 - DNA, 1607 bp, Zea Mays; identical to SEQ ID NO: 110192

SEQ ID NO: 110194 - DNA, 1126 bp, Zea Mays
cctctagccttcgtgccgtctgcccgcccgccgtctagtcctctcttcgttctcttgctctcgcgctagcagagcggaggaggaggagaccaaccgggttggtggacgtgggcgggaggtgtgtgcgtgtgtcgtccatggggcggacgccgtgctgcgacagggcggccgtgaagcggggcccgtggtcgccggaggaggacgaggcgctgcgcagctacgtccagcgccacggcagcggcggcaactggatcaccatgcccaagaaagcggggctcaagaggtgcggcaagagctgcaggctgcgctggctcaactacctccgcccggacatccgccacggcggcttcaccgccgaggaggacgccgtcatcatgtccctctacgcccagctcgggagcaaatggtcgctgatagcctcgcagatggaggggaggacggacaacgacgtgaagaaccactggaacaccaagctcaagaagcgcctcctggccgcagcggccgcgtcctccgccccgccgccagcgcccgcgcccgcgcctctttccagcaccacgctcacgtcctcgctgttcccgtcgctcgccataccgaccgtgaagaccgaggcgtacacctgcgacgacttcctggcgccggcgctcggcctcggggacccgttcgccgccgccgccgccgccgccgacggctccacctcggccgcctccgcggcgtcgtcggcctccaacaactggtcggcggcggagaacggcgcaggcgaagcgtccctcttcctgctggacttctgcgcgggccccgacctcgccggcgccgaccagctccacctccccggcggctactactaccctctcgacccgatcttgccgtcgtcgcctcgtcggtatagctagcttcttcgcgcgctgcgtacgcggtacgccgctgtcgttccaaggacagcgtagcgtagcggtagggtctgtagtacgtactaccatggtgcatgtgctcgggagtcgggatcgtcgtcgcttcgttgatcagaagctaagctgcatgaaagcaaagctagccgcgcgcgcgcgttttgtctaggtcttcacgtcagatttctgccgaaattaacatttccagtcgccaattcgcc

SEQ ID NO: 110195 - DNA, 973 bp, Zea Mays
cgatccagtccaacctcaacgccggcgagggcgaggccgctgactccaaacggctcgcctctctgcacgtgagcgactgggcgaggcgagccaaggattcgaccgttgcgttctccgcccaaaccttaaagccccaatcccatatcgccccacaattccaaacttcgcctcgccgctccccctccctacacaagcttcctccccctccgcgccgctcctccaggctccagccatggcgatcgccaccgagtcgcgcggctgcgaggacagggattcagcccatgcaaacgaggagaagcggtgggtgctgtctgatttcgaggttgggaagcctcttgggaggggcaaattcggccacgtatatcttgccagagaaaagagggtaaataacatagtttacttgcaatgattatcagtgttattaaaactacgtttaaacgtcaaaactctaattagaggttgaaaccacgttttagcgttttggcgttctaactgaaaaacacagtgttttatgcattttagaccattagctacttttgggtccagtctattagttacttttgaggttcaatccagctcatgggtgaagttttggtaagccactaacctctctattttggtatttaacttcatatttttgtctgaaattatgatgtattggtatttttcctgtgttgtttaaaactacgtttaaacaaagtttaaacgtttaaaagtcaaaatttgacccatgagcgttccaacgttttaccgttttaataaccttgatgattattttttgtctctaactttactgaataatttactgtacggtgattgcttggagttgattacttcagtcttcagtgttgtgcaatgtacatatctactaactgaactttttatgttatggtatactcagcaaatatactactgtaactaatcttgattgtcaggaaatattgcacttgcaccaaatatttttagtctctag

SEQ ID NO: 110196 - DNA, 1460 bp, Zea Mays
cgatccagtccaacctcaacgccggcgagggcgaggccgctgactccaaacggctcgcctctctgcacgtgagcgactgggcgaggcgagccaaggattcgaccgttgcgttctccgcccaaaccttaaagccccaatcccatatcgccccacaattccaaacttcgcctcgccgctccccctccctacacaagcttcctccccctccgcgccgctcctccaggctccagccatggcgatcgccaccgagtcgcgcggctgcgaggacagggattcagcccatgcaaacgaggagaagcggtgggtgctgtctgatttcgaggttgggaagcctcttgggaggggcaaattcggccacgtatatcttgccagagaaaagaggagcaatcaaattgtggctttgaaagttcttttcaagagccagcttaagcaatcacaggtcgagcatcagctgcgacgcgaagtggagattcagagtcatcttcgtcatcctaatattcttcgcctgtatgggtacttctatgatcagacccgggtttacctaatcctggaatatgctgccaagggtgagctgtataaggaactgacaaggtgtaaacatttttctgagagacgttcagcaacttatattgcatcattggctagagctctgatctacctgcatgggaagcatgttatccatcgggacattaaaccagaaaatcttttggttggagcccagggcgagatcaaaatcgccgactttggctggtctgtgcataccttcaacagaagaaggactatgtgcggaactctggattacctgccacctgaaatggtggagaagacagaacatgattaccatgttgacatatggagcctgggtattctgtgttatgagttcctttatggggtcccaccttttgaagctaaggagcactcagaaacatacagaaggatagtaaaagtcgacttgaagttcccactgaaaccattcgtttcgcccgccgcaaaggatttgatttcccagatgctggtcaagaactcggcccagcggctgcctctccacaaggttcttgagcacccatggatcgtccagaacgccgacccttccggtgtgtgcagaggatagaaccaccaccaccggctgaagggagtgcgattctttccactctccccatttcgaggggagtgcgattctttcgactgtttatggcttctgtcgcccgaattgccccaccccgaactgtatcttgtagcaccgtgtactgtgtgtagttggggccgtgggcaaattgccctaaacccttgaacaaccttctttactcgtagtctcgtatgagagagccttgtagagtctcgtccgtccaattatgaactcgagggcaatgtgcaggaaaatgttgaaggtatcgtccataaccagcaaaacttatgtagcgagctcaatttagaatttacttttgatcctgttcgaaccc

SEQ ID NO: 110197 - DNA, 106 bp, Zea Mays
cttgtagtactaccagtattcgagctgttggggtccatcaagtgttgtactgctccatttgccttgggtaggaagcaagctctgggattcacccctctatctgtcc

SEQ ID NO: 110198 - DNA, 1951 bp, Zea Mays
ttttttttatatgtgccccctctctccctcactgctctcgctctctcctttgcactgctcctccgacttgctcttcgcgcagcaagacggagaaacaagaaccatccctccccctaccgctgctactcatgcacgcgcgcactgcctcctggtgccgccgcgtatgatccagacatgaatagggcgcacagcagcagctccaagctcatcaacgagaagctcgtggaacaccggatctccactgcgaagcactgcccccactgcggcgagaaaatcgacagcaaaccggattgggtggggctgccggcaggcgtcaagttcgatccaactgaccaggagctgatcgagcacctcgaggcgaaagtgaaggatgaaggctcgagatctcaccctctcatcgacgagttcatacccacaatagatggggaggacggcatatgttacacccaccccgagaaacttccaggtgtgacgagggatggcctaagcaagcacttcttccaccggccgtccaaggcctacacgacgggcacgaggaagaggaggaagatacagacggagtgcgacgtccacaagggggagacgaggtggcacaagaccggcaagacgcggccggtgatggtgaacggccggcagaaggggtgcaagaagatattggtgctgtacaccaacttcggcaagcaccgcaagccggagaagacgaactgggtcatgcaccagtaccacctcggcgacctagaagaggagaaggagggggagctggtggtgtgcaagatcttctaccagacgcaacccaggcagtgcagctggtcctccgaccggggcgccgccgccactgccttggcagcaacggcggcagcggcggcggcgcaggagcagcataggagggatagtggcagtggcagctgctcgtctagggaccacgaggtgtcagccacatcgttcccagccggatacacagtcaccacggccgtcgagatgcagcagcatatgaagcagcctgcggaccatttcagcttcgcgcctttcaggaaaaccttcgaccaggaggttggtataggtggtgatcaggtgccatctaatcagcttggacgttcagagccgcatcatgccggcctggggcagcagccacacggcccggtgctcgcgacgaagacggctgtgcctgctacagctttcctgatcagtaggccatcgaaccctgtctcgactatagtgccacctgcaatgcagcacgcatcagttgttctcgatcatgatcagttccatgtgccagcaatccttctccatcaccatgacaaatttcagaacatgcaccaacagccacaacaaaagcttgaccgcagatctgccggcttggaagaactgataatgggctgcacgtcgtccacaagcacaaaaggagatgcttccattgctcacccccaagagacagaatggccttacacgtactggccacctgacaaccaagatcatcatgggtagtagcaacagggacctggtaaatagtggcgatgtgaatgctgaaggaacactaaccgcaaccactttcactggaatggtttttgtctgcttgaatatgcagcgttgctttcttggagaatgtacacctacaatagtggggaaagaacagagaaaaaaaacgtatctctgtagatctccctcaataaagaaatgaggataaaactagttaacagtgtgagctctccaagacagaagagacaaaatggccaacgaaaagagaagggggaaagaccgatgggaggaaaggtactgtgtgtgctgacattgaagggatcatgtgtggacagtttagatgtattagaacaccttaatcaagtataactataatcagtttacggtttatcacagttttttattcgtgctacctgttagtggcattgtttgcatgtacattaacccttttaatttcttttagtttctaaattga

SEQ ID NO: 110199 - DNA, 189 bp, Zea Mays
tggacgcatagtcctacatcaaaggctttcctccaactttcatcaggtatgccagcaactggttgtcattataggatgtgaccctggacagggaatgtcccaaccaattaaactttgctttgaagtgacctcaacataagtacatggtctgcaccaataagtgacaaaaggagctagccagactcagat

SEQ ID NO: 110200 - DNA, 1949 bp, Zea Mays
agcgggcccggcagtcccacaagatcacagcacatacgcttcctccattccactcggccgcgaccgcgaccgcgacggcgagcgaggggccgaggtgggacgccgcgccgcttctgcagaaagaaaaaggccaggtgaggtgctcgacgcgggagcgggaccggagtagcgccagcgtcccattcccggccaacctccctgttcatctccatgccgacctgactcggactcttgatttgctcctcgcgggggttcggtcccatggcggcagctgcgctggcaatggcagagcaggtggtggccgagctccgagtgaggtgtgagacgccgccgtcgatgctgcgcgaggtggccgtggagatggcccgcgagatgggcgcggggctggagaaggacggcgggagcagggtcaagatgctcctctcctacgtcgataagctccccacagggagagaggaaggattattctatggattggacctaggaggaacgaatttccgcgtcttgaaagtgcaactaggtgggaatgcgaagcatgtcgttgaccgtgactccagagaagtcggcattccgccacatctgatgtcagggagctcctcggagctttttggtttcattgcttctgaattggccaagtttgttgacgatgatgagaagtgcgctaacatttcgaatggcaagaagcgagaaatagggttcacgttttcgttcccagtgaagcagcgttctgtagcttccggtacgcttgtcaagtggacaaaggcattttccattaatgatgctgtaggcgaagatgtggtggctgaactgcaaacagccatggagaagcaaggtctggacatgcatgtagctgcattgattaatgatgctgttgggacgctggcgggagcaaggtactatgacaaagatgttgtcgctggtgtaatatttggcactggcacaaacgcagcatatgttgagaaggcaaatgctattccaaaatgggagggtgagctgccccattcaggagacatggtcatcaacatggaatggggtaacttcttctcatctcatctccccatcactgaatatgatcaagaattagataaggagagcttaaatccaggagaacagatttacgagaagttaacgtcaggaatgtatttaggtgaaattgtaaggagggtgctccttaaaatatcattgcagtccgccatttttggtgatattgaccacactaagcttcaaacccatttccttctgcggactccacatatttcagcaatgcaccatgacgaaacatctgatctgaagattgtggccgaaaattttgaagaaaacctagagattacaggcacatccttggaggctcgtaagctggtcgttgaaatctgtgacattgtggcgacaagagcagcccggctggctgctgcggggcttgcagggatcctcatgaagatcgggagagatcacagcgtcgaggaccaacggtcagtcatcgccatcgacggaggactgttcgagcactacaccaaattccgccggtgcttggagaccacactgggtgagctgctaggagacgaggcgtccaaggcggtggccatcaagcatgccgacgacggttcaggaataggtgctgccctgattgcagcttcacagtctcagtacaaaaacgacttagtggccgtcaagcatgcagatgacggttcaggagtcaagtatgcagaagacaagcgtgcagatgacggatcagaaataggtgctgccctgattgctgcctcgcaatctcagtagagagatgtccgagtggtatagaggtagcaagtagctatgatttgtttccaacgtcttaactgtccagcgtctgcagtttagcatgctagagctggatgcgatctgtaaccaaaaccaggcttggccaactggctgttcataattccaataacagcagggttgcagatgtctcctaa

SEQ ID NO: 110201 - DNA, 1871 bp, Zea Mays
agcgggcccggcagtcccacaagatcacagcacatacgcttcctccattccactcggccgcgaccgcgaccgcgacggcgagcgaggggccgaggtgggacgccgcgccgcttctgcagaaagaaaaaggccaggactcttgatttgctcctcgcgggggttcggtcccatggcggcagctgcgctggcaatggcagagcaggtggtggccgagctccgagtgaggtgtgagacgccgccgtcgatgctgcgcgaggtggccgtggagatggcccgcgagatgggcgcggggctggagaaggacggcgggagcagggtcaagatgctcctctcctacgtcgataagctccccacagggagagaggaaggattattctatggattggacctaggaggaacgaatttccgcgtcttgaaagtgcaactaggtgggaatgcgaagcatgtcgttgaccgtgactccagagaagtcggcattccgccacatctgatgtcagggagctcctcggagctttttggtttcattgcttctgaattggccaagtttgttgacgatgatgagaagtgcgctaacatttcgaatggcaagaagcgagaaatagggttcacgttttcgttcccagtgaagcagcgttctgtagcttccggtacgcttgtcaagtggacaaaggcattttccattaatgatgctgtaggcgaagatgtggtggctgaactgcaaacagccatggagaagcaaggtctggacatgcatgtagctgcattgattaatgatgctgttgggacgctggcgggagcaaggtactatgacaaagatgttgtcgctggtgtaatatttggcactggcacaaacgcagcatatgttgagaaggcaaatgctattccaaaatgggagggtgagctgccccattcaggagacatggtcatcaacatggaatggggtaacttcttctcatctcatctccccatcactgaatatgatcaagaattagataaggagagcttaaatccaggagaacagatttacgagaagttaacgtcaggaatgtatttaggtgaaattgtaaggagggtgctccttaaaatatcattgcagtccgccatttttggtgatattgaccacactaagcttcaaacccatttccttctgcggactccacatatttcagcaatgcaccatgacgaaacatctgatctgaagattgtggccgaaaattttgaagaaaacctagagattacaggcacatccttggaggctcgtaagctggtcgttgaaatctgtgacattgtggcgacaagagcagcccggctggctgctgcggggcttgcagggatcctcatgaagatcgggagagatcacagcgtcgaggaccaacggtcagtcatcgccatcgacggaggactgttcgagcactacaccaaattccgccggtgcttggagaccacactgggtgagctgctaggagacgaggcgtccaaggcggtggccatcaagcatgccgacgacggttcaggaataggtgctgccctgattgcagcttcacagtctcagtacaaaaacgacttagtggccgtcaagcatgcagatgacggttcaggagtcaagtatgcagaagacaagcgtgcagatgacggatcagaaataggtgctgccctgattgctgcctcgcaatctcagtagagagatgtccgagtggtatagaggtagcaagtagctatgatttgtttccaacgtcttaactgtccagcgtctgcagtttagcatgctagagctggatgcgatctgtaaccaaaaccaggcttggccaactggctgttcataattccaataacagcagggttgcagatgtctcctaaccccctacgatctt

SEQ ID NO: 110202 - DNA, 2163 bp, Zea Mays
gatccagagcctgatccgaacacgatccctttctcccctttccctgcgtagtgcggagctccagtgaaggaaccaaacagcgcaacacacgaacacaccaggcggcaggctccaccccgtccttttcctgccttttccccccgtcgagttaatccatccagtcgccaaaagctttgctaaatttcacgtgtctcgcctcgagtcgtccctaatccgacgatgccttgttctactcctaaaaaaacccaaatatcctgactttctcttgctgctagcctcccttttcccttctcccttaatcgcactgttggaagctcttcgctgtcacccccacccacctccggcgctcttttttagcattttccttgggctctggactccaaaatcccagccttttgtttgcttctctgtctcctgctgattggtgtccccgggtccaggactcttgatttgctcctcgcgggggttcggtcccatggcggcagctgcgctggcaatggcagagcaggtggtggccgagctccgagtgaggtgtgagacgccgccgtcgatgctgcgcgaggtggccgtggagatggcccgcgagatgggcgcggggctggagaaggacggcgggagcagggtcaagatgctcctctcctacgtcgataagctccccacagggagagaggaaggattattctatggattggacctaggaggaacgaatttccgcgtcttgaaagtgcaactaggtgggaatgcgaagcatgtcgttgaccgtgactccagagaagtcggcattccgccacatctgatgtcagggagctcctcggagctttttggtttcattgcttctgaattggccaagtttgttgacgatgatgagaagtgcgctaacatttcgaatggcaagaagcgagaaatagggttcacgttttcgttcccagtgaagcagcgttctgtagcttccggtacgcttgtcaagtggacaaaggcattttccattaatgatgctgtaggcgaagatgtggtggctgaactgcaaacagccatggagaagcaaggtctggacatgcatgtagctgcattgattaatgatgctgttgggacgctggcgggagcaaggtactatgacaaagatgttgtcgctggtgtaatatttggcactggcacaaacgcagcatatgttgagaaggcaaatgctattccaaaatgggagggtgagctgccccattcaggagacatggtcatcaacatggaatggggtaacttcttctcatctcatctccccatcactgaatatgatcaagaattagataaggagagcttaaatccaggagaacagatttacgagaagttaacgtcaggaatgtatttaggtgaaattgtaaggagggtgctccttaaaatatcattgcagtccgccatttttggtgatattgaccacactaagcttcaaacccatttccttctgcggactccacatatttcagcaatgcaccatgacgaaacatctgatctgaagattgtggccgaaaattttgaagaaaacctagagattacaggcacatccttggaggctcgtaagctggtcgttgaaatctgtgacattgtggcgacaagagcagcccggctggctgctgcggggcttgcagggatcctcatgaagatcgggagagatcacagcgtcgaggaccaacggtcagtcatcgccatcgacggaggactgttcgagcactacaccaaattccgccggtgcttggagaccacactgggtgagctgctaggagacgaggcgtccaaggcggtggccatcaagcatgccgacgacggttcaggaataggtgctgccctgattgcagcttcacagtctcagtacaaaaacgacttagtggccgtcaagcatgcagatgacggttcaggagtcaagtatgcagaagacaagcgtgcagatgacggatcagaaataggtgctgccctgattgctgcctcgcaatctcagtagagagatgtccgagtggtatagaggtagcaagtagctatgatttgtttccaacgtcttaactgtccagcgtctgcagtttagcatgctagagctggatgcgatctgtaaccaaaaccaggcttggccaactggctgttcataattccaataacagcagggttgcagatgtctcctaa

SEQ ID NO: 110203 - DNA, 2337 bp, Zea Mays
ccgcatccccctgctccatccccccctctccacactgccaactcgctccgaagagggaggaggacgacgccggttgccactgccactgccgcgccgcgccgctcccgtctcccctccctccgcgggaactcgacgccaccatgctgtccacgcgcaccgccgccgtcgccgcctccgcgtcccccgcctccccgtggaagctgggaggacggagcgagggcggcgccagctgcgacggatgccggacctacaggaacaccctgcggaggagggccgcgcccgccaaggtgcgcgccttgccgcccaggcgggtggacgcggtcgcgatggtctccaacgcggagacggagacggagaaggagcaggaggaggcggcggccgccagcgaggagctgcccgtcatgccctgggccacctccgtcgcaagcggttacacccttttgagggatccacaccacaacaagggtcttgctttcacagaggaggaaagggatggacactacttgcgtggactgcttcctccggcagtactatctcaggaactccaaattaagaagttcatgaacaccctgcggcagtaccagacccctttgcagcggtatatagctatgatgaaccttcaggaaacggacgagaggcttttctacaagcttttaattgataatgtggtggagctgcttccttttgtttacacaccaactgtaggtgaggcctgccagaagtatgggtccatctttggacgaccacagggtctgtatgtcagcctgaaggacaaggggaaggtcctagaagttctaaggaactggccacataggaacattcaagttatctgtgttactgatggtgagcgaatcttgggacttggagatttgggttgtcagggaatgggaattcctgtaggcaaacttgctctatacactgctctaggaggagttgacccatcagtttgcttgcctatcacaattgatgttggtacaaataacgagaaactgcttaatgatgagttctacattggactccggcaaaaacgtgcgactggcgaggagtatgatgagcttattgaagagttcatgtctgctgttaagcaattctatggtgagaaagtcctcattcagtttgaggactttgccaatcacaatgcctttgatttgcttgaaaaatatagcaagagccatcttgttttcaatgatgatatccagggcacagcatcagtggtccttgcaggtttgttagcagcactcaagatggttggtgggaccctggcagagcagacgtatttgttccttggtgctggggaggctggaactggtattgcagaacttattgctcttgagatttcgaaacagacgaatgctccaattgaagagtgccgcaagaaggtttggctggtggactcaaagggtttgattgttgactctcgtaaaggctcccttcagccattcaagaaaccttgggcgcatgagcacgagcccttgaaaaccttgtatgatgctgttcagtccatcaaacctacagttctgatcgggacatctggagttggaagaacattcacaaaagaaatcattgaggccatgtcttccttcaacgagaggcctatcatcttttcactgtcaaacccaacctcgcattctgaatgcactgctgaacaagcatatacatggagtcagggccgttcaatctttgccagtggcagtccatttgcccccgtggagtacgaaggaaagacttttgtgcctgggcagtcgaacaatgcctacattttccctggactcggcctcggtcttgtgatctctggagccgtccgtgtccacgaggacatgcttctcgccgcctcgaaagcgctagctgatcaggccacacaggacaacttcgagaagggctccatcttcccacccttcaccagcatcagaaagatctctgcgcacatcgctgcagccgtggctgcaaaagcctacgagctcggtctggcgacccgtctgcctccccccagcgacctggtgaaatatgcagagaactgcatgtacactcccgtctaccgcaactaccggtagtgctgcggggatcaattttgcagtaataaaaaatctatcaacgcggatggtactctgttgtttatagtccctgctgctaaccacccttgttgctggtgctgctggagaggcattgtacctgtccatgcatatatgatatatatatgttgtaacgttgtgaaagcaaacaatcttgggtaccaatgtttgttattctttcgctcgattatgatggtctgttatagtggctggacgagtcagatctccgtgatagggaatcaagatgaccaaatctaagccaaaccaa

SEQ ID NO: 110204 - DNA, 2259 bp, Zea Mays
ccgcatccccctgctccatccccccctctccacactgccaactcgctccgaagagggaggaggacgacgccggttgccactgccactgccgcgccgcgccgctcccgtctcccctccctccgcgggaactcgacgccaccatgctgtccacgcgcaccgccgccgtcgccgcctccgcgtcccccgcctccccgtggaagctgggaggacggagcgagggcggcgccagctgcgacggatgccggacctacaggaacaccctgcggaggagggccgcgcccgccaaggtgcgcgccttgccgcccagcgaggagctgcccgtcatgccctgggccacctccgtcgcaagcggttacacccttttgagggatccacaccacaacaagggtcttgctttcacagaggaggaaagggatggacactacttgcgtggactgcttcctccggcagtactatctcaggaactccaaattaagaagttcatgaacaccctgcggcagtaccagacccctttgcagcggtatatagctatgatgaaccttcaggaaacggacgagaggcttttctacaagcttttaattgataatgtggtggagctgcttccttttgtttacacaccaactgtaggtgaggcctgccagaagtatgggtccatctttggacgaccacagggtctgtatgtcagcctgaaggacaaggggaaggtcctagaagttctaaggaactggccacataggaacattcaagttatctgtgttactgatggtgagcgaatcttgggacttggagatttgggttgtcagggaatgggaattcctgtaggcaaacttgctctatacactgctctaggaggagttgacccatcagtttgcttgcctatcacaattgatgttggtacaaataacgagaaactgcttaatgatgagttctacattggactccggcaaaaacgtgcgactggcgaggagtatgatgagcttattgaagagttcatgtctgctgttaagcaattctatggtgagaaagtcctcattcagtttgaggactttgccaatcacaatgcctttgatttgcttgaaaaatatagcaagagccatcttgttttcaatgatgatatccagggcacagcatcagtggtccttgcaggtttgttagcagcactcaagatggttggtgggaccctggcagagcagacgtatttgttccttggtgctggggaggctggaactggtattgcagaacttattgctcttgagatttcgaaacagacgaatgctccaattgaagagtgccgcaagaaggtttggctggtggactcaaagggtttgattgttgactctcgtaaaggctcccttcagccattcaagaaaccttgggcgcatgagcacgagcccttgaaaaccttgtatgatgctgttcagtccatcaaacctacagttctgatcgggacatctggagttggaagaacattcacaaaagaaatcattgaggccatgtcttccttcaacgagaggcctatcatcttttcactgtcaaacccaacctcgcattctgaatgcactgctgaacaagcatatacatggagtcagggccgttcaatctttgccagtggcagtccatttgcccccgtggagtacgaaggaaagacttttgtgcctgggcagtcgaacaatgcctacattttccctggactcggcctcggtcttgtgatctctggagccgtccgtgtccacgaggacatgcttctcgccgcctcgaaagcgctagctgatcaggccacacaggacaacttcgagaagggctccatcttcccacccttcaccagcatcagaaagatctctgcgcacatcgctgcagccgtggctgcaaaagcctacgagctcggtctggcgacccgtctgcctccccccagcgacctggtgaaatatgcagagaactgcatgtacactcccgtctaccgcaactaccggtagtgctgcggggatcaattttgcagtaataaaaaatctatcaacgcggatggtactctgttgtttatagtccctgctgctaaccacccttgttgctggtgctgctggagaggcattgtacctgtccatgcatatatgatatatatatgttgtaacgttgtgaaagcaaacaatcttgggtaccaatgtttgttattctttcgctcgattatgatggtctgttatagtggctggacgagtcagatctccgtgatagggaatcaagatgaccaaatctaagccaaaccaa

SEQ ID NO: 110205 - DNA, 3467 bp, Zea Mays
aaccttcgcctctcctcccgttgtcagccgccgtgcctgttctctctgcctttctaaaagtgcggcgactggttgggctgccgccgactgccggggccttcgccgacctcttcgccggcgaagaggtcccatcaggagaaggagtagatcgtcgacccagaaccctcgctgatggcgactttcgcgaaacctgagaacgcgctgaagagagccgaagaattaatccatgttggtcaaaagcagtcagccctgcaggctttacatgatctcattacctcgaaaaggtacaggtcatggcagaagcctctcgaaaagatcatgatgaagtatgtagaactctgtgttgacctgaggaaaggcagatttgcaaaagatggtcttattcagtataggattgtctgccagcaagtaaacgtgtcatccttggaggatgtcataaagcacttcatgcagctttcaaatgagaaagctgaacaagctaagagtcaggtcgaagcactggaagatgctctggatgtcgaagatcttgaagcagacaagcgtcccgaggacctcatgctcagttttgtcagtggggagaaaggaaaggaccgatcagataaagaggttgtaactccatggtttaagttcctctgggagacatacaggactgttctagagatactaaggaacaattcaaagcttgaagcgttatatgctatgactgctcatagggcttttcaattctgtaaacagtataagagaacaactgaattccgtaggttgtgtgagatcatcagaaatcatcttgctaatctcaacaaatatcgcgatcaaagagatcgtcctgatctgactgcacctgaaagtttacaactgtatcttgatacacgtgttgagcagcttaaagttgctacagaactctccctttggcaggaagccttccgatcggtggaagatatccatggtttgatgaccatggtgaagaaaatgccaaaaccatctatcttggtggtctattatgcaaagttgactgagatcttctggatatcggacagccacttatatcatgcgtatgcgtggctcaagcttttcaacttgcagaagagctacaataaaaacttgtctcagaaggatctacagttaatagcatcttctgttttacttgctgcactatccgtgtcaccttatgacaaaaaatatggtgcatttgagacagagaatgagaaagagcgcaacatgcgtctgtccaaccttgttaacttttcgcttgataacaagcgtgaaaacagggaaatgccttcaagaccatatcttctatcagagttggcctccaaaggagtcctttcatgtgcttcccaagaagtgcgagatttgtacaaccttttggaacatgagtttctacctctggatcttgcatcaaaagtgcagccacttcttttgaagatttcaaagattggagggaagctttcatcagcttcttctgttcctgaggtcaagttatctcagtacatttcagcattggagaagctgacaacattgagagtgctacaacaggcctcttgtatttttaaatccataaagattgatatgctctcaagaatgattccattctttgacttctctgtcgtggagaagatttctgttgatgctgccaaacaaaattttgttgctataaaagttgaccatttatcgggagttgttcagtttggtactgtggacatagaatctgatggcttaagtgatcaccttagtgttcttgctgattcattaaataaagcaaggattcatatctgtccaccagtgaaaaagccatctaaactcggtgaaagtctcattagtttggctgcaatagtggagaatgaacataagaggctgcttgcaaggaagtccatcattgaaaaacgtaaagaagagcttgagcgtcaaatattggagaaggaaaaagaagaagaaaaaaagagaatgagcagtcaaaagaaaactgtggatgaggaaagggtgaggcttctcaatgaacagaggcagagggagcaggaccggattcgtagagagatagaggaaaaaaataaagcagaagcaaaaaagatgctagaagatttgaataaggcagggaaaaaacatgtcgttgttgaaggggagcttactaaggaggccatcatggaattggcacggaatgaacagttaaaggagcgccacgaaatggagaaaaaactgcagaagtttgcaaaaacaatggattatctggaaagggcaaaaaggcaggaagaggcaccactgattgagcaagcttttcaaaaacgtcttgaggaagagaagatccttcacgagcaagagcagcttcgggagattgaactcagcaagcaacaccatgccagcgacttgcaagagaaaaatagactttcacggatgttggagcacaagaatgctttacaggagagaatcatccaagaacgtgcagctgagtttggccgtctgaagaaagagagagatgaacggatgaatcggttgatatcttcaagaaagcatgaaagggagacagtaaggaagttgatgttttatctgaacctggaggaacagcggattgaaatgcttcgtgaggaagaggaagctagaaaacgtgaagcggaagagaggaggaagagagaggaggctgaaaggaaagctaaacttgatgccatcgctgaaaagcagcgattgagagagatagagctggaggagaaggcaaaggcaacaagggagaagctcttaaagggatccgaggctgtgcgcgctccagattctgcacctgttgcacagccacctcgagagtcagcagcagcgcctgcagctgctgcggcggcggctgctcctgctcctgctcctagtaaatatattcccaagtttaaacgcggtggtgatagcagcagcatcccttctggcagccgcgatgaagatcgctggggttcacgtggtccgctcaggcaagatggtcctcctgcacgactggatgcaccctcatcacggcaagatactgatcgctggcgtggatcaagatttccctctaactcaacgtcctcttcatcaacctggagccgttcacggaactgatcctatgctgcaggacttttttctagcccatgtgtcgacctccgtgcacaatgtctaatcgtacctttccaggcactgcactccatgcatattgtcgctgttttgtacttttgtagtaatactctacaatccatgattattgtccctgtttgttagtaatgctgttttatctgtgcatgaaacactctatacctacatatagccaagaattgcaggactatgagcctgtttgtttcagcttatagattatataatctagattataatctaaattatatagtctagattataatctagacatattataatctacatgtagttgtttggtagtctagattatacaaatgtagattattcataaagacagcagtacccttatttgattatttgaggtgagg

SEQ ID NO: 110206 - DNA, 2546 bp, Zea Mays
aaccttcgcctctcctcccgttgtcagccgccgtgcctgttctctctgcctttctaaaagtgcggcgactggttgggctgccgccgactgccggggccttcgccgacctcttcgccggcgaagaggtcccatcaggagaaggagtagatcgtcgacccagaaccctcgctgatggcgactttcgcgaaacctgagaacgcgctgaagagagccgaagaattaatccatgttggtcaaaagcagtcagccctgcaggctttacatgatctcattacctcgaaaaggtacaggtcatggcagaagcctctcgaaaagatcatgatgaagtatgtagaactctgtgttgacctgaggaaaggcagatttgcaaaagatggtcttattcagtataggattgtctgccagcaagtaaacgtgtcatccttggaggatgtcataaagcacttcatgcagctttcaaatgagaaagctgaacaagctaagagtcaggtcgaagcactggaagatgctctggatgtcgaagatcttgaagcagacaagcgtcccgaggacctcatgctcagttttgtcagtggggagaaaggaaaggaccgatcagataaagaggttgtaactccatggtttaagttcctctgggagacatacaggactgttctagagatactaaggaacaattcaaagcttgaagcgttatatgctatgactgctcatagggcttttcaattctgtaaacagtataagagaacaactgaattccgtaggttgtgtgagatcatcagaaatcatcttgctaatctcaacaaatatcgcgatcaaagagatcgtcctgatctgactgcacctgaaagtttacaactgtatcttgatacacgtgttgagcagcttaaagttgctacagaactctccctttggcaggaagccttccgatcggtggaagatatccatggtttgatgaccatggtgaagaaaatgccaaaaccatctatcttggtggtctattatgcaaagttgactgagatcttctggatatcggacagccacttatatcatgcgtatgcgtggctcaagcttttcaacttgcagaagagctacaataaaaacttgtctcagaaggatctacagttaatagcatcttctgttttacttgctgcactatccgtgtcaccttatgacaaaaaatatggtgcatttgagacagagaatgagaaagagcgcaacatgcgtctgtccaaccttgttaacttttcgcttgataacaagcgtgaaaacagggaaatgccttcaagaccatatcttctatcagagttggcctccaaaggagtcctttcatgtgcttcccaagaagtgcgagatttgtacaaccttttggaacatgagtttctacctctggatcttgcatcaaaagtgcagccacttcttttgaagatttcaaagattggagggaagctttcatcagcttcttctgttcctgaggtcaagttatctcagtacatttcagcattggagaagctgacaacattgagagtgctacaacaggcctcttgtatttttaaatccataaagattgatatgctctcaagaatgcatgaaagggagacagtaaggaagttgatgttttatctgaacctggaggaacagcggattgaaatgcttcgtgaggaagaggaagctagaaaacgtgaagcggaagagaggaggaagagagaggaggctgaaaggaaagctaaacttgatgccatcgctgaaaagcagcgattgagagagatagagctggaggagaaggcaaaggcaacaagggagaagctcttaaagggatccgaggctgtgcgcgctccagattctgcacctgttgcacagccacctcgagagtcagcagcagcgcctgcagctgctgcggcggcggctgctcctgctcctgctcctagtaaatatattcccaagtttaaacgcggtggtgatagcagcagcatcccttctggcagccgcgatgaagatcgctggggttcacgtggtccgctcaggcaagatggtcctcctgcacgactggatgcaccctcatcacggcaagatactgatcgctggcgtggatcaagatttccctctaactcaacgtcctcttcatcaacctggagccgttcacggaactgatcctatgctgcaggacttttttctagcccatgtgtcgacctccgtgcacaatgtctaatcgtacctttccaggcactgcactccatgcatattgtcgctgttttgtacttttgtagtaatactctacaatccatgattattgtccctgtttgttagtaatgctgttttatctgtgcatgaaacactctatacctacatatagccaagaattgcaggactatgagcctgtttgtttcagcttatagattatataatctagattataatctaaattatatagtctagattataatctagacatattataatctacatgtagttgtttggtagtctagattatacaaatgtagattattcataaagacagcagtacccttatttgattatttgaggtgagg

SEQ ID NO: 110207 - DNA, 3136 bp, Zea Mays
aaccttcgcctctcctcccgttgtcagccgccgtgcctgttctctctgcctttctaaaagtgcggcgactggttgggctgccgccgactgccggggccttcgccgacctcttcgccggcgaagaggtcccatcaggagaaggagtagatcgtcgacccagaaccctcgctgatggcgactttcgcgaaacctgagaacgcgctgaagagagccgaagaattaatccatgttggtcaaaagcagtcagccctgcaggctttacatgatctcattacctcgaaaaggtacaggtcatggcagaagcctctcgaaaagatcatgatgaagtatgtagaactctgtgttgacctgaggaaaggcagatttgcaaaagatggtcttattcagtataggattgtctgccagcaagtaaacgtgtcatccttggaggatgtcataaagcacttcatgcagctttcaaatgagaaagctgaacaagctaagagtcaggtcgaagcactggaagatgctctggatgtcgaagatcttgaagcagacaagcgtcccgaggacctcatgctcagttttgtcagtggggagaaaggaaaggaccgatcagataaagaggttgtaactccatggtttaagttcctctgggagacatacaggactgttctagagatactaaggaacaattcaaagcttgaagcgttatatgctatgactgctcatagggcttttcaattctgtaaacagtataagagaacaactgaattccgtaggttgtgtgagatcatcagaaatcatcttgctaatctcaacaaatatcgcgatcaaagagatcgtcctgatctgactgcacctgaaagtttacaactgtatcttgatacacgtgttgagcagcttaaagttgctacagaactctccctttggcaggaagccttccgatcggtggaagatatccatggtttgatgaccatggtgaagaaaatgccaaaaccatctatcttggtggtctattatgcaaagttgactgagatcttctggatatcggacagccacttatatcatgcgtatgcgtggctcaagcttttcaacttgcagaagagctacaataaaaacttgtctcagaaggatctacagttaatagcatcttctgttttacttgctgcactatccgtgtcaccttatgacaaaaaatatggtgcatttgagacagagaatgagaaagagcgcaacatgcgtctgtccaaccttgttaacttttcgcttgataacaagcgtgaaaacagggaaatgccttcaagaccatatcttctatcagagttggcctccaaaggagtcctttcatgtgcttcccaagaagtgcgagatttgtacaaccttttggaacatgagtttctacctctggatcttgcatcaaaagtgcagccacttcttttgaagatttcaaagattggagggaagctttcatcagcttcttctgttcctgaggtcaagttatctcagtacatttcagcattggagaagctgacaacattgagagtgctacaaggaagtccatcattgaaaaacgtaaagaagagcttgagcgtcaaatattggagaaggaaaaagaagaagaaaaaaagagaatgagcagtcaaaagaaaactgtggatgaggaaagggtgaggcttctcaatgaacagaggcagagggagcaggaccggattcgtagagagatagaggaaaaaaataaagcagaagcaaaaaagatgctagaagatttgaataaggcagggaaaaaacatgtcgttgttgaaggggagcttactaaggaggccatcatggaattggcacggaatgaacagttaaaggagcgccacgaaatggagaaaaaactgcagaagtttgcaaaaacaatggattatctggaaagggcaaaaaggcaggaagaggcaccactgattgagcaagcttttcaaaaacgtcttgaggaagagaagatccttcacgagcaagagcagcttcgggagattgaactcagcaagcaacaccatgccagcgacttgcaagagaaaaatagactttcacggatgttggagcacaagaatgctttacaggagagaatcatccaagaacgtgcagctgagtttggccgtctgaagaaagagagagatgaacggatgaatcggttgatatcttcaagaaagcatgaaagggagacagtaaggaagttgatgttttatctgaacctggaggaacagcggattgaaatgcttcgtgaggaagaggaagctagaaaacgtgaagcggaagagaggaggaagagagaggaggctgaaaggaaagctaaacttgatgccatcgctgaaaagcagcgattgagagagatagagctggaggagaaggcaaaggcaacaagggagaagctcttaaagggatccgaggctgtgcgcgctccagattctgcacctgttgcacagccacctcgagagtcagcagcagcgcctgcagctgctgcggcggcggctgctcctgctcctgctcctagtaaatatattcccaagtttaaacgcggtggtgatagcagcagcatcccttctggcagccgcgatgaagatcgctggggttcacgtggtccgctcaggcaagatggtcctcctgcacgactggatgcaccctcatcacggcaagatactgatcgctggcgtggatcaagatttccctctaactcaacgtcctcttcatcaacctggagccgttcacggaactgatcctatgctgcaggacttttttctagcccatgtgtcgacctccgtgcacaatgtctaatcgtacctttccaggcactgcactccatgcatattgtcgctgttttgtacttttgtagtaatactctacaatccatgattattgtccctgtttgttagtaatgctgttttatctgtgcatgaaacactctatacctacatatagccaagaattgcaggactatgagcctgtttgtttcagcttatagattatataatctagattataatctaaattatatagtctagattataatctagacatattataatctacatgtagttgtttggtagtctagattatacaaatgtagattattcataaagacagcagtacccttatttgattatttgaggtgagg

SEQ ID NO: 110208 - DNA, 3348 bp, Zea Mays
tctcctcccgttgtcagccgccgtgcctgttctctctgcctttctaaaagtgcggcgactggttgggctgccgccgactgccggggccttcgccgacctcttcgccggcgaagaggtcccatcaggagaaggagtagatcgtcgacccagaaccctcgctgatggcgactttcgcgaaacctgagaacgcgctgaagagagccgaagaattaatccatgttggtcaaaagcagtcagccctgcaggctttacatgatctcattacctcgaaaaggtacaggtcatggcagaagcctctcgaaaagatcatgatgaagtatgtagaactctgtgttgacctgaggaaaggcagatttgcaaaagatggtcttattcagtataggattgtctgccagcaagtaaacgtgtcatccttggaggatgtcataaagcacttcatgcagctttcaaatgagaaagctgaacaagctaagagtcaggtcgaagcactggaagatgctctggatgtcgaagatcttgaagcagacaagcgtcccgaggacctcatgctcagttttgtcagtggggagaaaggaaaggaccgatcagataaagaggttgtaactccatggtttaagttcctctgggagacatacaggactgttctagagatactaaggaacaattcaaagcttgaagcgttatatgctatgactgctcatagggcttttcaattctgtaaacagtataagagaacaactgaattccgtaggttgtgtgagatcatcagaaatcatcttgctaatctcaacaaatatcgcgatcaaagagatcgtcctgatctgactgcacctgaaagtttacaactgtatcttgatacacgtgttgagcagcttaaagttgctacagaactctccctttggcaggaagccttccgatcggtggaagatatccatggtttgatgaccatggtgaagaaaatgccaaaaccatctatcttggtggtctattatgcaaagttgactgagatcttctggatatcggacagccacttatatcatgcgtatgcgtggctcaagcttttcaacttgcagaagagctacaataaaaacttgtctcagaaggatctacagttaatagcatcttctgttttacttgctgcactatccgtgtcaccttatgacaaaaaatatggtgcatttgagacagagaatgagaaagagcgcaacatgcgtctgtccaaccttgttaacttttcgcttgataacaagcgtgaaaacagggaaatgccttcaagaccatatcttctatcagagttggcctccaaaggagtcctttcatgtgcttcccaagaagtgcgagatttgtacaaccttttggaacatgagtttctacctctggatcttgcatcaaaagtgcagccacttcttttgaagatttcaaagattggagggaagctttcatcagcttcttctgttcctgaggtcaagttatctcagtacatttcagcattggagaagctgacaacattgagagtgctacaacaggcctcttgtatttttaaatccataaagattgatatgctctcaagaatgattccattctttgacttctctgtcgtggagaagatttctgttgatgctgccaaacaaaattttgttgctataaaagttgaccatttatcgggagttgttcagtttggtactgtggacatagaatctgatggcttaagtgatcaccttagtgttcttgctgattcattaaataaagcaaggattcatatctgtccaccagtgaaaaagccatctaaactcggtgaaagtctcattagtttggctgcaatagtggagaatgaacataagaggctgcttgcaaggaagtccatcattgaaaaacgtaaagaagagcttgagcgtcaaatattggagaaggaaaaagaagaagaaaaaaagagaatgagcagtcaaaagaaaactgtggatgaggaaagggtgaggcttctcaatgaacagaggcagagggagcaggaccggattcgtagagagatagaggaaaaaaataaagcagaagcaaaaaagatgctagaagatttgaataaggcagggaaaaaacatgtcgttgttgaaggggagcttactaaggaggccatcatggaattggcacggaatgaacagttaaaggagcgccacgaaatggagaaaaaactgcagaagtttgcaaaaacaatggattatctggaaagggcaaaaaggcaggaagaggcaccactgattgagcaagcttttcaaaaacgtcttgaggaagagaagatccttcacgagcaagagcagcttcgggagattgaactcagcaagcaacaccatgccagcgacttgcaagagaaaaatagactttcacggatgttggagcacaagaatgctttacaggagagaatcatccaagaacgtgcagctgagtttggccgtctgaagaaagagagagatgaacggatgaatcggttgatatcttcaagaaagcatgaaagggagacagtaaggaagttgatgttttatctgaacctggaggaacagcggattgaaatgcttcgtgaggaagaggaagctagaaaacgtgaagcggaagagaggaggaagagagaggaggctgaaaggaaagctaaacttgatgccatcgctgaaaagcagcgattgagagagatagagctggaggagaaggcaaaggcaacaagggagaagctcttaaagggatccgaggctgtgcgcgctccagattctgcacctgttgcacagccacctcgagagtcagcagcagcgcctgcagctgctgcggcggcggctgctcctgctcctgctcctagtaaatatattcccaagtttaaacgcggtggtgatagcagcagcatcccttctggcagccgcgatgaagatcgctggggttcacgtggtccgctcaggcaagatggtcctcctgcacgactggatgcaccctcatcacggcaagatactgatcgctggcgtggatcaagatttccctctaactcaacgtcctcttcatcaacctggagccgttcacggaactgatcctatgctgcaggacttttttctagcccatgtgtcgacctccgtgcacaatgtctaatcgtacctttccaggcactgcactccatgcatattgtcgctgttttgtacttttgtagtaatactctacaatccatgattattgtccctgtttgttagtaatgctgttttatctgtgcatgaaacactctatacctacatatagccaagaattgcaggactgtatgcatgtaaaacttgcaagattatcaatttttatgagctataaaattaatatctgtgggcaccaaga

SEQ ID NO: 110209 - DNA, 102 bp, Zea Mays
cggatgtccagacattattttttctctcttgctgctacaaccaatcaactatccagggttccatcatacggtaatcatggcaagtacgtatccgggcgtcag

SEQ ID NO: 110210 - DNA, 1882 bp, Zea Mays
acatcatcgccccccttccccgcggccccaccaaatagagaggcccagacaccgaggggaaaaaggagagagagtacacaggtgacagccgctgcaccgagggcacagagggacagctagacagggactgccagcggcgtaggcggtgtgggggatggagcgcgagatggcggacgcgcccgccgcggcgatccccgccgccgagccgctcgcggcggtggcggaggaaggggagggggaggcggccgccgaggcagtggggtccaccctcaccatggagcgcgtcgccgccgcgaagaagttcatcgagagccactaccgctcgcagatgaagaacatccaagagcgcaaggagaggcgctttagattggagagacagctagcttcttctcaagttcccaaggaacaacaaatcaatttaatgaaagatcttgagaggaaggaaactgaatacatgcgacttaaaaggcacaaaatttgtgttgatgattttgagctgctcactattattgggagaggtgcttttggagaggttcgattgtgtcgagagaggacctcaggcaacatttatgcaatgaaaaaactcaagaagtctgatatggttgtcaggggccaagtggaacatgttagagctgaaagaaacttgttggccgaagttgctagtcatcactgcattgtgaagctttactattctttccaagacactgagtatctttaccttattatggagtacctccctggtggtgatatcatgacccttctcatgagagaggataccttgactgaacatgtggcacgattctacgttgctgagactattcttgctatcgaatccatccataaacataactacatccacagagatattaagcctgataatttgcttctagataagaatggtcacatgaagctgtcagattttgggctgtgtaagccaattgattgttcaaagctctcaactttgaatgaagatgaacccatgagtgatgacaacttgagggaatcaatggatattgatagttctttgtctgatacagcaaatggtagaagatggagaagtcaacacgaacagcttcagcactggcagatgaacaggagaaaactggcattctcaactgttggaacaccggattatattgctccagaggttcttctaaagaagggatatggaatggaatgcgattggtggtctctgggcgcgatcatgtatgagatgctagttgggtatccaccattttatgctgatgatccaataactacatgcagaaagggaagcttattgtcttatcatcaaaataaggctaagtcagcacagaaagctgctttatccctctttttagctgatattattgtgcactggagaaaccatttgaagtttcctgaggatgcaaagttgtcaaatgaagcaagagatctcattagccgattattatgtgatgttgaccacaggatcggcagtgcaggggcagatcaaataaaggcacatccttggttccgaggagttgcatgggataaactttatgaaatggaagcagcatttaagcctcaagtaaatgatgaactggacacacagaatttcatgaaattcgaggaactcatgaatcttgtttctccaacttcattattctctgtggcagttggaaaatcctccagccaaaacaggctctggaccttcaaggaagaagtacaaagcagtagagcactagagcgcactagtattactgctgtaagtgctgtttgtcctcggcaaatttctgaactaaatcagcatgcaaacgcctggatgatgtggctccagctggataacctgctcatttttagccaggtttctgctttctcaatcgtgggcaagcggtttgtagaaatccaccagagtttctag

SEQ ID NO: 110211 - DNA, 1005 bp, Zea Mays
atgtcgatggagagcccagagagccgggcatgtatcttctccatcgccgagttaataacacaacatgagtctcgaccgatcgacccgcaagccgttgtgcacacgcgcgcgcgcgtgccgaccgatccagcccaactagacaccggcagcgggcaccatgcacacgcgcagcgtgaacgcgacgaccacggacgccacggccaccaccatcccccacttctgcgcgctgctggccaccgccgccgctttctcgccgccgggcctcgccacgatggagaacatggacaggccgaggctggagaagaagccgaggacgatgaacgccatgtcggcgccgtacagcagggccggcgggggcagcgcggcgcccggctgccgctgctggctggggaggttgacgaacagcacgagcgaggcggacgcggcgaagaggcagacggtctgcacggccttgcccacgcgcttggactccgcgtcctgctgctggtcgctgcccggatcctcctcgtggcccgccgcctcgatgtcgatcgagtggccggccgcggtcggcgtcgtgcccggcggtgcggcagcaggcgccgcagccgcttctggtgctgtcgtcggcggaggaggaggaggagcagaggccgcctccgtctgcgtggacgaccgcccgccgagctccgcgtcgtcgtgctcgcgcagcaggctggtccggtcgttgaaggagccggtgaagctgagcacgcgggtgatgaggccgccgtagctgttggtggtggaagcgagggaggacgtgagcttgttgaagaaatccatgagttgcagtgcagcttgcgacacacaagtccacttcacttcactgtaccaacagctctaccgctaccactcatcagttgccttgccactcatctatttatggagaccccgatgccagatcacatgcatgcacggatggacatggacatggagagaccggtttaccttcatttcgtggtggttggttttctagatgactag

SEQ ID NO: 110212 - DNA, 198 bp, Zea Mays
atgggtcaaggtctataccatcgtcgaaaagccatggaatcgggtccgggggcttcgcagagtttccgtggggatgctcgtcgcttctctgggcgccatttatggtcggtgcggtgtgaatttctcaccgacgttgggatacgccttggtgctgcgcatggacaaagccagacattcttgtgccgccaaccttggtaa

SEQ ID NO: 110213 - DNA, 1567 bp, Zea Mays
aagcttcagccggtgctggcaatgatggaaggctgagtatagaacacaccagatctatggccccaagctctttgaccccctgctctgcgctttctattcatgtaataaataagaacggcaatgaggatgctttgcctgtctgccttgaagcgaggcctgtagaacgtggtgctggagatatgattggtgttggtgcgctttcaacaaaagaaactgagataaagtgtataaaaggtacaaaaactctttggtcagatcgtatctctggaaaggttactgtcttggctggcaatgcaaatttctgggctgttggttgcgaagatggtttcctgcaggtttacacaagatgtggagtgcgagcaatgccagcaatgatgatgggatctgcagctgtttttattgattgtgacgactcctggaaattgcttcttgtcacaaggagaggtctaatgtacatatggaacctttatgacagggcctgcattttgcatgactccttagcttctttggttgcatctccagatgagtcatctgcaaaagatgctggtacagtaaaggttatatctgccacattctcaagatgtggatcacccttagttgtccttgccagccgtcatgcttttctttatgacatgagcctgaagtgctggttaaggattgctgatgattgttttccagcatcaaattttgctagctcgtttagtttcccacaaggtggggagctaggcaagttgcagattgacataggcaagttcatggcgagaaagcctatttggagcagggttacagatgatgggttgcagacacgtgcccatctggagaaccaacttgcctcttctttggctttgaagtctgcacaggagtaccgtcaatgcctcctatcttatgtacgatttttagcaagagaagcagatgaatctcgtttacgtgaagtttgtgagagcttcctaggtcctccgatgggcatggttggttcggcatcacctactgatcccaaaaatctagcgtgggaccctgatgttcttggaatgaagaagcacaaacttcttaaagaagatatacttccttcgatggcgtcgaaccggaaagtgcagcggctgctcaacgagttcatggacctcctgttagaatatgaaacggatgtcacactgataccgcaacctggaacagaaggcaatggcaatggcaatgacaaggtgatgacctcgtagctacccttgacatgctcagtacagttgctggagagtggagactcaccttccgggtaggtgtgtaggattagtttggcgcggatatggagtgtccaattggagaggtgcttatgtgaatcaattagttgtgcatgtagctggtagactatttattaaggtgaccctgacccccggcaaaaagggaaagggaaggggaaaaaactgtaacgctgagtgtaacagtagaaatggaagcgaggttcgcctggtgattattgtgtcagtgtcagcagtctgtaaaaggacggatgaactcgtgtcctttttcattccaaggcagtattggccttgatagttttttagttgaggctgtgttt

SEQ ID NO: 110214 - DNA, 1762 bp, Zea Mays
ggcacctcgagattcgagcgctgctcccgtactacttactactcgagagtcgagactgctttgttttttttgttgatggaaaagaaccagaagggtagtactcgagagcacgaatcgccacgtccgccagaggatgagcttgagcagctccaactccaacgcgtgacaaaacaaacagaaccgtcacaaaaataaataaaccaaacggggcctaaataaaaagtcgtcgacaaaaatttggcagccataggccatagcccccgctgccccccgggcgcagatcttttctgggcttctggctcccctctcccgccgatcacgccgcctcacctcgccgggcggcgtgatggcgacttccggggccggcgaccacgggcagggccagggccaggggcacggccgcttcgcgtcgtccctgacggcgcgctactcggactgggtgctggagacgctggacgagctcccagggagcttcctgctcacggaccccgccctgccgggccaccccatcgtgtacgcttcccggggcctcgccgcgctcaccggctacgcgccgcgcgacgtgctgggccgcaacgcgcgcctcttccagggcgccgccaccgaccgcgccaccgtcgccggcgtccgcgaggccgtccgcgcgcaccgcccgcaccaggccgccatcctcaactaccgccgcgacggcgccccgcactgggtcctcctccacctcgcccccctattccacgcccgcgacggcaccctgctccacttcctcgccgtccaggtgcccatcgcccccgccgccgtcgcgcgcggggcgacgtgccacacgacggggcatctgctagccgcgtgccgtgacgaggccagcagggtcgcggaggatttcccctgcgccacccacgcgggcaaggtgtttgtcgatatggacaagagagggctggagaccgaggaaccacgtgtacctagcgatagtgagaaagatatggcaataagtacggctaacagcattgtctctgcgctgaacagctacagcaagctaactggtctagtggtcagcaggaagagatgtgactcgattggcatcccagcactcagttcgtcgttaaaactctctctcggtagaatcaaacagagctttgtattgactgactcccgcttgcctaacatgccaattatttatgctagtgatgcttttacatcattaacaggttactcaagagaagaaatattgggctgtaactgcaaagtcttaaatgggccaggcactagcttggaggttttagaggagataaatcagcatatttgttctgagcaggcatgcacggtggatctactgagttacaggaaagatggaagttcattctgtgatcatctacatgtatctcctatccgagatgcttcgggcaaggtggcctttcatatctgggttcaccttgacatgggtgcaaagcacgattttagtgggctgacccccgagaaatggctgcttggcgctgttggtgcggtgagggttgctgtgagaggcttgtcggcgtcaggtagcctgttgagaccatcccaatagcagttttagtctcctcgccatttcatgaccacggcgaccggccttccacgatgtacattgctgcttgctattctgtgtaaagcaactgcttagcatgacaaagtaaatgagttcgttttgaaggaaaatccatggtaaatacaagatgttgctgtgactatataaccaggtggggtgaagtaaagaaaaaggaaatagaagctgctg

SEQ ID NO: 110215 - DNA, 1759 bp, Zea Mays
ggcacctcgagattcgagcgctgctcccgtactacttactactcgagagtcgagactgctttgttttttttgttgatggaaaagaaccagaagggtagtactcgagagcacgaatcgccacgtccgccagaggatgagcttgagcagctccaactccaacgcgtgacaaaacaaacagaaccgtcacaaaaataaataaaccaaacggggcctaaataaaaagtcgtcgacaaaaatttggcagccataggccatagcccccgctgccccccgggcgcagatcttttctgggcttctggctcccctctcccgccgatcacgccgcctcacctcgccgggcggcgtgatggcgacttccggggccggcgaccacgggcagggccagggccaggggcacggccgcttcgcgtcgtccctgacggcgcgctactcggactgggtgctggagacgctggacgagctcccagggagcttcctgctcacggaccccgccctgccgggccaccccatcgtgtacgcttcccggggcctcgccgcgctcaccggctacgcgccgcgcgacgtgctgggccgcaacgcgcgcctcttccagggcgccgccaccgaccgcgccaccgtcgccggcgtccgcgaggccgtccgcgcgcaccgcccgcaccaggccgccatcctcaactaccgccgcgacggcgccccgcactgggtcctcctccacctcgcccccctattccacgcccgcgacggcaccctgctccacttcctcgccgtccaggtgcccatcgcccccgccgccgtcgcgcgcggggcgacgtgccacacgacggggcatctgctagccgcgtgccgtgacgaggccagcagggtcgcggaggatttcccctgcgccacccacgcgggcaaggtgtttgtcgatatggacaagagagggctggagaccgaggaaccacgtgtacctagcgatagtgagaaagatatggcaataagtacggctaacagcattgtctctgcgctgaacagctacagcaagctaactggtctagtggtcagcaggaagagatgtgactcgattggcatcccagcactcagttcgtcgttaaaactctctctcggtagaatcaaacagagctttgtattgactgactcccgcttgcctaacatgccaattatttatgctagtgatgcttttacatcattaacaggttactcaagagaagaaatattgggctgtaactgcaaagtcttaaatgggccaggcactagcttggaggttttagaggaggtgcgggccaggattatatagcttgcatgcacggtggatctactgagttacaggaaagatggaagttcattctgtgatcatctacatgtatctcctatccgagatgcttcgggcaaggtggcctttcatatctgggttcaccttgacatgggtgcaaagcacgattttagtgggctgacccccgagaaatggctgcttggcgctgttggtgcggtgagggttgctgtgagaggcttgtcggcgtcaggtagcctgttgagaccatcccaatagcagttttagtctcctcgccatttcatgaccacggcgaccggccttccacgatgtacattgctgcttgctattctgtgtaaagcaactgcttagcatgacaaagtaaatgagttcgttttgaaggaaaatccatggtaaatacaagatgttgctgtgactatataaccaggtggggtgaagtaaagaaaaaggaaatagaagctgctg

SEQ ID NO: 110216 - DNA, 1859 bp, Zea Mays
ggcacctcgagattcgagcgctgctcccgtactacttactactcgagagtcgagactgctttgttttttttgttgatggaaaagaaccagaagggtagtactcgagagcacgaatcgccacgtccgccagaggatgagcttgagcagctccaactccaacgcgtgacaaaacaaacagaaccgtcacaaaaataaataaaccaaacggggcctaaataaaaagtcgtcgacaaaaatttggcagccataggccatagcccccgctgccccccgggcgcagatcttttctgggcttctggctcccctctcccgccgatcacgccgcctcacctcgccgggcggcgtgatggcgacttccggggccggcgaccacgggcagggccagggccaggggcacggccgcttcgcgtcgtccctgacggcgcgctactcggactgggtgctggagacgctggacgagctcccagggagcttcctgctcacggaccccgccctgccgggccaccccatcgtgtacgcttcccggggcctcgccgcgctcaccggctacgcgccgcgcgacgtgctgggccgcaacgcgcgcctcttccagggcgccgccaccgaccgcgccaccgtcgccggcgtccgcgaggccgtccgcgcgcaccgcccgcaccaggccgccatcctcaactaccgccgcgacggcgccccgcactgggtcctcctccacctcgcccccctattccacgcccgcgacggcaccctgctccacttcctcgccgtccaggtgcccatcgcccccgccgccgtcgcgcgcggggcgacgtgccacacgacggggcatctgctagccgcgtgccgtgacgaggccagcagggtcgcggaggatttcccctgcgccacccacgcgggcaaggtgtttgtcgatatggacaagagagtttgctgttgcagggctggagaccgaggaaccacgtgtacctagcgatagtgagaaagatatggcaataagtacggctaacagcattgtctctgcgctgaacagctacagcaagctaactggtctagtggtcagcaggaagagatgtgactcgattggcatcccagcactcagttcgtcgttaaaactctctctcggtagaatcaaacagagctttgtattgactgactcccgcttgcctaacatgccaattatttatgctagtgatgcttttacatcattaacaggttactcaagagaagaaatattgggctgtaactgcaaagtcttaaatgggccaggcactagcttggaggttttagaggaggtgcgggccaggattatatagcttgtatgaccacattctccataatatagcttaccttttaaaatttatattcaaaattggacgtacagataaatcagcatatttgttctgagcaggcatgcacggtggatctactgagttacagatggaagttcattctgtgatcatctacatgtatctcctatccgagatgcttcgggcaaggtggcctttcatatctgggttcaccttgacatgggtgcaaagcacgattttagtgggctgacccccgagaaatggctgcttggcgctgttggtgcggtgagggttgctgtgagaggcttgtcggcgtcaggtagcctgttgagaccatcccaatagcagttttagtctcctcgccatttcatgaccacggcgaccggccttccacgatgtacattgctgcttgctattctgtgtaaagcaactgcttagcatgacaaagtaaatgagttcgttttgaaggaaaatccatggtaaatacaagatgttgctgtgactatataaccaggtggggtgaagtaaagaaaaaggaaatagaagctgctg

SEQ ID NO: 110217 - DNA, 1793 bp, Zea Mays
ggcacctcgagattcgagcgctgctcccgtactacttactactcgagagtcgagactgctttgttttttttgttgatggaaaagaaccagaagggtagtactcgagagcacgaatcgccacgtccgccagaggatgagcttgagcagctccaactccaacgcgtgacaaaacaaacagaaccgtcacaaaaataaataaaccaaacggggcctaaataaaaagtcgtcgacaaaaatttggcagccataggccatagcccccgctgccccccgggcgcagatcttttctgggcttctggctcccctctcccgccgatcacgccgcctcacctcgccgggcggcgtgatggcgacttccggggccggcgaccacgggcagggccagggccaggggcacggccgcttcgcgtcgtccctgacggcgcgctactcggactgggtgctggagacgctggacgagctcccagggagcttcctgctcacggaccccgccctgccgggccaccccatcgtgtacgcttcccggggcctcgccgcgctcaccggctacgcgccgcgcgacgtgctgggccgcaacgcgcgcctcttccagggcgccgccaccgaccgcgccaccgtcgccggcgtccgcgaggccgtccgcgcgcaccgcccgcaccaggccgccatcctcaactaccgccgcgacggcgccccgcactgggtcctcctccacctcgcccccctattccacgcccgcgacggcaccctgctccacttcctcgccgtccaggtgcccatcgcccccgccgccgtcgcgcgcggggcgacgtgccacacgacggggcatctgctagccgcgtgccgtgacgaggccagcagggtcgcggaggatttcccctgcgccacccacgcgggcaaggtgtttgtcgatatggacaagagagtttgctgttgcagggctggagaccgaggaaccacgtgtacctagcgatagtgagaaagatatggcaataagtacggctaacagcattgtctctgcgctgaacagctacagcaagctaactggtctagtggtcagcaggaagagatgtgactcgattggcatcccagcactcagttcgtcgttaaaactctctctcggtagaatcaaacagagctttgtattgactgactcccgcttgcctaacatgccaattatttatgctagtgatgcttttacatcattaacaggttactcaagagaagaaatattgggctgtaactgcaaagtcttaaatgggccaggcactagcttggaggttttagaggaggtgcgggccaggattatatagcttgcatgcacggtggatctactgagttacaggaaagatggaagttcattctgtgatcatctacatgtatctcctatccgagatgcttcgggcaaggttcgcttacatctttctcaggtggcctttcatatctgggttcaccttgacatgggtgcaaagcacgattttagtgggctgacccccgagaaatggctgcttggcgctgttggtgcggtgagggttgctgtgagaggcttgtcggcgtcaggtagcctgttgagaccatcccaatagcagttttagtctcctcgccatttcatgaccacggcgaccggccttccacgatgtacattgctgcttgctattctgtgtaaagcaactgcttagcatgacaaagtaaatgagttcgttttgaaggaaaatccatggtaaatacaagatgttgctgtgactatataaccaggtggggtgaagtaaagaaaaaggaaatagaagctgctg

SEQ ID NO: 110218 - DNA, 1646 bp, Zea Mays
gccacgtccgccagaggatgagcttgagcagctccaactccaacgcgtgacaaaacaaacagaaccgtcacaaaaataaataaaccaaacggggcctaaataaaaagtcgtcgacaaaaatttggcagccataggccatagcccccgctgccccccgggcgcagatcttttctgggcttctggctcccctctcccgccgatcacgccgcctcacctcgccgggcggcgtgatggcgacttccggggccggcgaccacgggcagggccagggccaggggcacggccgcttcgcgtcgtccctgacggcgcgctactcggactgggtgctggagacgctggacgagctcccagggagcttcctgctcacggaccccgccctgccgggccaccccatcgtgtacgcttcccggggcctcgccgcgctcaccggctacgcgccgcgcgacgtgctgggccgcaacgcgcgcctcttccagggcgccgccaccgaccgcgccaccgtcgccggcgtccgcgaggccgtccgcgcgcaccgcccgcaccaggccgccatcctcaactaccgccgcgacggcgccccgcactgggtcctcctccacctcgcccccctattccacgcccgcgacggcaccctgctccacttcctcgccgtccaggtgcccatcgcccccgccgccgtcgcgcgcggggcgacgtgccacacgacggggcatctgctagccgcgtgccgtgacgaggccagcagggtcgcggaggatttcccctgcgccacccacgcgggcaaggtgtttgtcgatatggacaagagagtttgctgttgcagggctggagaccgaggaaccacgtgtacctagcgatagtgagaaagatatggcaataagtacggctaacagcattgtctctgcgctgaacagctacagcaagctaactggtctagtggtcagcaggaagagatgtgactcgattggcatcccagcactcagttcgtcgttaaaactctctctcggtagaatcaaacagagctttgtattgactgactcccgcttgcctaacatgccaattatttatgctagtgatgcttttacatcattaacaggttactcaagagaagaaatattgggctgtaactgcaaagtcttaaatgggccaggcactagcttggaggttttagaggagataaatcagcatatttgttctgagcaggcatgcacggtggatctactgagttacaggaaagatggaagttcattctgtgatcatctacatgtatctcctatccgagatgcttcgggcaaggtggcctttcatatctgggttcaccttgacatgggtgcaaagcacgattttagtgggctgacccccgagaaatggctgcttggcgctgttggtgcggtgagggttgctgtgagaggcttgtcggcgtcaggtagcctgttgagaccatcccaatagcagttttagtctcctcgccatttcatgaccacggcgaccggccttccacgatgtacattgctgcttgctattctgtgtaaagcaactgcttagcatgacaaagtaaatgagttcgttttgaaggaaaatccatggtaaatacaagatgttgctgtgactatataaccaggtggggtgaagtaaagaaaaaggaa

SEQ ID NO: 110219 - DNA, 1594 bp, Zea Mays
gccacgtccgccagaggatgagcttgagcagctccaactccaacgcgtgacaaaacaaacagaaccgtcacaaaaataaataaaccaaacggggcctaaataaaaagtcgtcgacaaaaatttggcagccataggccatagcccccgctgccccccgggcgcagatcttttctgggcttctggctcccctctcccgccgatcacgccgcctcacctcgccgggcggcgtgatggcgacttccggggccggcgaccacgggcagggccagggccaggggcacggccgcttcgcgtcgtccctgacggcgcgctactcggactgggtgctggagacgctggacgagctcccagggagcttcctgctcacggaccccgccctgccgggccaccccatcgtgtacgcttcccggggcctcgccgcgctcaccggctacgcgccgcgcgacgtgctgggccgcaacgcgcgcctcttccagggcgccgccaccgaccgcgccaccgtcgccggcgtccgcgaggccgtccgcgcgcaccgcccgcaccaggccgccatcctcaactaccgccgcgacggcgccccgcactgggtcctcctccacctcgcccccctattccacgcccgcgacggcaccctgctccacttcctcgccgtccaggtgcccatcgcccccgccgccgtcgcgcgcggggcgacgtgccacacgacggggcatctgctagccgcgtgccgtgacgaggccagcagggtcgcggaggatttcccctgcgccacccacgcgggcaaggtgtttgtcgatatggacaagagagtttgctgttgcagggctggagaccgaggaaccacgtgtacctagcgatagtgagaaagatatggcaataagtacggctaacagcattgtctctgcgctgaacagctacagcaagctaactggtctagtggtcagcaggaagagatgtgactcgattggcatcccagcactcagttcgtcgttaaaactctctctcggactgactcccgcttgcctaacatgccaattatttatgctagtgatgcttttacatcattaacaggttactcaagagaagaaatattgggctgtaactgcaaagtcttaaatgggccaggcactagcttggaggttttagaggaggcatgcacggtggatctactgagttacaggaaagatggaagttcattctgtgatcatctacatgtatctcctatccgagatgcttcgggcaaggtggcctttcatatctgggttcaccttgacatgggtgcaaagcacgattttagtgggctgacccccgagaaatggctgcttggcgctgttggtgcggtgagggttgctgtgagaggcttgtcggcgtcaggtagcctgttgagaccatcccaatagcagttttagtctcctcgccatttcatgaccacggcgaccggccttccacgatgtacattgctgcttgctattctgtgtaaagcaactgcttagcatgacaaagtaaatgagttcgttttgaaggaaaatccatggtaaatacaagatgttgctgtgactatataaccaggtggggtgaagtaaagaaaaaggaa

SEQ ID NO: 110220 - DNA, 943 bp, Zea Mays
cgcaacgcaacggcagcagctcagctcagctcgctcgctcgctatagctccacagtggccggccggccggtgtcctgccgtgtgccgtgcgcgtgcgtctactctagtactctactacatggcggcctcgctaggactcgcccacgagacgagctacgccgcctaccacccgccgtccgcgcccgcctcctcgtacttcccaccactaccaccacccgacctcctcgtggcggacctcccgccgcccgccgccgccaccatggccgatgactacttccagttcggattcgacggccaggagatggtgggcgctcccgctcccgcctgcggcggctacgactgctcggcgccggtgttcgccaacagttcttcagacgccgccgccgccgtcggcaatggcatgagcctgctgagctatggcgtcgacggcgacggcgacgggaggaggccgatgagcggaccaccatatggcaccggtgggaacggcggcggccggccgccgtcgtcgtcacggattgggttccggacgcggtcggaggtggacgtgctggacgatggcttcaagtggcgcaagtacggcaaaaagacggtcaagagcagccccaacccgaggaactactaccggtgctcggcggagggctgcggcgttaagaagcgcgtggagcgggacagcgacgacccgcgctacgtcgtcaccacctacgacggcgtccacaaccacgccgcgctgggcccgggcgccgcctcctacctgtgccaaccaccgcctccgcgcggcgcaaccgcaaccgcaaccgtaacgcccttctcgcctccacgctcggcctcggcgccggcgcccctggctgcagcgcccagctggagcgccgcctgtgacgcgtgggaggcgcagctgcacgccgcggcggcggctgctcactcgtcggagtcgtcgtactgatcc

SEQ ID NO: 110221 - DNA, 137 bp, Zea Mays
catctcgtcccatgtgatttacactttatacatattctcgaaactacatctattcgttattttgacttgattagattataattaacttttatctctacctagtaagtagcttgttttatttgatacaatcttttacc

SEQ ID NO: 110222 - DNA, 1651 bp, Zea Mays
caaacaacggaaaaatggacagtataaccttttttattgtctcggtctcatatcaaatggtgtagtacaaattaagatcgaatttgcttgctgtgatctaatgtggtacgtattgaccaagataaagtgaaccccaaaaaaaatacaaccaaaagtaacaacagcatcaacgaaacagaagcatgtttacgtcaccattcatcatctccctgcagccagggctcaggatgatcatcagcagtatataataagctaggaagaacaagttcagggcaggtcttccttcatgccacgggcgaactcctcggagtgttccttggtgacgcagctggcgagcatcctggtgccgtcgagcgggagcggcgccttgaggaagacgacggaggcgatgaagtcgttgttgacgagcgggccggcgaagatgggcgggccgaagccgtagtcgacctcggagaagccgagcttgctccagtcggagacgtagatggactcgtagttgaaggtcatctggaacgggtcctggtccgtctcctccccagcgaagcgggagaactcgacggccatcctgtccttggcctcccggatgatgtcgaccacctccacgagcgaggaggccagcaccttgtcggccggcgcggacatcttgacggggaagatggagttgccgtagtacccccggtcgagcttgagcaggtggcggacgctggcgaagaagcagagcttgacctcggcggccgggtccagggccagcgcccgggtgcggcactgccagagcttggccgtgagcacgtcgaagccggagcagaacctgccgctgtgcgccttgtactcccgcttgagcccgtcgatgtaggccgtggggaagtcgagcacgacgtagtccagcgccagcacgggcagctccgggagcgggcctggcttgatgctcgggtccgggaacttctcccggtgccacacgggcagcaccctcggctccgccagcccccgcgccatgtcccccaccgcgttgatgaactgcgccgcgcccatgccgtccgccgacgcgtggttgaaccgcaggcccatcacgaagccgccgcaggtgaacttgatacctgcatcatcatgatggtgttgtgcggctcgacgggccagcggtcgtcgccggggtaaggcacgaggtcctccttgggcagcagcaggggccgctccaggaagcgcacgtcctccaggctgcagtccgcctcggcctccgcgaagtagacgccgtcggcggtgcagcggatggcggggcgccccggctgctccccctccacgatgcggcccgccagcgggtagaagaaggccagcgccttggccagcgccgcccggatcacggccggggcctcgcccgcgcccgaccggaagatgtgcatcgactccaccaggccacggtgcgtcgggtaccggtccacccaagccagcggcagcgtctcctcgggcgtcgccgacgccggcttcacggggccctccgagatccgcgtcaccttgaaccccgccatgcccgacgacgacgacgactctgctcttgggctgtggctttgtgtggatggtgagaatggcgtctcgggaatttgttgggtggactggaggcaccaggcaggcggcttaaatggaggaggagctggacgga

SEQ ID NO: 110223 - DNA, 820 bp, Zea Mays
aagcttgtgcctcaatggaaaccacaaatagcttcaagctagaaggagtgattcctatagtgtttgtagagctgagaaagttgtaaccaatttcatataaggagagattcctatataagtgttgtgtgtattgagtgtttgtgataatcacttacgtgagagggagagatttccaacataaataagactccacaagacaacagcacataaaccaaacaagatcttgagaaagccaaggacatacttgacctaagcatgcaaatacatcaaaggagaacactaaaacaaaacatgaagatatttgttgttccagtatccaaattcagaacaaaattcttttcgttatgttcatggttgggcacagatctcaggatcgagtgccgggcacttgcacttgcagtcttcttactattgggaaaactttcatgggatcttgactattgagagctgctaagaccaagaggagaataggaactctactactattctgggttggaaaaaaattctaggctcaaggcacacagcattgtgtctcaacaccaaaattaaacaaataagtcctcttccaactgggagccattgttcatggaatcaacgagggaaagaacaagaccccatggttagtcttgttactgttacttgtaactagtgatacacatgtaaccagatttattgttacaaagaccatatatttaagaacagaggtggtacaagccatggacatatctctaatgcaagtaatctaaacaatcagcagaaagcattgtaaattgaaataagatgaaacttcaggttaagtactgaaaaaaaaagttaagaa

SEQ ID NO: 110224 - DNA, 351 bp, Zea Mays
gtaatcgttgatcaagcagaaaagaaacatgctgtttggaatttttacaataatctccttggggttgctgtttctagggaatttaccctcaatttgggagtcttccaccgaccagccagcaatcttgaagtactggatcatggatttagtgaagaagaggtctggaatactatcaagtctattccttcggacaaagccccgggcccagatggttttactgggcgtttttataagtgtgcctggacggttgtcaaaggggatttcttggcagccctgtcagtaattctccagggggactcttccaagctttatctccttaactcggcgtatgtgactctcttaccaaaaaag

SEQ ID NO: 110225 - DNA, 1877 bp, Zea Mays
ggcaaaattgctaatggctcctcgcccagccgccgcctccgcccctcacccagccgccgcctccgcccctcacccgccgcctctccgcctcttcctcccctccccctcccatcgtgatcgcccccctcgacctctcccacctgccgccatacggcacttccacccgaccggcttgtagttggagagcgccgccacgagcggcaccgacgacgacgacatcgtgggcatctgcacggccgtgcacgggctgcacgcgtagcacaagccgcggcagctcggcgggctcgaccccagccgcaccttctcctcctcctccttcgccgccgccgctccgtcgtcgccctgctgccgcaccattgatccgttagcgtggcacaacattaactccggccaagcacccacctggactgttgaaacaatcgctcacaggcaacattatcagaactgttgatcaattatggcaagagcttcttggaatatgaattatgagaagagtcttgttgacatcttgcatgagcataataatccaagatttaggggtcaaaatggttggattccggagggctggcgtagtataactcaaatgttcaatgagaaatttcctctagctcaattttcgaaagcgcaaatccaagagaaagaaaaagagctcaaagcaaattacaagttaataaaggaagcccggaaacaaagtggggctggatggaatgacagccttggcatgataaatgcattgccaccaatatgggacagaataattaaaaaccatccaaagatgaagaagttccaatcaaagccatttcctctctacaaccaattggaattgctatatcaaggaagctgtgcaaccggagatctaaattttacatccacgcaacaactagcaccggttcagcaggtttcaaaccctcaagatgatgctgtaaatgaagctgtaagctcttttaggaatgatgaccttgagctcgattccggtttaaatccatcctcctcaaatgttcaaaggcacgcagtttcaagtactcatgctgatcttggcacaaatgaccggacaccggcatcttcggattgtagagaggatagtcatggaaggaagtgcaagcaaaaccaaatcgctggggttcttgaggattttttgcaattcaagaaggaacaaagtaacaagtttattagtgaggtcaatcaaccatcaaatgaaagaagcaaagaagagtattccattggaaagtgtgttgctattttggagtcaatggaagatctaagtgaagaagaaatggcaaaagcattaggagtgtttaagtgtgaagaaaaccgggagatctttatgactaccaagagggcacgtgttaggttgttgtggcttagggatgagattaacaaacaggtgctatctccacgagtgagtggtgtatgaggattcctgtacttggaagtgtgtagaaatattgatgtgagatgctaaagctactgaagtaagaagtgcaattgttaagaaaactgaagtaatgagattgttaagaatattgagatctcttgtgcttgatctaatgtaataggacctattagcttctatatttggatgacattgtctttgtataatttgagcacttggtactttctatagtctggaatgatctaataatttagcacttggtactttctatacctggatggcatgtctctatgctgtggtggtgttgaactgaagttgagcatgcataatggagaaccaggagaatcagattgtggtgttgtattgttgttgctataatttttcatttgtgagcttttgtcaacagtggatcgataaacttgtaaaaccaatgtgatattaagtgctgttgaaaactttatttgaagcaacaaaatgttggatg

SEQ ID NO: 110226 - DNA, 2561 bp, Zea Mays
actagtttatatatcttgtgcgatacaatgctttttattttactcaccagtttatatatcttgtgtgatctgccaattatgcttgtattgatctgccttgtatttttaatatatttgttctgccttgtatttgtgttttataattatctgtagtccatatatatttctaaagtccatataatctgtagatattagataatgggctcaaggaatgagattatggagtgtagaaggaagaaaattctgaaattcatggaaatggaggaggaagaggatgaggaactattttttatcatcattcctagcatactcgaaggacttaatgaagaaaaaagggcagtacatacttctgaatatactggtgctaagaagattagagaaattttagaaggccacgagaattggtgtatgagcgagtttcgcatggagccacgaatatttaaggcaatagctaattatctaggcgggagaggcttttgcgcgatacacgcggagtcacaattgaggaacaattaggaatatttatgttcatgatatcacacaatgctagtaatgggaggctacagaagacatttcagcatagtggcgaaacaatccatagacatgtgaaggccgtcttcaatataattcctaccctcacatgtagatttgtcaaacttcctacttccttggaacctcatcctaagattgcctcggactcccgattttggccattctttcagaattgtataggtgctattgacggtactcacgtccctatcacaatttcagaagagaaagccccaccatataggaatagaaaaggaacattatcccagaatgtgatggtagcgtgtgacttcaacttgaacttcacttttatctcatgcggctgggaaggatccgcatcagatgctggggtgcttaaatccgctattagcaaaggttttcatgtcccagagggcaagttttaccttgtcgacggtggatacgcaaacacaccatcatttcttgctccatatcgtggtgtgagataccaccttgcagaacggcgtcgtcgagcggcgcaaccagacgattataaggagcttttcaaccatcgtcatgctattcttagaaaccatattgagcgggctattggggtattaaagaagagatttcagattctcatagtgggtactcatcatcccactgagtctcaaagtaaaatcccagctgcagcagctgtgtttcataacataattagaagattaaatggagatgatatgtggctagaacaacaaccaagtcatattcaaccagcagattttattgatttgcccgatggagatgacaactatcagaatgatgtagagtcaatgaatttacaaagcagccagggaaatattcttagagatcaaattgcaatgcaaatgtgggaccaatacatccaagatcgggcatgaaagctggttagtagttggttgttttgaaagctgcatattagttattaattttcagaattgtttagtagtttttgttgtttttcttgattgctttttagttagttttcagaactgtttagtagtttattatattgaaagctgctgattagttggttattttcatagaactgttgatcaattatggcaagagcttcttggaatatgaattatgagaagagtcttgttgacatcttgcatgagcataataatccaagatttaggggtcaaaatggttggattccggagggctggcgtagtataactcaaatgttcaatgagaaatttcctctagctcaattttcgaaagcgcaaatccaagagaaagaaaaagagctcaaagcaaattacaagttaataaaggaagcccggaaacaaagtggggctggatggaatgacagccttggcatgataaatgcattgccaccaatatgggacagaataattaaaaaccatccaaagatgaagaagttccaatcaaagccatttcctctctacaaccaattggaattgctatatcaaggaagctgtgcaaccggagatctaaattttacatccacgcaacaactagcaccggttcagcaggtttcaaaccctcaagatgatgctgtaaatgaagctgtaagctcttttaggaatgatgaccttgagctcgattccggtttaaatccatcctcctcaaatgttcaaaggcacgcagtttcaagtactcatgctgatcttggcacaaatgaccggacaccggcatcttcggattgtagagaggatagtcatggaaggaagtgcaagcaaaaccaaatcgctggggttcttgaggattttttgcaattcaagaaggaacaaagtaacaagtttattagtgaggtcaatcaaccatcaaatgaaagaagcaaagaagagtattccattggaaagtgtgttgctattttggagtcaatggaagatctaagtgaagaagaaatggcaaaagcattaggagtgtttaagtgtgaagaaaaccgggagatctttatgactaccaagagggcacgtgttaggttgttgtggcttagggatgagattaacaaacaggtgctatctccacgagtgagtggtgtatga

SEQ ID NO: 110227 - DNA, 89 bp, Zea Mays
caagttattatactttattatttttgtgccctaataattcatttagacaatttttggtgcataaaatattagtatctaaatatatatat

SEQ ID NO: 110228 - DNA, 168 bp, Zea Mays
gcattgtcaattaaacatatgaatcacatttatcaatttaatttgccttatatatggtacatggatagaagcagtgttgtttatatttacaaatcaaactccactatatatgtgtgtataagttttactccatctttcacgcctttttttagttccgaagcaccacag

SEQ ID NO: 110229 - DNA, 1971 bp, Zea Mays
cttcaattggcagcagcagtatagttttatactaaccttttcgatccacacaaatatttcggcataaatcaaatttaaaataaaaaagatcttaaacatttcgtgtccctttgtttcctccccagctgagcctgcgcctgtactctgatgggccagcccactaaccgttcagcggcagagcccgttatttcgccacttcagcgccccacacttgcgccgcagcagtagaaggtagaacaccttcttgacccgaattcaatccgtgcgcacgcaccctccgccggcgacggctcacgcatcgctcggcgcccgccccgcgtccccgaggcgacgaccggcagagcgcgctctcgcggcgctacccgacacctgcgacgaaacgccccgagtccactagtcgaggagtgcgtcgacgcaggggctcgggaacgcggtgtcgccatcgcggagccctagcgagatcgtcgggaaggtccgaaggcgagcacgtgtttgtgtaacctttctccccttcttccctttgccggccggcccttcagcggcgacaagtgcccaccaggcggtggtttacgttgagctgaggagtgaggaagatgtctggaaatccagtcggcgtcgacaacacttctaggaggaaatttgacaaggaagagtacttggagagagctcgacagagggagcagagggagaaggatgaagctcggaaaggcaaggaaaggggtcctcctgtgcaaagacagcctttgaaacacagggactatgaagttgatcttgattctcgtcttggcaagactcaggtggtgaccccgattgcaccattgaatcagcaggtttgtgcataaattccatagggcatgtttgtagcgtttaaattgatttagatttattttcatcatatcttaattcttgacaagaaattgctagagtgtagttgctttgctccgtccatattaaacacagatcttagtcgaagatgtttctgtgtattacctcttattcttttctcatgttgtaggcttaatttcatctttttgcagttcattattattaatttcagtctacttgttcctacatgcatttcataccagtgctatttacaacttaagtgtttctacaaaaatgaacctcttactttgatgatcaattcaacacaaaagtttcctcccaactttatgtactttctgacaggctggatactactgttctgtatgtgaatgtgttgtcaaagattcagccaactatttggatcatataaatggcaagaagcatcagagagcactgggcatgtctatgcgtgttgaaagggcatcacttgaacaggtccagaaaaggtttgaggcacttaagaaaaggaaggatccaagtgcctttactgaagaagatttggatgagagaataatgaaacaacagcaagatgaggaggaacggaagcgtcagcgcaaagaaaagaagaaagagaagaaaagagaacaggcaacccaacatgaacctgaggacgttgatcctgacatcgctgccatgatgggttttggtgggtttggttcctcgaagaagtgacagctctgtgttggccgcatccctttggtgaccttctgccctgaagatattgctcaaccccataaacacctgtgccatgaaaaatcgtttttgccagaatcctgataagatttgaacgaagtgcactggatgcaaggatactacgttttggcactgggatactgagctgcgtgtatgggagttgattatcaaaaggaatatctaagggtgttttggataaacctgtttatttgctacttcgggtgttcctgccatagaaacagctgatggtcgtgattgtttgttgtgacttgtgggaatgcagatgtgcgaagtggaacaaaccaaaagaattgccgtctcattttctagaggaataaacttgtgtattgcagttaacagctcccttgattctgaatattaatttccagaacc

SEQ ID NO: 110230 - DNA, 1617 bp, Zea Mays
cttcaattggcagcagcagtatagttttatactaaccttttcgatccacacaaatatttcggcataaatcaaatttaaaataaaaaagatcttaaacatttcgtgtccctttgtttcctccccagctgagcctgcgcctgtactctgatgggccagcccactaaccgttcagcggcagagcccgttatttcgccacttcagcgccccacacttgcgccgcagcagtagaaggtagaacaccttcttgacccgaattcaatccgtgcgcacgcaccctccgccggcgacggctcacgcatcgctcggcgcccgccccgcgtccccgaggcgacgaccggcagagcgcgctctcgcggcgctacccgacacctgcgacgaaacgccccgagtccactagtcgaggagtgcgtcgacgcaggggctcgggaacgcggtgtcgccatcgcggagccctagcgagatcgtcgggaaggtccgaaggcgagcacgtgtttgtgtaacctttctccccttcttccctttgccggccggcccttcagcggcgacaagtgcccaccaggcggtggtttacgttgagctgaggagtgaggaagatgtctggaaatccagtcggcgtcgacaacacttctaggaggaaatttgacaaggaagagtacttggagagagctcgacagagggagcagagggagaaggatgaagctcggaaaggcaaggaaaggggtcctcctgtgcaaagacagcctttgaaacacagggactatgaagttgatcttgattctcgtcttggcaagactcaggtggtgaccccgattgcaccattgaatcagcaggctggatactactgttctgtatgtgaatgtgttgtcaaagattcagccaactatttggatcatataaatggcaagaagcatcagagagcactgggcatgtctatgcgtgttgaaagggcatcacttgaacaggtccagaaaaggtttgaggcacttaagaaaaggaaggatccaagtgcctttactgaagaagatttggatgagagaataatgaaacaacagcaagatgaggaggaacggaagcgtcagcgcaaagaaaagaagaaagagaagaaaagagaacaggcaacccaacatgaacctgaggacgttgatcctgacatcgctgccatgatgggttttggtgggtttggttcctcgaagaagtgacagctctgtgttggccgcatccctttggtgaccttctgccctgaagatattgctcaaccccataaacacctgtgccatgaaaaatcgtttttgccagaatcctgataagatttgaacgaagtgcactggatgcaaggatactacgttttggcactgggatactgagctgcgtgtatgggagttgattatcaaaaggaatatctaagggtgttttggataaacctgtttatttgctacttcgggtgttcctgccatagaaacagctgatggtcgtgattgtttgttgtgacttgtgggaatgcagatgtgcgaagtggaacaaaccaaaagaattgccgtctcattttctagaggaataaacttgtgtattgcagttaacagctcccttgattctgaatattaatttccagaacccctg

SEQ ID NO: 110231 - DNA, 1397 bp, Zea Mays
gccgcagcagtagaaggtagaacaccttcttgacccgaattcaatccgtgcgcacgcaccctccgccggcgacggctcacgcatcgctcggcgcccgccccgcgtccccgaggcgacgaccggcagagcgcgctctcgcggcgctacccgacacctgcgacgaaacgccccgagtccactagtcgaggagtgcgtcgacgcaggggctcgggaacgcggtgtcgccatcgcggagccctagcgagatcgtcgggaaggtccgaaggcgagcacgtgtttgtgtaacctttctccccttcttccctttgccggccggcccttcagcggcgacaagtgcccaccaggcggtggtttacgttgagctgaggagtgaggaagatgtctggaaatccagtcggcgtcgacaacacttctaggaggaaatttgacaaggaagagtacttggagagagctcgacagagggagcagagggagaaggatgaagctcggaaaggcaaggaaaggggtcctcctgtgcaaagacagcctttgaaacacagggactatgaagttgatcttgattctcgtcttggcaagactcaggtggtgaccccgattgcaccattgaatcagcaggctggatactactgttctgtatgtgaatgtgttgtcaaagattcagccaactatttggatcatataaatggcaagaagcagagcactgggcatgtctatgcgtgttgaaagggcatcacttgaacaggtccagaaaaggtttgaggcacttaagaaaaggaaggatccaagtgcctttactgaagaagatttggatgagagaataatgaaacaacagcaagatgaggaggaacggaagcgtcagcgcaaagaaaagaagaaagagaagaaaagagaacaggcaacccaacatgaacctgaggacgttgatcctgacatcgctgccatgatgggttttggtgggtttggttcctcgaagaagtgacagctctgtgttggccgcatccctttggtgaccttctgccctgaagatattgctcaaccccataaacacctgtgccatgaaaaatcgtttttgccagaatcctgataagatttgaacgaagtgcactggatgcaaggatactacgttttggcactgggatactgagctgcgtgtatgggagttgattatcaaaaggaatatctaagggtgttttggataaacctgtttatttgctacttcgggtgttcctgccatagaaacagctgatggtcgtgattgtttgttgtgacttgtgggaatgcagatgtgcgaagtggaacaaaccaaaagaattgccgtctcattttctagaggaataaacttgtgtattgcagttaacagctcccttgattctgaatattaatttccagaacccctg

SEQ ID NO: 110232 - DNA, 1568 bp, Zea Mays
acacacatcaagaaagcaagaaagataagactgtagctagccaccgcgcgcacgagtagtctagctagactacactcacattcaaaacaaacacacagcggcgtgctgcgtgatctctgaccgcgtcgacaactacggtgaccgcagcaccaagcagccgatggcggccaccgtatcttcctgcctgagcctcgtccccaccgtgcaccaccgggccggcgggttccccgctgtggcactgacgaacacgcttcagcgccgtcgtcgttctcgccgctatctcgtcgtcgtcgcctcggcgacgagagccgaacaggaggccgcccctgtgacgatcgaggacgtggacctcagctctcatcaggcggcgcccgacgatggggagctcgccgcgcggtggccggagatccacggcagcaacaactgggagggcctgctggaccccatcgacggcgtgctcctccaggagctcatccgctacggcgagttcgcccaggccacctacgacagcttcgactacgaccgcttctgccggtactcggcgcgggagcaggtgctggccgaggtgcgcaagctggtggatctgtaccacgggcggggcgagcaggtgagcgtgacggtcacgggccacagcctgggcagcgcgctggcgatgctgtgcgccttcgacatcgcggagacgcgcgcgaacgtgtcgccgggcgacagggtggcgccggtgtgcgtgttctccttcgccggcccgcgcgtcgggaacgtcgccttccggaggcggttcgagcgggagctgggcgtgcgggcgctgcgcgtcgtgaacgtgcacgacagcgtgcccaaggtgcccggcgtgttcttcaacgagtcggcgttcccggagctcgtcctgcgggcggcggacaggctgggcctcggcggcgtgtacacgcacctgggcgtgctgctgcagctggaccacaaggtgtcgccgttcctcaaggagaccctggacctctcgtgctaccacaacctggaggcgcacctgcacctgctggacggcttccgcggctccggcgcggggttcgagccccgcgggagggaccccgcgctggtgaacaagtccaccgacttcctccgggaggaccacatggtgccgcccgtgtggtaccaggcggagaacaagggcatggtgaggacggaggacggccggtgggtgctgccgccgcggcagagggtgctcgacgaccacccggaggacactgaccatcacctccagcggctcggtctcaccgcgtgaagctcagcaatactctgatagtagcgttaattagtgcgtgtggcgttcgcgtacgtgcgcggggcagtcggttactctgttgccgcgcgcggcagctcagtggcgcgttcatgccgtgcatgatgcgggtgacgtgcgggatgggcacgtcgctgcctgagaagctcgcaccgttggcgttcgtgtggctgcagaaaggtcgtcttggattgtaattctctctacttatttttgtaaattgacccagaaaagctgctgcttgcagcgccaaaaaaaaaaacgattttcatctttc

SEQ ID NO: 110233 - DNA, 1972 bp, Zea Mays
cacacatcaagaaagcaagaaagataagactgtagctagccaccgcgcgcacgagtagtctagctagactacactcacattcaaaacaaacacacagcggcgtgctgcgtgatctctgaccgcgtcgacaactacggtgaccgcagcaccaagcagccgatggcggccaccgtatcttcctgcctgagcctcgtccccaccgtgcaccaccgggccggcgggttccccgctgtggcactgacgaacacgcttcagcgccgtcgtcgttctcgccgctatctcgtcgtcgtcgcctcggcgacgagagccgaacaggaggccgcccctgtgacgatcgaggacgtggacctcagctctcatcaggcggcgcccgacgatggggagctcgccgcgcggtggccggagatccacggcagcaacaactgggagggcctgctggaccccatcgacggcgtgctcctccaggagctcatccgctacggcgagttcgcccaggccacctacgacagcttcgactacgaccgcttctccccctactgcggcagctgcaagtacccggcgaagaccttcttccacgacgtcggcctcggcggcatcggctacgaggtcacccgctacctctacgccacctgcaacgacctcaagttccccaacttcggcatcaagacggccgccaacgccaagatgtggagcgagtccggcacgttcatcgggtacgtggccgtgtccaccgacgaggagacggcgcggctcggccgccgggacatcgccgtggcgtggcgcggcaccatcacccgcctcgagtgggtggccgatctgacggccaaccagatccccctgcgcgagacgggcgtcccctgcccggaccccgacgtgaaggtggagcgagggttcgtggcgctgtacacggacaagggcaccggctgccgcttctgccggtactcggcgcgggagcaggtgctggccgaggtgcgcaagctggtggatctgtaccacgggcggggcgagcaggtgagcgtgacggtcacgggccacagcctgggcagcgcgctggcgatgctgtgcgccttcgacatcgcggagacgcgcgcgaacgtgtcgccgggcgacagggtggcgccggtgtgcgtgttctccttcgccggcccgcgcgtcgggaacgtcgccttccggaggcggttcgagcgggagctgggcgtgcgggcgctgcgcgtcgtgaacgtgcacgacagcgtgcccaaggtgcccggcgtgttcttcaacgagtcggcgttcccggagctcgtcctgcgggcggcggacaggctgggcctcggcggcgtgtacacgcacctgggcgtgctgctgcagctggaccacaaggtgtcgccgttcctcaaggagaccctggacctctcgtgctaccacaacctggaggcgcacctgcacctgctggacggcttccgcggctccggcgcggggttcgagccccgcgggagggaccccgcgctggtgaacaagtccaccgacttcctccgggaggaccacatggtgccgcccgtgtggtaccaggcggagaacaagggcatggtgaggacggaggacggccggtgggtgctgccgccgcggcagagggtgctcgacgaccacccggaggacactgaccatcacctccagcggctcggtctcaccgcgtgaagctcagcaatactctgatagtagcgttaattagtgcgtgtggcgttcgcgtacgtgcgcggggcagtcggttactctgttgccgcgcgcggcagctcagtggcgcgttcatgccgtgcatgatgcgggtgacgtgcgggatgggcacgtcgctgcctgagaagctcgcaccgttggcgttcgtgtggctgcagaaaggtcgtcttggattgtaattctctctacttatttttgtaaattgacccagaaaagctgctgcttgcagcgccaaaaaaaaaaacgattttcatctttc

SEQ ID NO: 110234 - DNA, 2479 bp, Zea Mays
atgggcacagggggagacggggacaaggcggggccggcgctgccgctggaggcgcttttggcgctcgggctcgaccagcgcaccgccgagaacgcgctcgtcaacgccaaggtcaccgccaacctcgccgccgtcatagctgaggctggtataaaggaatgtgacaagtcaattggtaatcttctatatgcagttgccaccaagtacccaactaatgcacttgttcatcgccctgtccttattagctatgtcttgtcaacaaagataaagagccctgcacagctagatgctgccctctcatttcttactaatactggtcctgattctctagatgtggacaagtttgaagaagcatgtggtgtagttggtatgctatgtggacaggttaggaagagacacccctggggtgatgctaaggcagtaaaggaggaaattgacaagaggcttgcagaaatcctaggtccaaagacagaagctgacagtataaaaccagtgaaaaagaagaaggaaaaaacagcaaaagttgaggagaaaaaagttgcagttgccactactgccccaccatctgaggaggaattgaacccgtatactatatttccccaaccagaggaaaactttaaggttcatacagaaatatttttcagtgatgggaacatatggagagcacataacacaaaggaaattttggaaaaacatctcaaggcaactggaggaaaagtgatgacccgttttccaccagaacctaatggatatcttcatattggtcatgccaaggctatgtttatcgattttggtctggctaaggagcgaaatggccattgctaccttaggtttgacgacacaaatccggaagctgaaaagaaagaatacatagatcacattcaagaaattgtccattggatgggatgggaaccctacaaagtaacatacacgagtgattatttccaacctttgtatgagcatgctgttgagttaattcggaaagggctagcctatgtggatcatcagactgcagaagaaattaaggagtacagggaaaagaagatgaatagtccatggagggataggccaattgaagagtcattgaatttatttgaagacatgaggcgtgggttgattgcggagggtgcagcaactctccgaatgaagcaggatatgcaaaatgagaacaaaaatatgtctgacttaatagcatatagaataaaattcacccctcatccacatgctggtgataattggtgtatctatccgagctatgactatgctcattgcatggtggattctcttgaaaacatcacgcattcgctgtgcacacttgagtttgacatacgccgcccttcatactactggctacttgttgccttgggtctttatcaaccatatgtgtgggaatattcgaggctaaacatatcaaatactgtgatgtctaaaagaaagttgaatcgacttgtgacagagaactgggtagatgggtgggatgatccccgcttgttgacactggctggactccggcggcggggagtatcatcaaccgcaataaattcctttatccgtggaatcgggataacaagaagtgacaacagcttaattcgtgttgatcgtctagaataccacatcagggaagagcttaacaaaacagcccctcgaaccatggttgttttgcgtcctctaaaggtggtaataactaacttggaagaaggaaaagtactagaccttgatgggaaaatgtggccagatgcttctgatactgatgcttcctctcactataagcttccgttctcaagaactgtctacattgagaaaactgattttcgccttaaggactcaaaagactactatgggctggcccctggtaaatctgtcatgctaaggtatgcgttccccataaaatgcacagacgttatctatggtgatactcctgatgatattgttgaaattcgagcagaatatgatcctttgaagacttctaaacttaagggtgttctgcactgggttgctgagccagcacctggtgtcgaaccattgaaggtggaagtaagactattcgagaaattgttcatgtcagagaatcctgctgaattggaggattggcttggtgatcttaacccgcactcgaaagaggtgataaaggacgcttatgctgtaccatcgcttgccactgcagttctgggcgacaagttccagtttgagcggcttggttacttcgccgtggacacggactccactcctgagaagctcgtgttcaacagaactgtcaccctccgtgattcattcggtaaagctggaccaaagtgacttccagtgtaatgtaggtagggcgtgggtgctcggttgcataggcgcacctgagctatacttttttttgaagaagaaaatgatcttgtaatacagaacagcctaaaggcctcaatctttgtaaaatttacatgtgactgcagtgcagcttgtttgcttcgaaggaatcagattttgtatggta

SEQ ID NO: 110235 - DNA, 480 bp, Zea Mays
acacaacctcagattttgcatctgttgcatatagagttcttacccccatttttcttgcagattgtgaccctaggcattgcaactgattgtgaccctcctacgctagcatgccctggctttgggggaattaaccgcggcaaaacggcagctgggaaactatctttgcctatctttgggctggcaccttacaaattacgtgcctccatttggacatctgacaaaacccaagaacgggaccgcgtcacctctctgatgcaggaggctgacagctggctccgcacaatacaagtgtccattgtcgaatcaaatcatattcttaatgaagtgaatacccacatccttccttcccacaatgatctcaccccaataactacaatagctggtggaagtgttgccaacacaatccgtgggctctcagctggttttggaatatcaactggggactattgtttgtcaacaatacgagctttagtggtgtag

SEQ ID NO: 110236 - DNA, 730 bp, Zea Mays
ctctttagcatcgtttcatcctgtgcaccagattggttagagcttcccggttccatcatcctgctcacaacggccgcccccagtctgttcgcacacaccttcagggacgacctcgttggtgtcttcatatgccttgcgatcggatgctacctgctccaagagcacatcagggcgtcagatggactcaggaacgccttcaggaagggcaatggcatgtccaactccattggcatcctcccgctcttcatctaccctgtctggaccggggtgctgcaaatcctataggcgttgttgcctctgtgttcactgctgtccaggcatccaggcatccagctccgttgtcgttcgtctcttgtgcaaatgtttcttctatggtgaattggtgatcgtggttctgtgctatcggggttggatgtgtaatgtatgcttgaggtaatcagttggacccgttgccatggtggtggacagttttgttatctcatttgttgtagttcgatgtctacatttggtttgttcgagtacataaacaccaataaaatcattcgagtacataaacgtcgccaataaaatcattagtggtggcttgatgtagatcgagatgttgttattttatcaggcgtgtaaacccttgccgcttctgttaagttgtcgcaagtttgaggatggatgtttatagcaactattgtatatcatttgatgctatttctgaatatgatgtcgcaagtttgtg

SEQ ID NO: 110237 - DNA, 1325 bp, Zea Mays
ccacgacggcggtgccaaatatttgaagcccgcccacggcggtgtcatgtttgcaaaattctctccattcgccggttttgcgcatcccctccctccctccatctctctctgcgttcgtggtgctcggccatggcggactaccacttcgtgtacaaggacgttgagggggcgagcacacagtgggacgatatccagcgccgcctcgggaacctgcccccgaagccggagcccttcaagccgccgcccttcgcccccaaggtcgacgccggcgagcagcccaagtccaaggaatggctcgacgagcgcgaggccgaagagctcgaggaactcgaggacgaccttgatgacgaccgcttcctcgagcagtacaggaagatgaggcttgccgagctgagggaggccgcaaaagccgcgcgatttggtagtatagttcccatcactggctcggacttcgtgcgggaggtgtctcaggcaccatcagaagtttgggttgtggtcttcctctacaaggatgggatacctgaatgtggattgcttcagaattgtttggaggaattggctacaagatacccagcgacaaagtttgttaaaattatctccacggactgcatccccaactacccagataggaatgttcctacaatactggtgtataacaacagtgctgtcaaagggacttatgttggtttgcagaagtttggtggaaagagatgcacacctgaatctgttgcattagccctttgccagtcagacccggtactgaatgatgggcatggtggcagccattcatctcgggacaatgtcatagaaggtgttcgcaggaagttcatagagaaggttgtagcccagcatgaagagcgggaagaagaggatagtgactaagcgtatattgtttgtgtttgttttcctcagctggcagatccaatttggttccaacgttcactgatcttatgtgattttgtgggtgaaatttgccagggttttctgattacctggttgtgcgggtgaagcttttaacagtttatggatcatattgcgttacagttagagatgtctgtgggtcagcaaaatcttggtgttagtaaccttttgagctgtaacataacttctttatcttatttaagagatcaaagatgattagtgcacttatatagttgcatgagaaaagatccacccatacctttgaatccacagtatttcactatcatgaagatttctcaacacaaaacatcactactgaaatgatctaatttgtgtatatgtatgtttatgataatttgtgaattagtaaaagtgcaacttgtgatgtatatatcgataagaaa

SEQ ID NO: 110238 - DNA, 758 bp, Zea Mays
gaggcggagcagcagagggggacagaggattactggtggttggaagctccgacattggagaagtagctgacggcggcgacgaactagggatacctgaatgtggattgcttcagaattgtttggaggaattggctacaagatacccagcgacaaagtttgttaaaattatctccacggactgcatccccaactacccagataggaatgttcctacaatactggtgtataacaacagtgctgtcaaagggacttatgttggtttgcagaagtttggtggaaagagatgcacacctgaatctgttgcattagccctttgccagtcagacccggtactgaatgatgggcatggtggcagccattcatctcgggacaatgtcatagaaggtgttcgcaggaagttcatagagaaggttgtagcccagcatgaagagcgggaagaagaggatagtgactaagcgtatattgtttgtgtttgttttcctcagctggcagatccaatttggttccaacgttcactgatcttatgtgattttgtgggtgaaatttgccagggttttctgattacctggttgtgcgggtgaagcttttaacagtttatggatcatattgcgttacagttagagatgtctgtgggtcagcaaaatcttggtgttagtaaccttttgagctgtaacataacttctttatcttatttaagagatcaaagatgattagtgcacttatatagttgcatgagaaaagatccacccatacctttg

SEQ ID NO: 110239 - DNA, 7520 bp, Zea Mays
atggcgaccccgtcttatgcggcggtgaagtgcctcaacacgtcctcgtccagccgcaagcgtttctcgtttaagagcttctcgcagcgggtggaggagatcgacatcgatgtgtaccgcagcctccacacactgaaggcggagccatccagcggatcgtccttcttcctcgacgcaattgtggagtggagggagcttaatactgcagaagacttcatctcattttatgaggagatgataccattggtacaaacacttcctcaaattgtcttgcaccgggacaagctcttttccgcacttctacaaagggtaaacatgagtgcaagattgtccctggagccaatactcatgttgattgcagctttctccagggatattctagaagattttttgccttttttaggaagacatgctagtgcacttttatctcttcttaacgacggaggtgatcgcgaccctgaaatcttggagcaggtcttcacatcctggtcgtatataatgatgtacttgcaaaagtatctagtgaaagatactgtccaaattcttaggatcacagcagcgttgagatatttcccgaaggactatgttagagaatttatggcagaatctgtttcatttttgctgaggaatgcacctaataatcagctaacgcaaggtctactgaaagttctacttgaggctgctaaacaaccatcacctgcacggatagacggggtggtctctttgctgtggcatgtcatgaaaggaacttccacaaagctacactcaaaagctgggcaggtcttgaagttcttgttgagcaagtcaattgtttccactctccgtgataaatttcctgatgataaggtgaagatgattaaacttgttgaggatgttccaaccattttgggcaatttgtccatcatatcacctttctatgccccagtgttcaaacttaaaaatccgagggtgattgtctttataaagaaacttttggtaaaaggtccccaagttgcacaacattttgaaagtcaaatattaagagtatcatccatggaagtgacaaaagaatttgatccacaaaatctcttggagctgttctccatctttgctttcaatttgagcagtccaaccaaggatgttcggattttaacattgaggattctatcatattttgtgaagatggatcaacgtctaatcacagatgaggagcgaccacacaagaggcagagaacagaagtttctggagaggaagctgttgctaaatacgctaatgttgtggatattcttttgattattgagtcaatgccaatttcagtatctactagccgtaaaattgctatcttcatttctcggatacaaatgagtttatcttccaagatggttcatgatgattacatacctcctctcttacatggtattattggcatattgtacaatagatttagtgatctatggccacaaacactggattgccttgctgttctcattagaaaacacaaggagcttgtttggggtcagtttgttccgttcattgcaattcaccaatcaaaaggactgactgtgaaaaatcaggagaagctggaagctgcaacccaaccacagtctatttttgactgcttcaacttgtatcttgctatggactttgattgcacaccagctgtgaccgtggctaccttattgcttcaatcgctccaaaggattcctgatgttgctgaatcccgctctcgacaacttataccgctatttctcaactttatgggctatgatgatagcagcatctttagtgctgattcatatatgcctgaaaaatgtaaaggcaaacaatggaaagcgattctaaaagaatggttaaacttattgaggttaatgcacaatgcaagatcgttatatcagggcaattttctccaggaagtactaactaaaagggttcttgatgacagtgatcctgaaatacaagcaaaagcattggattgccttttgaactggaaggatgaattcttgatcccgtacagtcagaaccttaaaaatctgattgatgtaaagactcttcgtgaagagctgaccacatgggcagtttcacatgactccttgtcaattctgaaagaccatagaagtcgtgtggttcctctggttatccgcgtgttggcaccgaaagtaaggaaactgaagctactaggttctcgaaagtccttgatccctggcagcctccagcttaaaatgtttggttctcagccagacaaccttcttggaagtttctctgacattgttggaacttcaacagaaatttgtgtagagaattttacatggaaaaaggcaaatggtttcattcatctggttgaagaaatttttggtacttttgatatgccacatataagcccatttcttaatgttttattaatcattgtcgctcgcttgctggagagttgcatgaggaatcttagaaatgagagtgatgggaaatatccttgcaaccaaacaaatgaccatggtaatggttgttccataaattctgaagtgggcaattctgtgaacgtggatgaatgctttaaagaaatgcatctagaaggccatatggagtcattatttattatcatgaagctactttgcattttattcaacaacaacaacatgcattttatttgccaaatgtttatatcttctcttaactaattgcaacagcaacctcactctatcacgcagacaagtgtatccatcaagcagttgaaggatttgaggtcttcatgtattagagttgtctcgtcagcccttagtcactatgaaagccatgagtttggagaaaacttctggggtgtttttttttcttctgtgaaacctctgatagactgctttacacaagaggcttccagtagtgagaaaccaagttcattatttgcttgttttatggctatgagccggagcccaaaattagcaccactgttggggtcaaataatcttgtaccagctattttttctattttgactgtgaagacagcgtcaggatccatcaccacctatgcacttgagttcattgagaatctgttgaggttggatattgatttgcagcagcaagatgaacatttagtgaagaaagttcttcttcaacatatggatgttcttatccatagtctccatgattttgttaatcatcgcaaagagctcaacaggagatctggtacatggcttgggcaacgtgaacttaggctgttcaaattattgctaaattacatcacagatccctcagctgctgataacttcatagaccttattcttccatttttcagcaagaaagatttgaactccgacgattgtttggaagcactatgtgttgtgaggggaataattcaaaatctgagatgcaaagtatctgaaaaagttctaaatgcactgaacccattacttgcaattgttggattggaactgcgactatgtatctgtgatatttatgctgggttgtcattgaatgatccttcgatgttgtttctggctgggttaataggagatctgaatgcagtttcagcttcagaacttggtgaactagattatgacacaagacttaacacctatgataaggttaggccacaattgtttcttggcttgacagaagagcatgtgggcgccatattatctcattgtgtgtatgatatgtcatctgaagaattaattttgcggcaaagtgcatctagggctctgcagtcgttcctggacttttccgcctcagttatgaataatgatgtgtccaaatactctattgatgataaatttagagagaataataccagaagcatttgcacgatgggctgtattcagaagatattggaaaaaacttatctgcacaatatgggagtagcaatgactaaagatgtatcaattcaaaaggaatggattattttacttagggagatggtctccaattttaatcatttagcatccttaagctcatttaggcctctctgtaaggtggatatagaagaggattttttccacaacataactcatttacaggctggtaaaagatcaaaagcactgttgctttttagacagggaatcaaggaaaacaacttttcagaggatatcactatgaaagtctttgttccactatttttcaatatgttttctgacgtaaaagctgggaaaggcgaacaagtcagagatatatgtttggatacactatctgctgttgctgccaaagtgcagtgggaacactatagaacaatattgaagagatgcttccgagaattaaaccttagacctgataagcagaagatcatattgaggctgatttgttccatattagatgcattccatttcatgaaacctgcaaatgatgcctcaggaaattctgatgctttgagtgaagatattgattcttcccttacattctctttggtcacagtctcttctgataagcaacagtacatgcaaaaggtagtgtttccacaggttcaaaagttgttaggatcagatccagagaaagtcaacgtcaacataaacctggtagcactgaaaatacttaagttgctaccggtggattattttgagtcccaactttcaagcatcattcatcgaatctgtaacttcctcaagaatcgtcttgaaagcatacgtgatgaagctaggtctgctttagctgcttctgttaaggaactggggattgggtatttgcagtttgtggtcaagatattaagagctatacttaaaagaggttttgagttacatgttctgggctacacacttcattatttgttgtcaaaaaacattactgctgatatgtatggtaggcttgactactgtttagaagatttgttggcagtggttgacagtgatttacttggagatgttgcagaacaaaaggaagttgaaaaacttgcctccaaaatgaaagagacaaagaagagaatgtcgtttgagactcttaagctgattgctcaaagtattacattcaagaccgatttactgaagaagataatctcacctgtttctttacatcttcagaagcaacttactccaaagttgaaaaccagacttgagatgatgctacacaacatagccttagggattgagtgcaactcatctactgaaacatcaaacttgtttatcttcgtatattgtcttattgaggatactattacaggaagcagatctgaatgcaaagagaatacacaatctagtcctgatcaagacagtactgtaagaaagaccttcctgggactaggtgagagtggatcacagaattcttatatacttaccaagtttgcacttgacttacttcgtaatcgtctgaagagcatcaagcttgacaaggaagatgaacaactcgtgaagatgttggatccttttgttgaccttctgcgaaagtgtatgagttcgaaacatgcaagtgtcctctcagccacatttagatgttttgccttgttggtgaaacttccgttgccatctctgagggacaatgcaattactataaaaaatgtacttatggagattttacagagagctggaaactccaatggtcatttagtcacatcttgttttaagctacttgctgatctacttagaggattcaggatttcactttcagataatgagcttcagatgcttgttcatacccctatgtttgtagatcttcagacaaacccttcccctgttgccttatcgcttctcaaaacaatagtcaggctaaaattggtttctcacgaaatttatgatatagttgttaagataggagagttgatggtaacaacattaactgaatctatacagcagcaatgcattcaaattatgctacaattttttctgaactatccactttctgagaagcgcttacagcaacatattgactttttcctggcaaacttaaggtatgatgaatatccatagttactttatcatgatatctcactgtatgctaacactctggaaaattgcagttatgaacatccttcaggaagagaagcagtgcttgaaatgctccatgacattcttaccagatttccccagaggattattgatgagcagggtcaaaccttttttcttcatcttgtagttgctctagccaatgaacagcatcagaatgtgtcttcaatgatccttagagctattcaaaagctgttaggacgcattggtggtcagggaaagagttacatttatgagtattcactttcgtggtacactggtgagaagaaaagtttgtggagtgcttcagctcaggttattggtttacttgttggcgatcacacattacaaatgggcaagcaccttaaaagtattctggctgttgttaagaaaataatggaatcatctattattgcttctggagctatacaattaggcttatctgatgaagctgccctgccattgtggaaagagacttactactctgttgccatgatggagaggttacttcttcgctttccggagttgtattttgagaaaaacatggaggacatatggataatattatgcaagttgttgatccatcctcattcgatgttgcgtagtatttcaagctctctggtagcatcatattttgctacagtggagaagaggaaacatgaacagaaattggatgccccatcatggttgcttgttcaaccgagcaggctattcataatagctgtttccttgttgaaacaattgaggagtgagctgagtgatactacggcaaataatctgattgtacagaatgttgcatactcagtctgcaacttgcatatgttgattaggcaatcgacctccacacatcagttttggtctagcattagttctgatcgtggtgctttccttgagggttttgaattgcttggttcaagaaaagcaaaaaatatatttctcctttgtacttcaacatctagtgatgtatctggatctagcctcgacaccaacgaagagcctacatctttgttagtttcgtcaatcctaaagaagatgggaagaattgcaatgcaaatgcaggatacacagataaagaacgtgttcaattgcttcaatatgatttcatcagctcttggtcctgatgaatcactaacctatgctgatcacctcttggccccattgtataaagtttctgaaggatttgctgggaaagttgttagtgatgaagtgaagcaactggcccagggggtccagaacaagttacgtgacctgattggttccgagaaatttgttgaagtctacaagagcgttcggatgggcctgaaacagaagcgggacggtagaaagcaggcacagaagattgttgcagccgtggacccagaacgcaatgccaagcgaaagcagcgaatggcagccaagcaccgggaacacaagaggcgaaagataatggcgatgaagattggcaggtggatgagatagcttggtatttaggctctgcggaattcggtgaatcatataattgtagaggataatttttcgtgctacaagtgctggcataaaattatgtttctgttttatatgctgtctcactgacttactgcccgacgtaattttattgttgagttaccgaaccataccgtaagtaaaaattaagaggcataagcaatgaa

SEQ ID NO: 110240 - DNA, 7881 bp, Zea Mays
atggcgaccccgtcttatgcggcggtgaagtgcctcaacacgtcctcgtccagccgcaagcgtttctcgtttaagagcttctcgcagcgggtggaggagatcgacatcgatgtgtaccgcagcctccacacactgaaggcggagccatccagcggatcgtccttcttcctcgacgcaattgtggagtggaggttcgatcaacttctgtggcttccatcatatttgatgcagggcacagaggagcttaatactgcagaagacttcatctcattttatgaggagatgataccattggtacaaacacttcctcaaattgtcttgcaccgggacaagctcttttccgcacttctacaaagggtaaacatgagtgcaagattgtccctggagccaatactcatgttgattgcagctttctccagggatattctagaagattttttgccttttttaggaagacatgctagtgcacttttatctcttcttaacgacggaggtgatcgcgaccctgaaatcttggagcaggtcttcacatcctggtcgtatataatgatgtacttgcaaaagtatctagtgaaagatactgtccaaattcttaggatcacagcagcgttgagatatttcccgaaggactatgttagagaatttatggcagaatctgtttcatttttgctgaggaatgcacctaataatcagctaacgcaaggtctactgaaagttctacttgaggctgctaaacaaccatcacctgcacggatagacggggtggtctctttgctgtggcatgtcatgaaaggaacttccacaaagctacactcaaaagctgggcaggtcttgaagttcttgttgagcaagtcaattgtttccactctccgtgataaatttcctgatgataaggtgaagatgattaaacttgttgagttgctggttagtagatatgtgttccctggtagcaacataacaggatcttcttcaattgaggttcttggaagtattcttgactttatgctttctgttctggatgttccaaccattttgggcaatttgtccatcatatcacctttctatgccccagtgttcaaacttaaaaatccgagggtgattgtctttataaagaaacttttggtaaaaggtccccaagttgcacaacattttgaaagtcaaatattaagtgcaatggataatttcattgtaagttcacccgaggatgtcatatttatccttttaaatttctttaaaggatcaaagaagcaaatatttctttgtagcactgatggaaatcatctggattcagtggagaaaacttgcaagttctttgaatcaaaattttctttgtggatagagttattagatgatacagccggcactggtaatcgatctagtaaccagttggtttttctaaatggcataaattcaaaggatttacatgcagggaacatgaatggtcttccaatgactacctggagaggtctacttggtgcagcattgtcatcgtaccacaaactactgttggtcaacaccagcagaaattcagaatttagttttttcttatcgcttgccaagagtcacagtacatgcccacaagtactgtctgctgtagctgaatatttggattccctgcaaggagtatcatccatggaagtgacaaaagaatttgatccacaaaatctcttggagctgttctccatctttgctttcaatttgagcagtccaaccaaggatgttcggattttaacattgaggattctatcatattttgtgaagatggatcaacgtctaatcacagatgaggagcgaccacacaagaggcagagaacagaagtttctggagaggaagctgttgctaaatacgctaatgttgtggatattcttttgattattgagtcaatgccaatttcagtatctactagccgtaaaattgctatcttcatttctcggatacaaatgagtttatcttccaagatggttcatgatgattacatacctcctctcttacatggtattattggcatattgtacaatagatttagtgatctatggccacaaacactggattgccttgctgttctcattagaaaacacaaggagcttgtttggggtcagtttgttccgttcattgcaattcaccaatcaaaaggactgactgtgaaaaatcaggagaagctggaagctgcaacccaaccacagtctatttttgactgcttcaacttgtatcttgctatggactttgattgcacaccagctgtgaccgtggctaccttattgcttcaatcgctccaaaggattcctgatgttgctgaatcccgctctcgacaacttataccgctatttctcaactttatgggctatgatgatagcagcatctttagtgctgattcatatatgcctgaaaaatgtaaaggcaaacaatggaaagcgattctaaaagaatggttaaacttattgaggttaatgcacaatgcaagatcgttatatcagggcaattttctccaggaagtactaactaaaagggttcttgatgacagtgatcctgaaatacaagcaaaagcattggattgccttttgaactggaaggatgaattcttgatcccgtacagtcagaaccttaaaaatctgattgatgtaaagactcttcgtgaagagctgaccacatgggcagtttcacatgactccttgtcaattctgaaagaccatagaagtcgtgtggttcctctggttatccgcgtgttggcaccgaaagtaaggaaactgaagctactaggttctcgaaagcacacaggtgccagtcatcgaaaggcaattcttcgtttccttttgcagtttgattcaaatgaacttgagctttttttttctttacttctgaggtccttgatccctggcagcctccagcttaaaatgtttggttctcagccagacaaccttcttggaagtttctctgacattgttggaacttcaacagaaatttgtgtagagaattttacatggaaaaaggcaaatggtttcattcatctggttgaagaaatttttggtacttttgatatgccacatataagcccatttcttaatgttttattaatcattgtcgctcgcttgctggagagttgcatgaggaatcttagaaatgagagtgatgggaaatatccttgcaaccaaacaaatgaccatggtaatggttgttccataaattctgaagtgggcaattctgtgaacgtggatgaatgctttaaagaaatgcatctagaaggccatatggagacagcgtcaggatccatcaccacctatgcacttgagttcattgagaatctgttgaggttggatattgatttgcagcagcaagatgaacatttagtgaagaaagttcttcttcaacatatggatgttcttatccatagtctccatgattttgttaatcatcgcaaagagctcaacaggagatctggtacatggcttgggcaacgtgaacttaggctgttcaaattattgctaaattacatcacagatccctcagctgctgataacttcatagaccttattcttccatttttcagcaagaaagatttgaactccgacgattgtttggaagcactatgtgttgtgaggggaataattcaaaatctgagatgcaaagtatctgaaaaagttctaaatgcactgaacccattacttgcaattgttggattggaactgcgactatgtatctgtgatatttatgctgggttgtcattgaatgatccttcgatgttgtttctggctgggttaataggagatctgaatgcagtttcagcttcagaacttggtgaactagattatgacacaagacttaacacctatgataaggttaggccacaattgtttcttggcttgacagaagagcatgtgggcgccatattatctcattgtgtgtatgatatgtcatctgaagaattaattttgcggcaaagtgcatctagggctctgcagtcgttcctggacttttccgcctcagttatgaataatgatgtgtccaaatactctattgatgataaatttagagagaataataccagaagcatttgcacgatgggctgtattcagaagatattggaaaaaacttatctgcacaatatgggagtagcaatgactaaagatgtatcaattcaaaaggaatggattattttacttagggagatggtctccaattttaatcatttagcatccttaagctcatttaggcctctctgtaaggtggatatagaagaggattttttccacaacataactcatttacaggctggtaaaagatcaaaagcactgttgctttttagacagggaatcaaggaaaacaacttttcagaggatatcactatgaaagtctttgttccactatttttcaatatgttttctgacgatatcactatgaaagtctttgttccactatttttcaatatgttttctgacgtaaaagctgggaaaggcgaacaagtcagagatatatgtttggatacactatctgctgttgctgccaaagtgcagtgggaacactatagaacaatattgaagagatgcttccgagaattaaaccttagacctgataagcagaagatcatattgaggctgatttgttccatattagatgcattccatttcatgaaacctgcaaatgatgcctcaggaaattctgatgctttgagtgaagatattgattcttcccttacattctctttggtcacagtctcttctgataagcaacagtacatgcaaaaggtagtgtttccacaggttcaaaagttgttaggatcagatccagagaaagtcaacgtcaacataaacctggtagcactgaaaatacttaagttgctaccggtggattattttgagtcccaactttcaagcatcattcatcgaatctgtaacttcctcaagaatcgtcttgaaagcatacgtgatgaagctaggtctgctttagctgcttctgttaaggaactggggattgggtatttgcagtttgtggtcaagatattaagagctatacttaaaagaggttttgagttacatgttctgggctacacacttcattatttgttgtcaaaaaacattactgctgatatgtatggtaggcttgactactgtttagaagatttgttggcagtggttgacagtgatttacttggagatgttgcagaacaaaaggaagttgaaaaacttgcctccaaaatgaaagagacaaagaagagaatgtcgtttgagactcttaagctgattgctcaaagtattacattcaagaccgatttactgaagaagataatctcacctgtttctttacatcttcagaagcaacttactccaaagttgaaaaccagacttgagatgatgctacacaacatagccttagggattgagtgcaactcatctactgaaacatcaaacttgtttatcttcgtatattgtcttattgaggatactattacaggaagcagatctgaatgcaaagagaatacacaatctagtcctgatcaagacagtactgtaagaaagaccttcctgggactaggtgagagtggatcacagaattcttatatacttaccaagtttgcacttgacttacttcgtaatcgtctgaagagcatcaagcttgacaaggaagatgaacaactcgtgaagatgttggatccttttgttgaccttctgcgaaagtgtatgagttcgaaacatgcaagtgtcctctcagccacatttagatgttttgccttgttggtgaaacttccgttgccatctctgagggacaatgcaattactataaaaaatgtacttatggagattttacagagagctggaaactccaatggtcatttagtcacatcttgttttaagctacttgctgatctacttagaggattcaggatttcactttcagataatgagcttcagatgcttgttcatacccctatgtttgtagatcttcagacaaacccttcccctgttgccttatcgcttctcaaaacaatagtcaggctaaaattggtttctcacgaaatttatgatatagttgttaagataggagagttgatggtaacaacattaactgaatctatacagcagcaatgcattcaaattatgctacaattttttctgaactatccactttctgagaagcgcttacagcaacatattgactttttcctggcaaacttaagttatgaacatccttcaggaagagaagcagtgcttgaaatgctccatgacattcttaccagatttccccagaggattattgatgagcagggtcaaaccttttttcttcatcttgtagttgctctagccaatgaacagcatcagaatgtgtcttcaatgatccttagagctattcaaaagctgttaggacgcattggtggtcagggaaagagttacatttatgagtattcactttcgtggtacactggtgagaagaaaagtttgtggagtgcttcagctcaggttattggtttacttgttggcgatcacacattacaaatgggcaagcaccttaaaagtattctggctgttgttaagaaaataatggaatcatctattattgcttctggagctatacaattaggcttatctgatgaagctgccctgccattgtggaaagagacttactactctgttgccatgatggagaggttacttcttcgctttccggagttgtattttgagaaaaacatggaggacatatggataatattatgcaagttgttgatccatcctcattcgatgttgcgtagtatttcaagctctctggtagcatcatattttgctacagtggagaagaggaaacatgaacagaaattggatgccccatcatggttgcttgttcaaccgagcaggctattcataatagctgtttccttgttgaaacaattgaggagtgagctgagtgatactacggcaaataatctgattgtacagaatgttgcatactcagtctgcaacttgcatatgttgattaggcaatcgacctccacacatcagttttggtctagcattagttctgatcgtggtgctttccttgagggttttgaattgcttggttcaagaaaagcaaaaaatatatttctcctttgtacttcaacatctagtgatgtatctggatctagcctcgacaccaacgaagagcctacatctttgttagtttcgtcaatcctaaagaagatgggaagaattgcaatgcaaatgcaggatacacagataaagaacgtgttcaattgcttcaatatgatttcatcagctcttggtcctgatgaatcactaacctatgctgatcacctcttggccccattgtataaagtttctgaaggatttgctgggaaagttgttagtgatgaagtgaagcaactggcccagggggtccagaacaagttacgtgacctgattggttccgagaaatttgttgaagtctacaagagcgttcggatgggcctgaaacagaagcgggacggtagaaagcaggcacagaagattgttgcagccgtggacccagaacgcaatgccaagcgaaagcagcgaatggcagccaagcaccgggaacacaagaggcgaaagataatggcgatgaagattggcaggtggatgagatagcttggtatttaggctctgcggaattcggtgaatcatataattgtagaggataatttttcgtgctacaagtgctggcataaaattatgtttctgttttatatgctgtctcactgacttactgcccgacgtaattttattgttgagttaccgaaccataccgtaagtaaaaattaagaggcataagcaatgaagacatagaattgattgaattatatttttttggggtggatggataagtaacaatatattattaaatgtgcaattaagagttttctggctgaggtttgc

SEQ ID NO: 110241 - DNA, 1574 bp, Zea Mays
gccggaggaagcaggagtgatgaacttgggctcgcgccgctccgcgctctgccctctgcgaaccacgacgaggtcttcctgacatggccggcgcccgcggccgcgcgacgccgacgcgaacacctccgcggtcgtcttccccggcgccccgcaccgaggcggtagtcccgccggactgggactccgctgtatcgaccgtctcctcccacccctcgcccccggtggtcgtcgtgtgcgggcccaagaacagcggcaagtccaccttctcccgcgtcctcctcaacgcgctgctccccaggcatggtaaggttgcttatctggacaccgacgtggggcagccagagttcgggccgccgggatgcctctcgttcaatgtcctcgacgaagctattgcagatttgatgaacccaagcctacgggaagctgaaaggtgctacttctttggtgacatttcatcgaaaagagatccagaagcatatctgaattgtctattccattcgtatgactactttgttggaaaatatcgatgcgatgagaatgaaatgctgccactaattgtcaatacacctggatgggtaaaaggtgctggctttgatatgctcgtagagatgctaaggtatatctgccccacaatagttgttcagatacgcatcacaatcaagaacaaaaatctccctgatggagggttttggttagatggtgggcaaacaggacctatgatgattaacatcgatgctgcatttcatgatgcctcaaatagatcgttgttaattcagaaagattcatgtggaatgcgtgaacgccgacttgtagagtacttgaaacaatgttttccaagcaacatctctctttcaactaataaggagcttgcttatgccctagcttcacttccaccttatcaagtaccattttcagatgttgcaattgtgcatcttcattgtaaggtacctgctggtgagatatggcatagtctgaatgcaaccatagttggtttggcagtttccaatgcatctgagggaaccagatcaatcccttactgtgttgggcttggcatcataaggggcgtcgatattcaaaaaggcctgttatatttaataactcctgttcctctccagcgcctgcaatgcgttgatcttttgcaacagggtctcattgagatacctactgctcttttgcaggtccgcggatgtgtgtccccctacatgtcgacgaatgtgcttcacaagatatcagaaagggatttgtatgctgggtgatgttggcgcaggcagtgtcggagatagacctgtgtttgctggtttctgacccggagagcatgaaccggactgtagtttcaggctgccagcggttgcctccagctcctaagattagatatgtaacctgtgctgtgcaactcctctgtcaaattagtagtcacggagatctgaatgcaacttcctggattcattgaattgaaatactataattctgtggcaagttactccctttgcttttgcctttgaattgattagtatagagaaagatattgattaattggtatcttggtattatttaaagaaagagtggtatatctt

SEQ ID NO: 110242 - DNA, 3119 bp, Zea Mays
gacttaagctgcttttgctataaattcattgagcctgcatggttgattggcagcaacaaccactttgtatcttgaggcatgcatcgcacaccaaccaatcctcccctgatactgagcttcaccatcatagtagtcacctcgttcttcagaggtggcgcgctgcagcaaccaggcggcggagcatgctggccctccgagagggccgccttgctctccttcaagaagggcatcacgagtgatcctggcaacctcctctcctcatggcgtggttgggactgttgcagctggagaggcgtctcatgtagcaaccggaccggccacgtcctcaagcttcatcttgcgaatccagatccagacatcgactccagaacaaaccatgctgagtcatatattctggctggtgagataagtccctctctgctttccctgcagcatcttgagtacctagacctcagcatgaactacttgggaggaggaagaggggaaacaggaagccctatgcctcggttcttgggatccatggaaaacttgagatatctaaacctctctggcatacagtttgctggtagtgtgcctccagaacttggcaacctttctaaattgcagtatctcgaccttagtgccactgtggacacggtcgacgacctcacattgtttcgaaatctacctatgctgcaataccttaccctgagccaaatcgatctctcgctgatagtcgactggcctcaaaagatcaatatgatcccatctctaagggcccttgatctctcttactgtcagcttcaaagagcagaccagtcgcttccgtaccttaatctcacaaaactcgagaagcttaacctttatgagaacgattttaaccatacaatcacatcttgctggttttggaaagcaacaagcatcaagttcctcagtcttgggcagaccagtttattcggccagctcaacgacgcgttggaaaacatgacatcccttcaagccctggatttgtcacgttggcagacatcagaaaaggtgacggatcattactacacattgcagatgatagggaacttgaagaatctttgtagcttgcaaatcctagacctcagctatagttataagagtggtgacataaccgcgttcatggagagtttgccgcagtgcgcatggggtgagttgcaggagctgcatctcagtggcaatagtttcacgggggccttgccacatttgatagggcactttaccagcttgagaacacttgagctcgatggcaacagccttggtggaagactcccaccagcgcttggaaactgtacacgtctaagcacccttcacatcagaagcaaccacctcaatggaagcgtaccaattgagatcggtgtcctttcaaagttaacttcattggatctaagctacaaccagctcagtggtgtgatcaccaaagaacacttcaaaggactaacaagcttaaaggaactaggactgtcctataataatgatttgaaggttaccgtggaagatggttggcttcctccattcagactggaatacggagttctcgcatcttgccagattggccctcggtttccagcttggcttcagcagcaagcgtcaattatctatctagacatttcaagaacaggtgtgaaggacaagattcctgattggttttggcatacattctcggaggccaaatatctttacatgtctggcaacgaattaactggcaatctgccagcacatcttggtgacatggcccttgtacacctcaatctcagttcaaacaatctcactggaccagtacagacatttccaagaaacgttggaatgctagacttatccttcaactcattttctggtacactaccattgtccttggaagctcctgtactcaacgtcttgcttttgttctcaaataagatcggtggcagcattccagaatcgatgtgcaatttgccgttattgtcggacctggatatctcaagcaatcttttggagggcggaattcctcggtgctttgcaaccatgcaactagatttccttctactgagcaataacagtttggcaggaagttttcccacggttctacgaaacagcacgaatctgaagatgttggatctttcatggaataagctctccggacggttacctacatggataggagagctaacaggattaagtttcctgcgacttggccacaatatgttttctgggaatatcccccttgaaattctaaatctcagcagcctccagttcttggatctgtccagcaacaacttgtctggtgctgtaccttggcatctggagaaattaaccggtatgacgacactgatgggcaatcgtcaggacatatcaagtataccattgggttatataaggggaaacggcgagaatgatatcagtatagacgaacagttcgaggaagtcttcttggtaatcacaaaggggcagaaactgaaatatagcaaagggttggattacttcgtgagtattgatctatcagaaaactccttatcaggcgaaattccaagtaacatcacatctctggatgcattaataaatttgaatctatcatcaaaccatctaagaggaaggattcctaacaagattggcgcattgaacgcgttagaatccctcgatctatccgagaacaggctttcaggcgaaataccaccaagtttgtcgaatctgacatctctgagctacatgaacttgtcctacaataatttgtcaggaaggataccctcggggcgccaacttgacaccctcagtgctgacaacccttcaatgatgtacataggcaacactggactctgtgggcctcctcttgaaacgaaatgttcaggaaacggaagtaccatcagtggcaacggtacaggctacaagcaagaaaatgaaccgttgcctttttatattggtcttgtcttaggtcttgtggtgggcctctggatagtattttgtgccatgttgttcaagaagacatggaggatcgcttatttcaagctctttgaccagttttgtaatacgatacatgtatacgtagttctagcgtgtgcaagccgcttggctaggaatacagttgttgaataagaaatactccgtatttggaagcaaccggcgtccacgccaacattatc

SEQ ID NO: 110243 - DNA, 894 bp, Zea Mays
tcgcatccagacatcgcagtagttgccaagcgagcagcggaggaggccggcggctagagggtggcgatggcgcgtgcggaacaggaatcgctggctgcgccgccactggagtcgaccgcgacggcgagacagcgcgtcccgtccgtggaggtgcacttgtaccggcggggcgccggcccggtggccatcttccggtcggacctggcgggccctcggcgggaccgcctcgacgtgcgccgcatccaggcgagccacggcctccgggcgctgttcgccttcaggcccgagggatcccgccgcggccgtggcctccggatcaggtgcgacccggccgccggctactccgcgctgcccttccgcgacggcgccgccatcgccctcgatggcgagcccggggagtcgtggacgaagccggtgtcggtgatcgtcgccggcctgctggtgctcgctgtgatggcggcggttgcggccaacggggtgccggagccgctgcggtcgtcgaggctggccaacgggatctttgcgccgtggatcctcttcagcgccgtcatcatcttcgctcgtgccaggacgcggccaagggctccatgaatttgctagagagcacgctgccgccagtttcttatgtacttactttcccatatcaaccatgttagaatgtaggaatttgctaacgattccaattatcaccggattttgtttgtgtttgctgacggcacgttatctgaaatgctatagattcagactgtcaccgttgttccttgctaacaggaacaagataaaattgtttagcgtagtttcaaacatctcttgcttttcttttcttctatagtgtgtggttggtcaagttacgggctcctagttcattttaaaaggagaaataaaaacggatcg

SEQ ID NO: 110244 - DNA, 1577 bp, Zea Mays
ccagtaataaaaaaaaactcccagtctctctccgtgccgtccgctgttcggctccggaagtccccatccgctccacctctcctcctccactcccccgccccactgatcgcggcggtgagaacatgctctttctacagctcgttgaagttttaaattatattggcattcgtgttgtcaagtctgaactaaagcctcagccaaggtggcatgtctgctaaggtgccaaggtgcctagaagtttgttccagtggcatggcggattgggcctctattcaaacggatattcttggtataataataaagaagcttccaatccctgattacattagattccgtgctgtgtgcacatcttggaacaacgtctgcaaggatgtgtcatactgtccaagggtggacccatggctgatgctccccccaaaccagaatcctcttggtgctcagttcttttgcattcctgaaagaaagaatcaaagtatccgcctccctaacaccgcctcactgttcgaatcggtctgggctccggttggttcttccaatggatggcttatctacttcagtcacacttacggaaccatgcagctggttaaccctgtaagtggcaaacatatccagctccccccgatagggcgcaggaccttctctaaggccaagctgcttgaaatcagcgagaggaacttcatcgtcgctgtcctctatggtgatgagaaaggctacaaaataacacggaaagggtccagcaactggtcgtcggtcgagtcaaaattcattttggatgacatcatcaagcatggaggccggctatacacgtgcgacatgtatggcacagtggagatgtgggcagagccgccccgcgcatggccagacgaggaagtcacgcatcggtggaggttccgctgtcttatagagaccccagctggtgatctggtcagggttaagcgcctgtgccagaacaagtttgctgtttggatattggacaaggcgagctcttcctgggttgggaccgagaacattggggatctcgcgctgtttgtgagccactacaactcattctgtttccctgccagtggccagcccaacctgaaagcgaactgcatctacttcatcgacatctacaacaacctgtgcgctttcaaccttgagcatgggaccaaggaactcgtccaaactcttaccatcggccgaggccaagggcgcaatgactaccaccgctggcctgagcgagaccaggtcttatggtttatcccttcactaaagtaaatactgaaggtaatggtggatgatgcgtgtccgtttacccacccagagatggagctcatatagtactgtaggctcctcctatggacggccatttatcccgatatgaaggtcgtatagtatcctgtatttccaaagtattggatgtcgcacatgcaactgcaggtctatgtatatgagtaccgaacatcgtcttaacttgttgctaaagcaactgtttgaaccatttgaagctttcgtttcaagctgtcttggcctgtaaactattccgaattttcaagttccttgaggattgaaaaaaaacctagaaagcttcctcagtc

SEQ ID NO: 110245 - DNA, 1679 bp, Zea Mays
cagtaataaaaaaaaactcccagtctctctccgtgccgtccgctgttcggctccggaagtccccatccgctccacctctcctcctccactcccccgccccactgatcgcggcggtgagaacatgctctttctacagctcgttgaagttttaaattatattggcattcgtgttgtcaagtctgaactaaagcctcagccaaggtggcatgtctgctaaggtgccaaggaacatgttttggttcagaagcttgcatatgcatgacgcatgcagctgacacgcccatatctatccacggggttatattatctgaagattcatatatggataagtgcctagaagtttgttccagtggcatggcggattgggcctctattcaaacggatattcttggtataataataaagaagcttccaatccctgattacattagattccgtgctgtgtgcacatcttggaacaacgtctgcaaggatgtgtcatactgtccaagggtggacccatggctgatgctccccccaaaccagaatcctcttggtgctcagttcttttgcattcctgaaagaaagaatcaaagtatccgcctccctaacaccgcctcactgttcgaatcggtctgggctccggttggttcttccaatggatggcttatctacttcagtcacacttacggaaccatgcagctggttaaccctgtaagtggcaaacatatccagctccccccgatagggcgcaggaccttctctaaggccaagctgcttgaaatcagcgagaggaacttcatcgtcgctgtcctctatggtgatgagaaaggctacaaaataacacggaaagggtccagcaactggtcgtcggtcgagtcaaaattcattttggatgacatcatcaagcatggaggccggctatacacgtgcgacatgtatggcacagtggagatgtgggcagagccgccccgcgcatggccagacgaggaagtcacgcatcggtggaggttccgctgtcttatagagaccccagctggtgatctggtcagggttaagcgcctgtgccagaacaagtttgctgtttggatattggacaaggcgagctcttcctgggttgggaccgagaacattggggatctcgcgctgtttgtgagccactacaactcattctgtttccctgccagtggccagcccaacctgaaagcgaactgcatctacttcatcgacatctacaacaacctgtgcgctttcaaccttgagcatgggaccaaggaactcgtccaaactcttaccatcggccgaggccaagggcgcaatgactaccaccgctggcctgagcgagaccaggtcttatggtttatcccttcactaaagtaaatactgaaggtaatggtggatgatgcgtgtccgtttacccacccagagatggagctcatatagtactgtaggctcctcctatggacggccatttatcccgatatgaaggtcgtatagtatcctgtatttccaaagtattggatgtcgcacatgcaactgcaggtctatgtatatgagtaccgaacatcgtcttaacttgttgctaaagcaactgtttgaaccatttgaagctttcgtttcaagctgtcttggcctgtaaactattccgaattttcaagttccttgaggattgaaaaaaaacctagaaagcttcctcagtc

SEQ ID NO: 110246 - DNA, 1522 bp, Zea Mays
ggatttcagttcgattatgctgccgttttagtcttctcgacgcatgtgtttgcgatcatgcaagaacatgctctttctacagctcgttgaagttttaaattatattggcattcgtgttgtcaagtctgaactaaagcctcagccaaggtggcatgtctgctaaggtgccaaggtgcctagaagtttgttccagtggcatggcggattgggcctctattcaaacggatattcttggtataataataaagaagcttccaatccctgattacattagattccgtgctgtgtgcacatcttggaacaacgtctgcaaggatgtgtcatactgtccaagggtggacccatggctgatgctccccccaaaccagaatcctcttggtgctcagttcttttgcattcctgaaagaaagaatcaaagtatccgcctccctaacaccgcctcactgttcgaatcggtctgggctccggttggttcttccaatggatggcttatctacttcagtcacacttacggaaccatgcagctggttaaccctgtaagtggcaaacatatccagctccccccgatagggcgcaggaccttctctaaggccaagctgcttgaaatcagcgagaggaacttcatcgtcgctgtcctctatggtgatgagaaaggctacaaaataacacggaaagggtccagcaactggtcgtcggtcgagtcaaaattcattttggatgacatcatcaagcatggaggccggctatacacgtgcgacatgtatggcacagtggagatgtgggcagagccgccccgcgcatggccagacgaggaagtcacgcatcggtggaggttccgctgtcttatagagaccccagctggtgatctggtcagggttaagcgcctgtgccagaacaagtttgctgtttggatattggacaaggcgagctcttcctgggttgggaccgagaacattggggatctcgcgctgtttgtgagccactacaactcattctgtttccctgccagtggccagcccaacctgaaagcgaactgcatctacttcatcgacatctacaacaacctgtgcgctttcaaccttgagcatgggaccaaggaactcgtccaaactcttaccatcggccgaggccaagggcgcaatgactaccaccgctggcctgagcgagaccaggtcttatggtttatcccttcactaaagtaaatactgaaggtaatggtggatgatgcgtgtccgtttacccacccagagatggagctcatatagtactgtaggctcctcctatggacggccatttatcccgatatgaaggtcgtatagtatcctgtatttccaaagtattggatgtcgcacatgcaactgcaggtctatgtatatgagtaccgaacatcgtcttaacttgttgctaaagcaactgtttgaaccatttgaagctttcgtttcaagctgtcttggcctgtaaactattccgaattttcaagttccttgaggattgaaaaaaaacctagaaagcttcctcagtc

SEQ ID NO: 110247 - DNA, 489 bp, Zea Mays
atggagggccagggtcgtcggggctggcgcgtcccgtgcgccgtggtcgcccggctgctcctcttcctcggcgtgaccgtcggcttcgcgttcgccatctaccgcgcgtgccacaaccacaacaagcgcgaccttgtgttcgccatcgtcacctacttcctcgtcgtcgtgttcgcgtgctgcttcgccaagctccagcagctgcggcgcgacccggccgccacggaggcccagatgcggcgtgtcaggatcgccgcctgggtcgtctcgacggcgttgggcatcgccgccacgttacgcgtcgccgacgcggtgcacgggctggcgctgaagctggtcgtgtgggctgtctccatcgtgctccacgggttcgggttctacttccttttcctccgcaaaggcgccaacgccgcccgccagcccggaggagaaggtctagtaaatccaatgtccgcgcccatatattgcaactgcaacatcatggattag

SEQ ID NO: 110248 - DNA, 1754 bp, Zea Mays
cgtttggccatagttgcccggctacccgccgcgccgcaaacccgagccactcgcctgccgcgctgattagatttctttgcatccgccagtggagtcgaatcgatggcggcgtggtcgtcgccgccgtcgcttcgccacctcctcatgctccgtccatgcttgcccctcagccccacctgccttgctggctccttgcgccgccacatccacagccgctgccgcctcttctcctccgccgcatcctcctcgacactgacccacggcgacatcgcctcgacgcacggtgacgccgatggcgtcgtcgaagtcaaccctccgcgcggaactagggatttcccgccggaggacatgcggctccgcacctggctcttcgaccaattcagggaggtctcccgcctcatggccttcgaggaggtcgatttccccgtcctcgagtcggaggctctcttcatccggaaggcaggggaagaaattacgcagcagctctacaacttcgaggacaaagggggtcgccgtgttgttctcaggcccgaaattaccccttccctcgcgcgcctagtcataaagcaaggaaaatcagtctcccttccactgaaatggtttactataggacaatgctggcgatatgagcgcatgaccagaggaagaaggcgggaacattaccaatggaatatggatatatttggtgtgcctaaagttcgggctgaggctgagcttcttcatgctattgttctcttatttcaacgtcttggaattacatcttcagatgtggggatcagggtgtccagtcggaaggttcttcaggctgttttgaacatgtactccatcccagatcacttattcactcaagtttgtgttattgttgataaattgggtaaaatgactagggaagaaattgagaaggaacttgtttcaactgggttgtcatctgaagctgtacagggtatcatcgatgtgctttcaatcaagtcattgtccaaacttgaagaggtgttaggctctgatgttgaagctgttgctgacttgaagaaactcttctcctttgcggagcaatatggttatgctgattggatttgttttgatgcatcagtggtccgtggccttgcatactacacaggaattgtatttgaggcatttgatagagaaggaaaactgagagcaatttgcggtggtggaaggtatgatagattgctttcaacatttggaagtgaagatataccggcttgtggctttggatttggagacgctgttatagtggaactgctgaaagaaaagggtctcttgcctgatatgtcacgccaaattgatgacattgtcttccctttggacgaagaacttgaaggaccagcatccagtattgcttcctctctgaggaagaaaggccgatctgttgaacttgtagaagacaaacgtctcaaatgggtatttaagcatgcggagaggatcaatgcgagccggctgatattggttggaaattctgagtgggagcgaggcatggtacgcgtaaaggtgctatcaaccagggaagagtttgaggtaaagacaagtgaactagagtgattgtagaaatgttacgttatgctagcctcggctaatgcttgtgagatgatacaatcaaacagtagctagctatttctggagagtttaaacttattgtaacagcctgtaacaactattcatattcatacagaatggatgggcatgatccttgccagctagtatgctcatctgacattctgactccaagtatacat

SEQ ID NO: 110249 - DNA, 535 bp, Zea Mays
acatcttgagtttgtggtactgcttcattggagtagcattgattctgttgtaatttgtgttctaacagctgctgaaagaaaagggtctcttgcctgatatgtcacgccaaattgatgacattgtcttccctttggacgaagaacttgaaggaccagcatccagtattgcttcctctctgaggaagaaaggccgatctgttgaacttgtagaagacaaacgtctcaaatgggtatttaagcatgcggagaggatcaatgcgagccggctgatattggttggaaattctgagtgggagcgaggcatggtacgcgtaaaggtgctatcaaccagggaagagtttgaggtaaagacaagtgaactagagtgattgtagaaatgttacgttatgctagcctcggctaatgcttgtgagatgatacaatcaaacagtagctagctatttctggagagtttaaacttattgtaacagcctgtaacaactattcatattcatacagaatggatgggcatgatccttgccagctagtatgctca

SEQ ID NO: 110250 - DNA, 1932 bp, Zea Mays
ttagctcatccatctcgctgcccgccatccatggagatcgccaagaacagcattgcgagcggccgcgtccgcgacctgccgccatcgaagcgattcaggcacgtcggctcccacctcggatcgactcccagcgtgccgctgccggccaagaagcgcatgctgccgtcgcacacgccggaggaagcagccgtcgctctctgcctcccggtgaagaagagggtcatcgcggcgccgcgggtggaggtggccggcgccacattctgcctcccggcgaagaaacgagccatcgtgccgtcgccgccggaggacgcggcgcccgcgtgcctccccgctaagaagcgcgcctgcgcagcaccggcggatgcggccgtgccggcgcgcgttccggcccaggagcgcccgtgcgctccgctgccgcctccgccggttgtggtctcttgggcccgcgtgtcgactaagaagcgcgtccacgcgccagcgcctcggggccacgccgccggttccgttccggcgcgccgaccagccaacgctctctcttgcgccgagcccctggaggatacggttgcttcggcctccgtctgggctaagaagcgcgcccactcgccaaatcgtcgggaggacgctgcccgttctaccccggtttgcctgccggtcaacaagcgcgtgatgccgccgtttgtgccgcctccatccgtgcagtcagacggtgctcggctagtcgccgccaaagaagccaggcctcaaggatccagtacgcacgtcgacggcggcgccgtcagttctagagtggcaagtggcgccgaagaacgcgccagaggcaaagagttcaagaaacctgagaagcccatcaaccataagggaaccaaggagcaggtgtccatgaagccaaggtctccaccacgtgaagggaagcatctggagaagccgtgcgagatcgtcgatgtcgagcagtatgaagctgtggctgaagcgctcaggaaatctgacgaagcggctgatgctaagggagcatcgctcaaagacgtgacgaggaatggagctgatgaagtggcgggccaagaacaagggcgagagcaggagcccgtggacgtggaggacgacgacgacggcgtgcgctgcgccgtgtgcgcgagcaccgacggcgacccgtcggaccccatcgtgttctgcgacgggtgcgacctcatggtgcacgcgtcctgctacggcaacccgctggcgcgggccatcccagacggcgactggttctgctcgccgtgcgtcgccgggaggggcaagccggcggcggcgcggcgccggagctgctgcctctgcccggccgggggcggcgccatgaagcgcacgacggaggggaagtgggcgcacatctcgtgcgcgctgctcgtgccggaggtgttcttccgggaccccgacgggcgcgacggcatcgactgctcccgcgtccccgcgcaccggttcgccaggggctgctacgtctgcgggggcaacaacaacgggtgcgccctcgagtgctcccagcccaagtgcggcctgggcttccacgtctcctgcggcctcggcgccggcctctgcatcgagtaccaggaggggaagggcggcggcggcgccatcgtcgccggcttctgcagagagcacaccgagctatgggagaagcaacaattgacaggcaagtacaagattgtggcgagaggacaagaatgatgatatgggagatggataaaattgggtgcctgaagatgcgcttgttgttattaggatttgttgtacgtaggagagtctcgtgtactatgttaacaatagtcgaataagttgctttttatttaattattttgcacattgtcctcaagatcacgatcagaaagtgtgctgttgtcggtaggttcatgcagaactaataagcttaataagatctccattggtattgtacttcca

SEQ ID NO: 110251 - DNA, 1187 bp, Zea Mays
atacctgtgccctaatagaatttttacccgtctggtttcggggtaccgattgccagccagagcgagagggagagcgagcgcgagcgcgcagtcgccgtccacaccgttgagttttttctcaggcttcgcatggcctgattcatcctacagtctccaacaagccaagcaaacgccgcatcgcgctttctccgcttccttctttcccctcacagggtcagaccccaacgccgggagaataggggattaggagccagacctggcggcgccgggcgtccaagaaacgctgcctaataaaatccctccggcgtctgtcgtcttgaccgcggcggcgcaggcttcttcttttcgctctccacggcagcgtcatgaagattaaggggaacttgcatgtttgatgtacccctgtagcaaaaaattcttgtgataaaatttgttgaattagtcactgtcagggagggatctagttgtcagttgtttgtattaaagctgctggcactttccttgcagggtttctgtagaataaatgggagaagcacacttggatgaatgttgtcattgccaagggtgtgctggcaagtatacactactcagagatgaagaaaacccacggtggacaatctttgagaggcggcttccttgctgtggttgtgggataggatggtcttcttttcttttaggtttcttgtgtcctttgatttggtactttgcaaccactctttactgctgcaagtactacaacaaagatcctcgagagcgccctgggctagctgcatcagctgttgcggcactcatcttcacagtcctggcactcatcgctctctctgtggcactgataatctatatataaaacgaggaatgaacttgcgcttgcttgaaatgcgtactcaggcactcatcttcacagtcctggcagccatacatcgctctctgtggcacagatcatctgaaacccaaagcgaggaaaacgcggtagctggacctggcattcagaaggaacttgtaatttcagtgatagtagcatatagttgcaatcatccttcatgtatcaccatatcaagttgttgatttaaatgctgcaaccgtccctgttgtcggttgacctgtcggctgctgttgtctatcaacgaggatgatcattgctctatcgcaaactgtgtgctccgtgatctgcgatgcttctgaactca

SEQ ID NO: 110252 - DNA, 1182 bp, Zea Mays
atacctgtgccctaatagaatttttacccgtctggtttcggggtaccgattgccagccagagcgagagggagagcgagcgcgagcgcgcagtcgccgtccacaccgttgagttttttctcaggcttcgcatggcctgattcatcctacagtctccaacaagccaagcaaacgccgcatcgcgctttctccgcttccttctttcccctcacagggtcagaccccaacgccgggagaataggggattaggagccagacctggcggcgccgggcgtccaagaaacgctgcctaataaaatccctccggcgtctgtcgtcttgaccgcggcggcgcaggcttcttcttttcgctctccaccgtcatgaagattaaggggaacttgcatgtttgatgtacccctgtagcaaaaaattcttgtgataaaatttgttgaattagtcactgtcagggagggatctagttgtcagttgtttgtattaaagctgctggcactttccttgcagggtttctgtagaataaatgggagaagcacacttggatgaatgttgtcattgccaagggtgtgctggcaagtatacactactcagagatgaagaaaacccacggtggacaatctttgagaggcggcttccttgctgtggttgtgggataggatggtcttcttttcttttaggtttcttgtgtcctttgatttggtactttgcaaccactctttactgctgcaagtactacaacaaagatcctcgagagcgccctgggctagctgcatcagctgttgcggcactcatcttcacagtcctggcactcatcgctctctctgtggcactgataatctatatataaaacgaggaatgaacttgcgcttgcttgaaatgcgtactcaggcactcatcttcacagtcctggcagccatacatcgctctctgtggcacagatcatctgaaacccaaagcgaggaaaacgcggtagctggacctggcattcagaaggaacttgtaatttcagtgatagtagcatatagttgcaatcatccttcatgtatcaccatatcaagttgttgatttaaatgctgcaaccgtccctgttgtcggttgacctgtcggctgctgttgtctatcaacgaggatgatcattgctctatcgcaaactgtgtgctccgtgatctgcgatgcttctgaactca

SEQ ID NO: 110253 - DNA, 3142 bp, Zea Mays
atgacggcgacggcgcccagatcaccggtgagggtctgcgtcggcacctggaacgccggcggcaaggcgccgccgaacgacctcgacatcgccgagtggctcggcactggcggcgacgccgagcccgccgacatctacgtgctcgggttccaggaagtggtgccgctgaacgccagcaacgtgttcggcgcggaggacgggcggccggcgcgggcgtgggagtccgtgatccgcggcgcgctgcggcaggcgcagccgccggcgcccaggtacaggtgctacagccaccctccctcgccgtcgcggttcgagcccccgatcggtgccgccgaagagctcctccccggcggcacggacaccgagaccgacaccgacgaggacgtgcccttgggcgaccccgtcgcggcagccactccgaccccgagaaagctgagcaggctcaaccacttcagcgtcgtcgtgggcgagaacgagaacggctcatcggagctcaacggcgacgaactggacgacgggcctgaccagccgccgcagcagctaagccttcagcagcgggcgctgctgaggtccctgagccgggcggacagggtaggggtgctctggccggagcagccgctggacctactccccgcgtcgtcggcgtcggcgtcggcgtcagcgtcgttcagggcgtccaagtcgttcagccgggccgcctacaggtcgtcgttcagggggtcgtcccgcgtggcggccgacgtggtggatgacctgcccatgatcccggacctcgacctggacggcgcgctgcggaagaagggccggtcgccgttcgtgcgcatcgtgagcaagcagatggtggggatcttcctgacggtgtgggtgcggcggggcctccggaagtgcgtgcagagcctcaaggtctccaccgtcggcgtcggcgccatgggctacatcggcaacaagggggccgtgtcggtgagcatgtccgtgtaccagaccatgttctgcttcgtgtgcagccacctcgccgccggcgagaagcccggcgacgtccacaagcgcaacgccgacgtgcacgagatccaccgccgcacgcgcttcgccgccccgggcgacctgcagctgcccagaaacatccacgaccacgaccggatcttctggctgggcgatctgaactaccggctggacgcgtcgtacgagcgagcgcacgagctgatctcggcgggaagctggcgcgagctggccgagacggaccagctgaagcgggagctgaggaaggggcgggcgttcgacgggtggacggagggcgtcctggagttcgcgccgacgtacaagtacgagctcggctcgaggaggtacgtcggcgtcggggaccaccagggccagagccagagccagaggggcggcgggcggcggacgccggcgtggtgcgaccgggtgctgtcgtacggcaaggggctgaggctgctgggctaccggcggtcggagctggcgctgtcggaccaccgtccggtgacggccacgtacgcggcggaggtggaggtgttctccagccggaagctgcagagggcgctgacgctcacggacgccgaggtggagggcgggcaggccagccgcatgccccatcaagccctcggagacaccgccatctacccctcgcccacctacctcccgacctcaagcatagacatccatgccaccatcgccaaggccgctgagctccacgcggtgctcctccagggcggcagcgccgccgcatccattgttggggcctacgccagcgctaggcagagcctcgctctcatctgcctacagccggccgcgtcgcgggtgctaacgatcaccaggtcaggcctcctggccatggccatcgaggactaccccgtgtttgccctgctgctctcagatttgaaatgcacaagaaggaacaagcatcaggcgacgaccgtctcgactgcgggagaggggagtgcccctcgagtatccgcagggatccaacacttggacaccgacattcgcataactaggaacatcgaccggggggaaaagagccacaggccaagcggcgagatgaggcggtttggaaccgccatggcagcggcagccgccgacttccgatcccgccgcagccgcggccgccatgtccacctgtacccactccatctgtgcccactggttcgttcttggctccgaatttctttcccatccatctcccttgcgcttcctggtcccttgctgtacatgggtcgccgtgtatgtgatgcgcttgaactgctcgtgaatgatagccttttggcgtgggtatgccacaactctacattgcagctagagatggcagaggaatgccttcttcaagcaaaggacttaagtggcttgttgctactgtactcatctcttggagatgctgaaggaattgaaaagcttgcttctttggcaaaagaacacgaaaaaaacaatgttgctttcctctgcctttttatgcttggtaaagttgaagattgcatacaattgcttgtagacagtaactgtatacctgaagctgcattactggcacgttcatatcttcctagcaaagtaccagagatagtggcaatttggagagacgacctgagtaaaattaatccaaaagctgcagagtctctagcagatccttctgaatatccaaatctatttgaagactggcaggttgctctaactgtagaaaaaagtgttgcgtctcagaggggcaattatcttcctgctgaccagtatgatgctagggtccccctggacactgtgttcacagcttcagttatgaagatgtatctcaagtatgaatcaccagaagtgctggcaaatgaatgtcggcgccccttgtgtccagctcccctgttcgatgggcttcatgcccagtttcttctgctgcttccgttctacttgtcgaggcatcacctccaagatgaagctgccaccgttccatgtcgaggcgcacaccttgagtatcaggaacaccacgtgcatccagtaggacaggaatatagggaccgtcagggccattgttgccactgtgaacagcgcctggagcagtatgtacatgacctgccggttccggtcacccagcagtccgctcagcctccaccagatgttgtttgctttctgtgctttctttgagagctctctg

SEQ ID NO: 110254 - DNA, 1469 bp, Zea Mays
gtccctaatagctctcactccaaacagtttatatcaccagtcctggggaaaagaaagcaaagcaaagcaaaagcgagagagaaacaaaatagaaagcgaagagacgacgaccatgttcccgtcgccagggagggcggtgatggcgctgggccacggtggccagcacatgaccgcgtcgtccaccgccggcggcatggcggcatcctcgtcgtccacccccaccataacgttcgcgttccagcagccgtcccctccccctcctccgacggcgacgagctccctcgccctcgcccacccccaccaccatggcgtgctaggttacggctccgcctgccttctcctggaccaccaccacccaaccaccgccacctcctcggcctctccctcgcacgcggctccgtccagcgtcgtcccggcccccaccctccaccaccacttccatggccatgcagcaggagcgccgcacgtttccctttcccctcccacgagggcgtcgcctcctcctcatcatccatggtcgacggcggcggcctgcgaagaagagccggagccgcatcacgatcatcgccaacaagcaggccaaggcggcagaccgccgagggggaagggagcggcggtgagcgaggggtcggcggcggcgctgggagtgggcgccgtgcggatgaagaaagcgggcggcggaggaggaggcaaggcgcggcggaaggtgcgcgagccgcggttctgcttcaagacgatgagcgacgtcgacgtgctcgacgacggctacaagtggcgcaagtacggccagaaggtcgtcaagaacacgcagcacccaaggagctactaccggtgcacgcaggacaactgccgggtgaagaagcgggtggagcggctcgccgaggacccccgcatggtcatcaccacctacgagggccgccacgtccactccccgtcccgcgacgaagacgacgacgccgcgcgcgccaacgccgagatgagcttcatctggtagcctgcagatccggctccgacgaccggcggccatctctattctctcagtgcatacaacgtcggccgcctccggtctaagtttcgccagcagccgccgccaccaccagcagcagcagctgaatatcctgaatttagctattatatccatccatgcatcgaagaactctcatcgatcgtgtgtgcatgtggcatgtctaggcattatgttattgctatgtcaatcgatctttatatatatacgcgaatgatgtccgtcgctgcaggtacgtagggtgtgaactgcatggtcctcctagctactgtcgacctgtcgtagttaattagctaataatatagtagtgcatccaggttatggactaaataatacttatatacatagcagctacctgaaacgtgttctagaattaccaatgtttattgcacttctttcctttgctactttaaatttataaggttgataagtttgttggtgatat

SEQ ID NO: 110255 - DNA, 293 bp, Zea Mays
accataactgacccaccctctaatctttactccgacctacaagggaaagaagtaatgccaatgaaacacagaagactacaaagtctgaacttagaagctgagacacaggaaaacgtggaacaacatgaagatgtccaagatccacaaccagagctcaccattgggtttcctgagggagaagcgccaacaaggaataagtcattcaaaataatatggcaaaatggagttgttcgggaggtttttagaaatttccgaacagctgaattgtgggatctgaaaggaggaagagtact

SEQ ID NO: 110256 - DNA, 1044 bp, Zea Mays
actatgatgatacacattggagcaatgaaactgattcacatgttcaatcagaggagaacaaaatgattagaagggacctagagcttgctatttctgggtttaggaacattagagcattcctagaaaaaagtttccagaagaggaattgctaagcacaattctagctactggatctggaagcactacacaggttgatactaaagacaatgaaaatgtctcattgcaatatgataatgtagaacgatccagttatgagaaatcaccttcaccatacaatgaacagatttatactagagattataatattgccaaggtgggttgctctgatcattcagtaccaaatgacaacatagctttcagggaatcacaagttacaaggtctagtgacttgaaccaggaactcaacaatggatcactatctctagataaagaaatgtctgataaggaaactcaaagcaagcaacaacaacaaagcaaattgcaacagaataaacagaagactgtcttgttgtactcaacaaggaaaagaaaactaggccaagtttttgctgttggtaatcttatatctagagatactactcatgaaattggaggaactgtacttggggatggatattatgctgttgcggttcattatcttaacaatgttgaagatgaaagattacctcgaccacacggagatcttaaaactttggaggatgctgtgggcatgtgtgttgcttggcctcgcacacatcttaaaagggtgaagccaactactgagaagcgcacttgaatggttagaagactgaagatgcaactaatgaatgagcaagtgttatagtggagagtagttctaggatcaaaagttctagttgtcaatctacttgtttaattgtgttaggaacctcattttattcactcttgtatgtctaatctacctcaagaccacttcgtttggattgaaaatacttatgtattgttgcttacacatgaagcatttaattgatctgttatatatatgaaccttgtgtcttgtatatatatgtgctcaaattgagtgtt

SEQ ID NO: 110257 - DNA, 3982 bp, Zea Mays
ctgcgcacggacgcgccggctgcccgcggagagcctcgggtgggagcgcgccccgtcgaggctcttgagctaccaagcatgtcagaatcaaatgtgaagtggattgatgggcttcacttcacatcattgtactggcctccaccccaggatgtggagcagaagcaggcacaaatcttggcctacgtcgagtactttggccagtttacagctgacagtgagcagttccctgaagatgtagctcagctcattcaaagttcctatccatcaaaagaaagtcgcttgatagatgaagtattggcaacttttgttcttcatcatccggagcatggtcatgcagttgtacatccaattctttcacccatcatagatgggacactgtgctatgataggcatggtcctccattcagctccttcatctctttatttagccatacttctgagcaagagtactcagaacagtgggccttggcctgtggagaaattcttagagtcttaactcactacaataggccaattttcaaagttgaacgccaacacagtgaagctgaatgtagcaccacatctgatcaggcaacatctagtgattccacagataagaaatctaacaattctctaggaaatgaatctgaccggaagccattgaggccactaaccccgtggatcactgacatattgctagctgcacctttgggcattcgaagtgactattttcgatggtgtagcggtgtaatgggaaaatatgctgctggtggagagttgaagcctccaactactgcttacagccgaggatctggaaagcacccacaacttatgccttccacccccagatgggctgttgccaatggagctggagttatattaagtgtctgtgatgaggaggtagctcgttatgagacagcaaatttaacagcagcagctgttcctgcgcttctgctacctccgccaacgacacccttggacgagcatttggtggctggtctgccccctcttgaaccatatgctcgcttgttccatagatattatgcaattgctacaccaagtgctacacagaggttgctttttggtcttctcgaagcacctccatcatgggctccagatgcacttgatgcagcagtacagctagttgagctacttagagcagctgaagattatgcttctggcatgcggcttccaaagaattggatgcatctgcatttcttgcgtgccattggaactgcaatgtcaatgagagctggtattgctgctgatacagctgctgctctgcttttccgaatactttcccaaccaacgctgctttttccaccactgcgacatgctgaaggagttgacgtacatcatgaaccactaggtggctatgtatcatcatataagaaacagttggaagttcctgcatctgaggccactatcgatgccactgcacaaggcattgcttctttgttgtgtgctcatgggcctgatgttgagtggagaatatgtaccatctgggaagctgcctatggtttgctaccactaagttcatcagcagttgatttacctgaaattgttgtagctgccccgcttcagccacctacactgtcatggaacctgtacttaccattattaaaagtattcgagtatctacctcgtggaagtccatctgaagcatgcttgatgaggatatttgtggcaacagttgaagctatacttaggagagcttttccttctgaaacaccagagcaatccagaaagccaagaagtcaatctaagaatcttgctgttgctgaacttcacacaatgatacattcactctttgttgaatcctgtgcctcaatggaccttgcctcccggttgctatttgtggtgttaactgtttgtgtaagtcatcaagctttgccagggggcagcaaaagaccaactggtagcgataaccattccctcgaggaagccactgagcattcaagattaacaaatggaagaagcagatgtaagaagagacaaggccctgttgctacgtttgattcgtatgttctagctgcagtttgtgccttatcttgtgagcttcagctgttcccttgcatttctaagaatggatcacattcaaatttaaaggattccatgaagattatcatacctggaaaaaacaatgggatcaataatgagctacacagtagcatcagctcagcaattattcatactcgtagaattcttgccatcctcgaagcccttttctccttgaagccatcatcagttggtacctcatggagctatagctcaaatgaaatagttgcagcagctatggttgctgctcacgtttctgagttattccgtcggtccaggccatgccttaattcactctctgcactgatgagatgcaagcgggatgctgagatttctaccagggcatcatccctctaccatttgattgacttgcatggtaaaacagtgtcctccattgtgaacaaagctgagcctcttgaagctcacctgacccttacaccagtaaagaaggttaatcaacatcgctgtgaggaaaacaacaccaactcatcggatagtgccaagttggaaaacaagaatggttcaacacataagaaaaacggtttctcaaaaccacacttgaaatgtgcagaagaggttctgaacggcaatgttgcaagtacatctgggaaatccattgcaagcttacaggtggaagcatctgatttggcaaacttccttaccatggatcggaatggggggtaccgaggttcacaaactctcctaagatctgtattatcagagaaacaagagctgtgcttctctgttgtctcattgctctggcagaagctcatagcttctcccgaaatgcagatgtctgcagaaagcacatcagctcaccaaggatggaggaaggttgtggatgcactttgtgatgtcgtttcagcctcaccaaccaaggcctcagctgctatcgttctccaggccgagaaggacttgcagccttggattgctagagacgacgaacaaggccagaagatgtggagagtcaaccaacgtatagtgaagcttatagcggagctcatgaggaaccatgacagccctgaaaccttggtgatactcgctagtgcctctgaccttctacttcgtgctactgatggaatacttgttgacggtgaagcttgtactttgccacagcttgagcttctcgaagtaaccgctcgagcagtccatcttattattgaatggggagatccaggtttatcagttgctgatggcctttctaatctgctaaagtgccgtctttcaaccaccatccgctgcctttctcacccaagcgcgcacgtgcgcgcgctcagcatgtccgttctccgtgacatcctggaccacggatccgtgagccccaacaagatcagccgaggggaacagcagcggaatggcatccagagcccatcgtaccggtgcgtggccgcaggcatcctcaactggcaagcggacgtggagaggtgcatagagtgggaagcccacagccgccgcgccaccgggctgacgctcgccttcctcagtacggcggcgaaggagctcggctgccctctcccgtgctgacgaggccgctcccggatctgatctgacatcggcggccacttgacggccagtgctggcagcttgctgcgggaccggcgagtaggacgctaatctctcgaccaaggacgactcgccggtttgttcacgtgatatgtgatcaaactgatattagatggtgtttccaaagtatatatctactgaggggcttgctcccatgatgcgattttattccaatctgacgtcagatgctttacgagcatatttaactgcttgagctgtacgtagcttgtattacttgtaactttgtgtaatatggttattattgccgaagaagcagaacatagctttttcttttttttctctctcttttttagactgctgctagatccttatccatgcgttgcaacggagcgccatatagattgaagttccccttgcaggg

SEQ ID NO: 110258 - DNA, 2153 bp, Zea Mays
taagactcgagtggaggcggcaagcgaggccaccagtgttcaaaaactctgaaaattcccacctctccctccctctctcgcgcgtccgcgcccgcgcccgcggcctcgttcaatccgccagcgctcccccgccccccggtggtagcgggctctacggcagcgctcctctccggttcccctgcgctccgcgtcttcatctgtggcggccgacgctccgtcggtgtctcgtcggacggagcgagcggagctagggttccgtttcatgctcaggatcggcgagatctagggtctcgatttcagggtgattgtactggatagctgctgctgatattgcaagacaatgaaagctcatcagcagcaaggtaatgcatctggcacaggagcaaagaccaaatctggttgtgataaggtacaaagcctgaaagctggtgcacatatcaacaaatcatcaggcaatgtggctgcaaagcgcagaaaagtctctccttttgaatcacataccaaaagcaagatagcatcaaagactgacagtcttatggaagcaccagcaagtgatgctaagttgtctgctcggccacctaatcactctggaaagatcaaacttcaacttttcccattatatgaaaccattcaagagattatgcagcaagaaaaacacaatccttaccttgaattgactttggctcctcgaaagaagatgtcctcaattttacagcatctgaatacaaaatggggcagttctcagtgtgcaaaaggcgagctcatgctcttccctaatgatactagactggacactataggtggcagtgcaaaatggactcttaaggattcttgcacagctgctgatgtgcatgttgcagttggctacccttcaacatttcgtttaaggtatggttggtttggacctgatttgaaccaacaaagtagtgaaccatccttggcatcagcgtactctgcagacaagattattggcagcaggcctcctgatcttgttttcaatgaacaaaaacatatggctggttcagatgaatttgcaaatcattttgtgacaccctccattgtggatgaaataaatacatcacaaatggcggagaatccaagcaaggtggcacaactttcatggcttgactccatatctaatattagttttggagcactgttatctgaagctgcgccttctcaagacaccaaacaaccgccttcacaaaatagcatttgtctccagcagatccctcccacatgtgattcatttgatgctgctattgcttcgctgattgcccgtcagcaaccaagtaaccaaccaaaagtgttaaatccatccctttgggaagccgaagaaacttgccatgcatttcccttccagaatcaaactccacatgcatcaagttcagttcctggcaacagctttgctgctatgacctcatcagtcttgtgcgccattccagaaactggcacagatgatcagcaatgtgctacggatggtaggaaagaggaactaaacagtcaaacatcagtagagggcgatggtattaatgcaaagccagagatttcaatggagtcagctggtgacccagagcgtgaagcatcttgccccagactcttgggtggaaccgacagtataggactaagctctttgctcactgacagcctggatgcgttccagaaattctctgttttctgaagctcagaaatccataaagaacgacgggcttatacaatatgaactaagcggaggtatatattaaccaggtttctgtttcgtgaacagaactaattgttttgggcttcctaagttatttctgtagataaaactccccatatctgtattgtgaagttttttattatctctagtttactactccatctgttcttttttatttatcgcggtttagtttaaaaatgtactagctgacgacaaatattcgagaacggaggtagtactagaaagaaatatgtattctgaagttgaaatttctttcgctttatcttaaggtagcaagtgcctagcctatagggaggctctgccaactgggctgtcacccagttatatttgtcattgcatcttgctgttaagtgaacatttgttctttggaacattgatcggctgtggtattatagtgcaataacaagcggtaatctggccgttttgctgt

SEQ ID NO: 110259 - DNA, 2127 bp, Zea Mays
accagtgttcaaaaactctgaaaattcccacctctccctccctctctcgcgcgtccgcgcccgcgcccgcggcctcgttcaatccgccagcgctcccccgccccccggtggtagcgggctctacggcagcgctcctctccggttcccctgcgctccgcgtcttcatctgtggcggccgacgctccgtcggtgtctcgtcggacggagcgagcggagctagggttccgtttcatgctcaggatcggcgagatctagggtctcgatttcagggtgattgtactggatagctgctgctgatattgcaagacaatgaaagctcatcagcagcaaggtaatgcatctggcacaggagcaaagaccaaatctggttgtgataaggtacaaagcctgaaagctggtgcacatatcaacaaatcatcaggcaatgtggctgcaaagcgcagaaaagtctctccttttgaatcacataccaaaagcaagatagcatcaaagactgacagtcttatggaagcaccagcaagtgatgctaagttgtctgctcggccacctaatcactctggaaagatcaaacttcaacttttcccattatatgaaaccattcaagagattatgcagcaagaaaaacacaatccttaccttgaattgactttggctcctcgaaagaagatgtcctcaattttacagcatctgaatacaaaatggggcagttctcagtgtgcaaaaggcgagctcatgctcttccctaatgatactagactggacactataggtggcagtgcaaaatggactcttaaggattcttgcacagctgctgatgtgcatgttgcagttggctacccttcaacatttcgtttaaggtatggttggtttggacctgatttgaaccaacaaagtagtgaaccatccttggcatcagcgtactctgcagacaagattattggcagcaggcctcctgatcttgttttcaatgaacaaaaacatatggctggttcagatgaatttgcaaatcattttgtgacaccctccattgtggatgaaataaatacatcacaaatggcggagaatccaagcaaggtggcacaactttcatggcttgactccatatctaatattagttttggagcactgttatctgaagctgcgccttctcaagacaccaaacaaccgccttcacaaaatagcatttgtctccagcagatccctcccacatgtgattcatttgatgctgctattgcttcgctgattgcccgtcagcaaccaagtaaccaaccaaaagtgttaaatccatccctttgggaagccgaagaaacttgccatgcatttcccttccagaatcaaactccacatgcatcaagttcagttcctggcaacagctttgctgctatgacctcatcagtcttgtgcgccattccagaaactggcacagatgatcagcaatgtgctacggatggtaggaaagaggaactaaacagtcaaacatcagtagagggcgatggtattaatgcaaagccagagatttcaatgcaggagtcagctggtgacccagagcgtgaagcatcttgccccagactcttgggtggaaccgacagtataggactaagctctttgctcactgacagcctggatgcgttccagaaattctctgttttctgaagctcagaaatccataaagaacgacgggcttatacaatatgaactaagcggaggtatatattaaccaggtttctgtttcgtgaacagaactaattgttttgggcttcctaagttatttctgtagataaaactccccatatctgtattgtgaagttttttattatctctagtttactactccatctgttcttttttatttatcgcggtttagtttaaaaatgtactagctgacgacaaatattcgagaacggaggtagtactagaaagaaatatgtattctgaagttgaaatttctttcgctttatcttaaggtagcaagtgcctagcctatagggaggctctgccaactgggctgtcacccagttatatttgtcattgcatcttgctgttaagtgaacatttgttctttggaacattgatcggctgtggtattatagtgcaataacaagcggtaatctggccgttttgctgtaa

SEQ ID NO: 110260 - DNA, 718 bp, Zea Mays
cccgcagcaatctctcctcctcgctcgcccccgcaggccgcggccgcccatcgtctccatggacggcggcgggtacagcccgcggttccagcgccaggcctcctgctcctgcgccccctccatctcccggcgggggttcgtccgcgcgggcttcgacctcgacggcgacggcgacgacgacgccgccgccgccgtcgtcttccactcctcctcgtcctcgtcctcctcctccttctccaaggccgacggcccgggtgcgccctactactactactccgccgccggggccccgcggccgtccgcgcgcgccaggctgagggcgctgtggcgccgcgtcgtgcgggagaagaagcggatcctgctctgctccaccggctgcgtgccggcgccgcaccgcgaccgggagccctacgacgcgtacagctacgcgcagaacttcgacgacggcgaggcgtgggtggaggagcccgacaacctctcgcgctccttttccgcgcgcttcgccgtcccctccagggtcttccagagggtcgccgtgtagtgtaggaaccgccgtcccgctcgctggcggccggcggccggcggcgtcaagatttttacttttaatctccccccccccccccccccccccccccccccccaactccaattttggtccggtgaattctgaaaacagaagcatccatccccatctgtacatgcattcatatttttttcg

SEQ ID NO: 110261 - DNA, 1046 bp, Zea Mays
aagcggctgggcgccccaagccccacatggtgcagcgaggtccacgctaacaacttctcgaccttggcctcccacggctctgcagcattgccgcgcgccgccggccgccactcgtcgtactgacgcgagaaggaagatgctctaggaagttgggggcctggctagggacagcctgtgtcccgccgtgggatcggtgggagagggggaggcagccatgtgtgatctggtggcccgcacgggccggcacctgcagcgctacgagaacggccgtcgccttgtggccgggtgcataccattcagatacatggatattgatgatggagcttctgatgatgaacaaaagaaacttgttgaagttctcatgatcagctcacaaagtggaccgggtcttctatttccaaagggaggctgggagaatgatgaagctgttgaagagacagctgcaagggaagctatcgaagaagctagagtgcgaggagatttagtgcaactgctggggttctacgatttcaagagcaagcagcccgaagcaacgtgtagagccgcaatctttgctctgcacgtgaaggaagagcgagcatcctggccagaacagagcacccgacagaggagctggctcacagttcccgaggcggcggagcggagctgctacctgtggatgcaggaggccctcgtgacaggcttctcctcctggctcgagaactggagaaacggtggtggcggcggctgcgtggaccgaactgagagatgacaccaccttaaatcatcagggggccccggcggagaagccatgtgctatttggcgttgtatctttgcttggactaaaattttcttccagaggctgactggcgtacatgcatgagggatctctgatgcttggtagcttttgtttactttgtcgctttattacaccgtcttcaggatgacagtctcctcagctgatgatgacccgagggatgttggagttgtaagctgctgattcttgcggtcgccagctatatttaactgtcttgtattgagccttgagacaaagcaagctttgtgt

SEQ ID NO: 110262 - DNA, 103 bp, Zea Mays
cctgttccctgcatttatggttcagttttttcacagcctataatatttcttcgatgtattgttgttctgctatcacaaggaaagttctcagctgatgaaattc

SEQ ID NO: 110263 - DNA, 2169 bp, Zea Mays
acgaaacaagtccatctagaccgttcctcctctaatccccatcctcgctccccccaaccctcaccgccatggcgaccaccgaggactccgccgccgcgggcgaggcccgacgcctgttcgccctcctcgagtcccagcagcaggtactctctgactgccacggcgcctggtcgcgcgccctcgcacactttgcctcgcgcgaggaggacctcgcctcccgctccgctgcactcgacgaagccctagccgccgccgacgtttccacttccgagactctcgcagcgctcgaggcccgcgagtcctccattcccgcgcgcctcgctgaggcctccgccgcgctctccgccgccgtcgctgaggccgagactgaatccaccgggccaccacccaccgacatcaagggcgcgctccggtggatatgccgccgcatggacgctgctgcgctctggcgcttcatggccgcacgccgccgggagctcgcggtagtccggagggaggccggccccgccgtcgccatggccgtcgacccgccccgccttgtcctcgacgtggtaagcgatttcttagccgctggcgacggcgtcggcggggaccaatgctgggtgctcggcatgttgctgcgctctttgttcgatttggatggcaggaagcctcccgagataggagatacattggttgagagggcgtttgcagtaaccaaagagtggcaagagcgctttgggatcaatatggacaatttgtcttctgaagacaaggaggtggagatggccgaagctgatgggtcagagaactcaggagcaacagagaagaaagaaggaaaagaagatgaggagcaggaggaggtggaggaagaggacgaggaagaggaagaggaggaagacccagaggaggaggaggaagaggaggaggaggatgacccagaggaagtagaggaacctgaggcaccaggaaaggaagggaatgaggtgaagggagaaggggcagagggaaaggtgtctgaggagggagaaggggcaggggggaaggtgtctgaggagggagaaggggcagagggaagggtgtctgaggagggacaaggggcagagggtaaggtgtctcaggagggacaaggggcagagaaaataggacatgaggatgagaagaagggagcagcagtgggcaccatgaaagtgaagacgggagaagaaggtaataagggtgcatcagagcaatcggaggcacagatatttgtgcagatggtagcggcatttggattgaaggataagttcgatgaggagttcttgagaaggctgtttgttgctaatggacggaagagggagcttgctaggattgcatgcgtgcttggatttgaggaaagccttggagatattgttgaggaactaataaagtcagggaatgctatagaggctatatatgttgcccatgaggctgatttgcttgggaaatttccacctgtgcctctcttcaaatcttatctgcagaattccactgataaggctcaggcagtgttgaaaagtggaagacattccagttctgcacttgaagaggcaaacagcttggagggcaatgcatacaggtccgtcataaggtgcgtcgagtcctgccagctacaatcggtgtttcctttagaggtcctgaggaagaagttagggaagttggagaaagagaagtctgataggaagaaggcagctggtccaagcagattcccgaacaagcgatcccgcggcgcagctggaccctatcccttccctgctgccaaggctgctaggggctcaagctttggtccgcgtttccagaacccagtctcacgttccttaaactacgcacctcatgctggatatataaacccagcagctgcatcaccattctctgtccctgggagcgtgtcggggagacgaggtggtgtaccatatggcggacctggagccacgtatggtggctcccctagctttgcaaccggtggtgggcagcaaccattccgtcgttaggtctagggctgtttgttgtaactgaatgctccttgttttctggctaatagggataatgtatgcctccagctattcaagcatacttgttcagttcttgatggatgctggatattgaacgtcgtgtagtacacattctatggtactgtgtttgctttgttaaatttgaactgtgtcttccata

SEQ ID NO: 110264 - DNA, 1177 bp, Zea Mays
gaaacaagtccatctagaccgttcctcctctaatccccatcctcgctccccccaaccctcaccgccatggcgaccaccgaggactccgccgccgcgggcgaggcccgacgcctgttcgccctcctcgagtcccagcagcaggtactctctgactgccacggcgcctggtcgcgcgccctcgcacactttgcctcgcgcgaggaggacctcgcctcccgctccgctgcactcgacgaagccctagccgccgccgacgtttccacttccgagactctcgcagcgctcgaggcccgcgagtcctccattcccgcgcgcctcgctgaggcctccgccgcgctctccgccgccgtcgctgaggccgagactgaatccaccgggccaccacccaccgacatcaagggcgcgctccggtggatatgccgccgcatggacgctgctgcgctctggcgcttcatggccgcacgccgccgggagctcgcggtagtccggagggaggccggccccgccgtcgccatggccgtcgacccgccccgccttgtcctcgacgtggaagaggcaaacagcttggagggcaatgcatacaggtccgtcataaggtgcgtcgagtcctgccagctacaatcggtgtttcctttagaggtcctgaggaagaagttagggaagttggagaaagagaagtctgataggaagaaggcagctggtccaagcagattcccgaacaagcgatcccgcggcgcagctggaccctatcccttccctgctgccaaggctgctaggggctcaagctttggtccgcgtttccagaacccagtctcacgttccttaaactacgcacctcatgctggatatataaacccagcagctgcatcaccattctctgtccctgggagcgtgtcggggagacgaggtggtgtaccatatggcggacctggagccacgtatggtggctcccctagctttgcaaccggtggtgggcagcaaccattccgtcgttaggtctagggctgtttgttgtaactgaatgctccttgttttctggctaatagggataatgtatgcctccagctattcaagcatacttgttcagttcttgatggatgctggatattgaacgtcgtgtagtacacattctatggtactgtgtttgctttgttaaatttgaactgtgtcttccata

SEQ ID NO: 110265 - DNA, 1960 bp, Zea Mays
ctcgcccccgcccgccactcaagcactcccttcccctgaactaactccctcccgcctcacgcccacaaaaaatttctccgcttcccgccctcctccccaatggcctcgccggcgaagcgtgccaagccctcgtcgccggccaagccctcgagttcgccgcctcaggaagaggcgaccgccgccgccgtctctgaggaccccgtcgtcctcctccgccgccgctgggaacttgcatccgtgctccactttctcagggtgtttgagccggtgatcgaggcgaacttggggctatccgcggatgagatcgagatggcactcgcgtccaacaaccgcgacctagctcgcatacacattgcccttttgaagggaatacctccagttaacaaacatctaaaagatgaggatggatggattattgtaactgccaaaaagctaacagattggtggtcgtgggttgctgaaggagcaaaccctttcagaaataattcagggaaagaagtcgagatgtataagcagcaagatccaatcaagcggttgttgatactaaaagcgctttgtgaagtccgatctgagcaagatgatgcggtgtggtatgttaatgatgaaatgaagaaaggaactcatatttccaactttcggaaagataaactaggcagtggcagtagtgggactacatactggtatgacggtgattcaactattggccatagattatacacagaagacgtaacagttaattttaagcagaattggatgggaaagggtggccgtttgacaaaaccagttaccaatatttactgggaaacagttgcaactaaccttgacgagtttcttgaaatatcagagaagttatccagaaagggtcgtgctgaatctgctattgcagattatcttaagacagaagttattccagctgtggagaattttcaaaagaaaaaagagagacgtttaaaacggcaggagaagaaggacaaacttttagcttttactaacacattccaaacccgttcattgcgggaacgtcggcctgtcagctacaattactctgattttgatcgttccattgaggaggcgataagagctgtacagaaaggaaaagtacaaggttcacgtgaggcaggaacagaagagaaacctgcttcacatcatggagacaaaggtgccgatggaagatctgacatcaattctgaaaacaacaaaaatggaggacaggaggatgccaagtacctaagtgacctgagctctggcgatgaggaagacggagactacagtgacaggggtgtcagctccgctgacagtgacggagacaataatgcttctgattcctacaagagcgacatggaggaggatgtgtctgtaccacgcaagagaacccgtcttgctgcccgtttggcaaatgacaagcctcggccagggcttcgtcggagccaacgaaacatgaagaatgatgaagagactatgcatccaggtcaggtcacccctccaccaatggcgaagaaaacactgaggcaaaggcccacgcctgtctccaagcagcctgacattactttctcgagctctgaagatgatcttgcacaggttgttgcagactcagaggatgaaagtgggtaatttggcagaggttcggttgcatgcggtattttggattttgccttgtgggagccggttgaattccacaggtttagcgtcactaggcacttccatagtttcacttctaccggctggccggaatcagacgcagacagcaccggcgttttccccatatccgatgtgttatcttcacgaagtcattgggacacctctgacccacttgtatggtgatttgtacatatgcatttagacactatactgcgatgcatcaccactggagcacccaaaaatcttgctgatgaaatgcttctgatgtgaactatgttatccatgcattcgaagagaaatggtgcttatgtttgctttagac

SEQ ID NO: 110266 - DNA, 2028 bp, Zea Mays
ctcgcccccgcccgccactcaagcactcccttcccctgaactaactccctcccgcctcacgcccacaaaaaatttctccgcttcccgccctcctccccaatggcctcgccggcgaagcgtgccaagccctcgtcgccggccaagccctcgagttcgccgcctcaggaagaggcgaccgccgccgccgtctctgaggaccccgtcgtcctcctccgccgccgctgggaacttgcatccgtgctccactttctcagggtgtttgagccggtgatcgaggcgaacttggggctatccgcggatgagatcgagatggcactcgcgtccaacaaccgcgacctagctcgcatacacattgcccttttgaagggaatacctccagttaacaaacatctaaaagatgaggatggatggattattgtaactgccaaaaagctaacagattggtggtcgtgggttgctgaaggagcaaaccctttcagaaataattcagggtatgagtaagtctactattgcatttgtctatgatgattttattgctacaacctatttgtgtttgcaggaaagaagtcgagatgtataagcagcaagatccaatcaagcggttgttgatactaaaagcgctttgtgaagtccgatctgagcaagatgatgcggtgtggtatgttaatgatgaaatgaagaaaggaactcatatttccaactttcggaaagataaactaggcagtggcagtagtgggactacatactggtatgacggtgattcaactattggccatagattatacacagaagacgtaacagttaattttaagcagaattggatgggaaagggtggccgtttgacaaaaccagttaccaatatttactgggaaacagttgcaactaaccttgacgagtttcttgaaatatcagagaagttatccagaaagggtcgtgctgaatctgctattgcagattatcttaagacagaagttattccagctgtggagaattttcaaaagaaaaaagagagacgtttaaaacggcaggagaagaaggacaaacttttagcttttactaacacattccaaacccgttcattgcgggaacgtcggcctgtcagctacaattactctgattttgatcgttccattgaggaggcgataagagctgtacagaaaggaaaagtacaaggttcacgtgaggcaggaacagaagagaaacctgcttcacatcatggagacaaaggtgccgatggaagatctgacatcaattctgaaaacaacaaaaatggaggacaggaggatgccaagtacctaagtgacctgagctctggcgatgaggaagacggagactacagtgacaggggtgtcagctccgctgacagtgacggagacaataatgcttctgattcctacaagagcgacatggaggaggatgtgtctgtaccacgcaagagaacccgtcttgctgcccgtttggcaaatgacaagcctcggccagggcttcgtcggagccaacgaaacatgaagaatgatgaagagactatgcatccaggtcaggtcacccctccaccaatggcgaagaaaacactgaggcaaaggcccacgcctgtctccaagcagcctgacattactttctcgagctctgaagatgatcttgcacaggttgttgcagactcagaggatgaaagtgggtaatttggcagaggttcggttgcatgcggtattttggattttgccttgtgggagccggttgaattccacaggtttagcgtcactaggcacttccatagtttcacttctaccggctggccggaatcagacgcagacagcaccggcgttttccccatatccgatgtgttatcttcacgaagtcattgggacacctctgacccacttgtatggtgatttgtacatatgcatttagacactatactgcgatgcatcaccactggagcacccaaaaatcttgctgatgaaatgcttctgatgtgaactatgttatccatgcattcgaagagaaatggtgcttatgtttgctttagac

SEQ ID NO: 110267 - DNA, 3848 bp, Zea Mays
atgccattaactcctaggcagaccaagcatttgctgaattatctttctcttgcaccttattttgctatcctgaatatgcttgattctcttttatgcagaaatcaatacgattcccaggttagacattcagaggggaaaaacttgcctgtggaaaatcaagttctctcaaatgagtgcttaggtgcattgttctcaagacctatttacggcgaacacagcagaacaatcctttccccagaaggaggtgcagatatgtctccctctcaggagccccaaaagcactcactgaggtcttccactgatgaatctacaagagcaaccaaagaagttattctggagcatccaaagaagttattctcagagtctcatactaattgcattcatgctacagccttaaatgagaactttggtgtgcaaactccttcccaggttgcctcaaagaaaatcttcccagggcttgctcatggtgctgatacacctttaactggatatggttcagaacaaactcttttgcagcattcatcaaagaagttctcattggtttctgctaatggtaaatacactagagcagcggtgacaccgtttgagcaaaattcaaataatacccgtgcagaggaactttcaaagatgcgctcagggtcttcagacatgttgtatcttaaaccaacaaatttgtctgcagaactcgagacaaatggaaccccattgaagaatcactcaaagaattcctccttgcttatggacggtaaatataacataacatctgctgcactatttccagaacttgactctagtcctctgaaaccagaaacaccagcaatgcaggcagctattcctcgcctgaagcgagttcaggaagaccaaggtgtggatgccaacaaccaatgccctcctttgtgggccatgaacaagaagatgaaatcagctcattgttctattgaaaagaaggatcatgatgaaatggctggtagcgcgcgtagcaaatttgagtggctgaattcatttgccatcagagatgcaaataaaaggcggccaaatgatccactttatgacaagagtacccttttcattccacctgatgcattgagaaaaatgtcaacatctcaaaagcaatactggaatattaagtgcaaatatatggatgttgtcctctttttcaaagtggggaaattttatgagctctatgagctagatgctgagattggccaaaaagaacttgactggaaaatgactgttagtggggtgggcaagtgcagacaggttggtatttcagaaagtggtatagatgatgctgttgataagcttatagctcgggggtataaagttggaagaatagaacaaatggaatctgcaaaccaggccaaagctagaggagtacattctgttattgaaagaaagttggttcatgtgtccacaccatcaaccgcggttgataacattggtactgatgctgttcaccttctggcactgaaagaggtgaccctagcttctagcggtttccaggtctttggatttgctttcctagactatgctgcccttaaaatttgggtgggttcagtccaagatgatgactcgtctgcagctttgggtgctttgttgatgcaggtttctcctagagaattaatctatgaaacctcaggcatctcaaaagaaactcaaaggacaataagaaaatatgcctcagcaggatctgtgaagatgcagctgacccccctctccgggatagatttctctgatgctgcacagattcgaaatttaatacattctaaagggttctttaatgcatcaacagagtcatggttatctgctttggattgcacaatgaatcaagatgtagttatttgtgcacttggtggacttattggccatttgactaggctcatgttacatgatgccctgaaaaatggggaagtcttaccataccatgtgtacaaaacatgtttaaggatggatggccagactcttgtgaacctcgagattttcagcaacaatttcaatggtggttcatctggtactttatataagcaccttaatcactgtgtcacagcatctggtaagcggatgctaagaaggtggatttgtcatccacttaaagacattgatgctatcaataaaaggcttgatgttgttgaggggtttatccaaaactgtggactaggccctacaacacttgggtatctccagaaaattcctgatcttgagagattattaggacaagttagatccactgttgggttatcatctttgcttcaactgccctttattggagaaaaaataataaagaaacggattaaaacatttataatgcttatcaatggcctccgcaatggtattgacttgctaaatgatttacaaagagcggaccatggtatcttggcgctttataagattgtggatattccatcattgagctatcttcctgagttaatccataagtttgaagagagaatgcaaaatgagtttccatgtggccaggtttctgatgtcaatgccaatggtgccaacgatttggctgctctgatggacgtttttatcggaaaggcttctgaatggtctttggtgatcaatgccgtcagcactattgatgtgcttaggtcctttgctgcaatgacattgtcatcatttggtgccatgtgcagaccacaagttctgctgaaagatgatgtgcctgtacttcgtatgaagggtctgtggcatccctacgcttttgcgggaaatgcaaatagtctggtaccaaatgatttaacccttggtcaggatttatctggtctcaatcgttttgcattgctgttaactggtccaaatatgggtgggaaatccacaatcatgcgtgccacctgcctggctgttgtacttgctcagcttggctgttatgtcccctgcacgtcatgtgagttgacccttgcggattccatctttacgcgcctcggtgcaacagatcggattatgactggggaaagtacttttctcgttgaatgtactgagactgcctctgttcttcagaaagcaactgtggactcgcttgtcttgcttgatgagcttggcagaggaactagcacatttgatggatatgcaatcgcatatgctgtgtttcgccacctagtggagcgagtgcgatgccgtcagctctttgctacccactaccattctcttacaaaggagttcgcctcgcaccctcacgtgagcctccagcacatggcctgcatgttcaagccaaggagcgacggcaacggccagaaggagctgaccttcctataccggctgacctcgggggcctgtccagaaagctacggcctgcaggtcgccgcaatggcagggatcccgaagtcgatagtggagaaggcgtctgtcgcgggccaggtgatgagggctaagatcgccgggaacttcaagtcgagcgaacagcgagctgagttctcgaccctccacgaggaatggctgagggcggccctggcggtgagcgcgatggacggacaaccggacgacgacgacgtcatggacacgctgttctgcatccagcaagagctgaagtctcacttcaggaaggcgagatgagcattcgccgccgccgctgatcgcgtacgtgggagtactaattatcaatgcctagattcttcagtgatgtcgtatctttacaaccatggtagatataatgtaatccgcgttttttttccatggcacgaatcctgtactttaaacaaagtatcttgtgtatatatgttctgtgctatgtcttgtttgcattgggcagcaaggaccactatccttaatcacttccaccgtttatgtgcatcatatacatttgtgtttggtttgaggaataaaatagtttattatcttttcacttt

SEQ ID NO: 110268 - DNA, 108 bp, Zea Mays
tctggggttttccacgagatctctccgaaacgtatttgctgtggtcctgtggatgatgaatcccgtaagctctcagctattgtttttgtgtggcacgtacgtacgtag

SEQ ID NO: 110269 - DNA, 2172 bp, Zea Mays
cctttggtatactaattgttctattttctaaaatttgacctatggaaattggagacctgatatattcaatgttctatcttcagatggagagcaaattggctgaaaatgaggcagcactttcattgatgagggataattatgagaaacggttactggagcagcaagcagcacaaaagaagcaatctatgaagttccaggagcaggaagtttctctttcaggtcagttggcttcagcaacaaagactttgacatcactgagtgaagaattcagaaaggagaagaaattagctgaggaacttagggatgaaatacagagattagagagtagtatcacacaagctggcattgataatgatgtgcttgaaactaaattggaagaaaagcttggtgagattaattttttgcaggaaaaggtaagtttactcaaccaagaaattgatgataaggagaagcacatcagggaactcagtgcatcactttcctcgaaggaagtagactaccaaaagctgaccgctttcacaaatcaaactaaaaagagccttgagcttgcaaattctagagtacaacaactcgaggaagaactaagtacaactaagaacgctctcgtttctaagatatcttctattgattcactcaatgctaaacttgaaaccttgaactctgaaaaggaagaagctgacaaaaaaataaatgagttaatacaagagtatacagacctgaaggttgcttcagagacaagggcaagccatgattccaaactactgtcagaaagagatgatctgataaaacagcttgaggaaaaactgtctgttgcattaactgattctagcaaagatcaagaaacaattgttgagttgaacaaggagttggatgctaccaaaatgatgctaaagaatgaacttaagtccatggaagctttaaaagattcaattcgatcatctgaagaggctctaaagacttcaagaagtgaggtttccaaactttccaaggagcttgaggaggcaaatgaattgaatgaggacctggtatcacaaatttctaaactccgagaggaatccaatgaaatgcaagtagatctcactaataaactaggagaggcagaatcactatctaaagctctgtcagaagatttggcttcagtaaatgaaatggttcagaagggacaagaagaactcgaagccacctctattgagctggcatctattgctgaagctcgtgacaacttgaagaaagaattgctggatgcgtacaagaatttggagtcaaccacacatgagcttgtcgaggaaagaaaaattgtgacagccttaaacaaggaacttgaagcgttagcgaaacagttgcaggttgattctgaagcaagaaaaagtctcgaatcagacctggaggaggcaacaaagtcactagatgaaatgaacaatagcgcgctgttactgtctaaagaacttgagagcactcattctaggagtgccactcttgaatctgagaaggaaatgctacgcaaggctctagctgaacaaacgaaaatcacaaccgaagctaaggaaaacacagaggatgctcagaaccttatcacaaggcttgagacagagaaggagagctttgaattgaggtgtagacatcttgaagaggaattggcgttagcaaaaggtgagatactgcgcctaaggaggcagattagcacaaacagttctcagaaaccaagagcaagaggaccaccagaggccagtgaaactctgaaggagcaacctgtgaatgattataatcagaagaccagtggagttgttgctggaactccacagcctgtgaaaaggactgtaaggagaagaaaaggtggcgcataaacatgtgtgtgactgtgtgtattggaagccctagccagagccatcgttttcccataccttcctatttagtaatttcattgttactcatttttttcaaaaaaatggcatcctttgcaaaatagcatcaatagctattcaagtgttatttacaccccccccccccctagtatttcagttagtcgatgtattttgtttacgttttttgaaaattgaggtctgtatgtgtataaatgagttattgaatggccaacacgatgaaattaaggtatctgcacctatgccgagtgctccatacaccatatcattgcttggtttggtaccagtcgtt

SEQ ID NO: 110270 - DNA, 1891 bp, Zea Mays
cttgcgtcaccggcgtcctcgccccagcataaacaggcggcatcgcgcccacctctccccacgaccacatcatcactcgctcgtctccgcagccatcgacctcactcactagctagcgctagcttccagcagcagcagccttgtcgtgcaacagcagcaccaggaccaggctaccaccagttagctgctgcctgctggggacctggggtacggttgttgttgttccgtgactctcgtcgcacaacacaatgccggccatggtagaggaggggctcgtcaggcgggcggcgcccgagccgcacttcctggtggtgaccttcccggcgcagggccacatcaacccggcgcgccacctcgcgcgccgcctgctacgcgccacgggggcgcgggtcaccgtctgcacggccgtgtccgcgctccgcaagatgttcccgggcgccgaggcagacgcggaggagggccaccgcgacggcgcgggggtgcggtacgtgccctactccgacggctacgacgacggcttcgacggcgccgtgcacgacgccacgcgctacatggaccaggtcaaggtcgtggggtcccgcacgctgggggacgtcctggcccgcctccgcggcgcgggcaggcccgccacgctcgtcgtgtacacgctgctgctgtcgtgggtggccgacgtggcgcgcgcccacgccgtgcccgccgcgctctactggatccagccggccaccgtgctcgccgtctacctgcacttcttccgcgccacgggcggcgtcgacgcggccgtcgccgcggcgggcggcgacccgtgggcgggcgtccggttcccgggcctcccgccgctccgcgtccgcgacctgccgtcgttcatcgtctccacctccgaggacgacccctacgcgttcgtcgccgacgcgttccgcgagctcgtcgggcggctggacggcggcgaggacagccccagcgtgctggccaacacgttcgacgccgtggagcccgaggcggtggcgtcgctgcgggagcacggcgtggacgtggtccccgtcggccccgtcctctccttcctggacgacgacgcggcggccggcggcaacaacgacctgttcacgcaggacggcaagggctacctcgagtggctggacgcacaggcgccgggctccgtggtgtacatctcgttcgggagcctgtcggtgatgcgcaggcggcagatcgaggaggtggcgcgggggatgtccgagagcggccgcccgttcctgtgggtgctgcgggaggacaaccgcagaagcgagggcgccgacgccgacgccgcgacgctggccggcggcgggcgcggcatggtggtggggtggtgcgaccaggtgcgggtgttgtcgcacccggccgtgggctgcttcgtcacgcactgcggctggaactccacgctggagagcacggcgtgcggcgtccccgtcgtgtgcgtgccgcagtggacggaccagggcaccaacgcgtggctggtggagaggatcgggaccggcgtcagggccgccgtcagcgacaaggacggggtgctggaggccggcgagctgcggaggtgtatcgacctcgctacctccgacatggtgcgcgccaaggccgccgtgtggagggagaaggcgcgcgccgccgcgtcgaagggcggctcgtcggagaggaacctcaaggcgttcgtcgccaagcagatcgccggcgggaataactaggccgtcagctctcgtgcggtcgacataggttatgggactcgatctacaactgtacttaattaattgttgctctaagcgcatgtgcaagtgcaaacatgtgtgtcaacgtgataatattgatattctctgcaggtgtgtgtctacgtgataatttatataattctcacttaatatta

SEQ ID NO: 110271 - DNA, 111 bp, Zea Mays
ggatgtagtttagtttggtcatgtaatatattttgtatacaatggttccctaaactccagatcagtcatgtgtgtatattatggccaaagaccgtagacgtttcttagtta

SEQ ID NO: 110272 - DNA, 1955 bp, Zea Mays
cgtcaatccaacaaccaaaccaagcgcaggcggcaggcggtttgcttacctggcaggctcccttctcctttcctcacccagctccatcccgtgatcctgatccatcgatccatggcggcggccaataagtccatcgaccggctggcggcgcgccgggtggtcccggccgagcccacgccaaccggcccgctccgcctgtcctggctagaccgctacccgacgcagatggcgctcatcgagtcgctccacgtgttcaaggcggcccccgaccggcccgccaccaagaccggcagcactgacgccgccgccagcccggccaggaccatcgagcgggcgctcgcgcgcgcgctggtccgctactaccctctggcgggccgcctggtgctgtcggagtccggcgcgcagcaggcggtggactgcagcaacgccggcgtgtggttcacggaggccgaggccgcctgcaccctggaggacgtggactacctggaggcgccgctgatggtgcccaaggacgagctcctcccgcccaccccggccggcgacggcgaggacgagcgcgcgctggtcctgctcgtccaggtcaccgccttcgcgtgcggcggcttcgtcgtgggcttccgcttcagccacgccgtggccgacggcccgggcgccgcgcagttcatgaccgcggtcggggagctggcgcgagccgccggccaaggcctcgcgctcgcggtgccgtcggtggagccgcagtggggccgcgacgccgtcccggaccccgcggccgcgctggtggggcggctcccggctcccggtcccggcagccagcggcggcggctcgagtacctcgccatcgacatctccgccgactacgtcgcccactacaaggcgcagtacagcgcggccgcgcacggcggcggaggcgccgcgtggtgctccgcgttcgaggtgctgatcgccaaggcgtggcggagccgcacccgcgcggccgggttcgacgacccggactccgccgtgcacctctgcttcgccgtgaacgcgcggcccatgctgcacgcgtcgctcccgcggggcggcgccgggttctacggcaactgctactacatcatgcgcgtgtcggcgcccgcggggaaggtggcgggcgcctcggtcgcggaggtggtgaggatgatcaaggacgggaagcgccggatgcccgcggagttcgcgcgctgggcggcgggggagctgggcgccggcggcgtcgacccctaccagatcacgtccgactaccgcacgctgctggtgtccgactggacgcgcctcggcttcgcggaggtggactacggatggggcccgcccgcgcacgtcgtgccgctgacaaacctggactacatcgccacgtgcatcctcgtgaagccctgggcccacaagccaggggcgcggctcatcacgcagtgcgtcaccccggaccgcgtcgccgccttccacgaggccatgctcgacaccagctgctgatcggagagaagagatgagtctgggggctctatttgcatgcatcgtctgtgtctgtgtggtgggaagccgccgcctacttacagaaatatgtgacattattcatgatatctggaaaaaaatgtgagctgtattgcatcagtgagtgctagcgccaacacactccacctgtgactgtgacagcctcgtgtgcggctacgacaaatcggtcccgactccgggagatctatcacgacagaatgagcatcagaaaggaagcgtacgttgctgcactgatactgaacttcacagctgcactgcacacatgcagaacagacaacgagttcaaaggctagcagcctagcactaagtcagaaagctagcagcgtgccctatccagaattcataattaaaatgtcaactgttttctgtaacttccggtcgcatcttgctctcaatcacagatgcccagatcagtcagtacgcaaacgcaagta

SEQ ID NO: 110273 - DNA, 1260 bp, Zea Mays
ctcccaaaagcaaagcacgttggtaatctaaccaatcccctccgcttccttccttccttccttccaccaccaccagcaccaccactccaccagcgttccacccgtcctctccccccctgcccgcccctttccctccctccccaaatcccttgccccgtcttgatcgggcggcgggggggcggccaggctggcaagtcgcgcggcgatgatctcctcgccctctccgtcgccgtcgtcgtcccggacgtccaagggtggctccgcgacgccgccgagtcgggccagcaagtggcgcagcggcgcggtgcgcggggtgtacgggcggcgcctgctggacgcgctccgcgccacgggcggtggccagccgcgcgccgtgaaggcggcggccgactcggcgctggcgctgaccgcgcgcggccagacgcggtggagccgcgccatcctgctcgccggcgcggtctgcagccgccgccgcgtcctcgtcaaggcgggcggcaaggtccggcggcggcgccgcccgcctccgccggtgcaggccagagacaaggcggcggcggcggcggcgctaaagggtaaggagggtaaggtgcaggagcggctccgcgtgctgggccgcctcgtcccgggctgccggaagctacccacgcccgcgctgctggaggaggccgccgactacgtggccgcgctgcagatgcaggtcagcgccatgcgcgcgctcgccgacgcgttggcggccgcgcagctgtcgtcgccggcggacgcggaggcggaggcggaggcggagaggtgaggcgtgaccacgtgggtgggtgggattgactgcttgattggcctagccgcctggccccatgacatgattgatcaccagctccagcttccagctcgctcccccacctgccggattccgatggggggatcgggggaggggaagaaaacaataatcatttgcggtgcgttcgtgggttgctcttgtcgggagagattggtggtgggactagcagagtgatgaccatttcgttctatgcagcctgaattgctgctgctcgtgatttgttgtaaattccgtacaccttactcctactaccccagctgcctgctacttgtgcataaagcaaatgctgctcctctcatcgcctgttctgctgcgctgtggtactttactcttgtgtcagtacaaaagatttggtggataattgtgtctggcatgccatgattcttgtaccagggaaatgaatgatccgaattagtgttgtgctgtga

SEQ ID NO: 110274 - DNA, 1805 bp, Zea Mays
aacaaacaaaaaaaaaacgctgggcttgacaacaaaaggcccaacattaggaaccaggcccggccaacccccgcacgtgactgccgtccgccgttccggtcctcgcccggtcgcccctccccgcgtcgtgctcgtgtcgtgtcggccgtcggtggttcctggaactggaaggaaggagacccggcccctcgcctcgtctgacctctctcgtcccctccgccatctcatttcgcttccctttacctccctccccggtggatgtggatccataccgtgtcctagccctacatcgcagcgcgaagcaaggagccatggcggcggcccagcatcatcagttgtggtggccggggcggatggcagcggcgttcgggccctccttcctctgcctcgtctgcctcatctacttcatccaggatcttgtcagattgcgttccaattaaacagaggaagcgtataccctatttgatcatttctagttgcctttctctacttccgtggcttatcctaggactatcacaagctttaaggagctcagccaatatgctcactgccttgctcatagtacagaatctgggatctgcgatggcggatgttgttatagatgcaatggttgcggaagcagttcgatcagccgggccggagtttgctggcgatctacagtcattatcttggtcatcgatggctgtaggtgggatttttgggagtttactgggaggatatgcattatccaatctcccaatacatgcaatatatattgttttctcagtcctcccattcttccaattagtttcctgcatgtttgttgaggattctccaaaagggttccacaacgccagtgatgaacataagtatgtagacaaccagagttctgttactgttttttctggaaaaggctctagtgagggcactagaaggcgaaagggaacttctaaaagtaacaacagaagtccacaggcaaagcgaactgagtctaatgaaaaacacaacgggtcaattaattcgttgccatgtttgtctctgaggtcagccttcttcagtctctgcacagcttttaagcagccaaatattctgcggcctatggcatggtttttcttttcaaatgttacaattccaaatatctccacagttatgttctattatcaaacagaggacctaaatttggaggcatcctttctagggactgcacgtgtgattgggtggttcagtctgatgcttggcacctacacctacaaccgctattttaaacagaagaagctcaggaatattcttgtgtttgctcatgttggtcttgccgtaattaccctactggacattgttttggtgtcacggttacatgttcagtatggaattgccgataagtacatggtgctgtggggttccgcgttggctgatgcaatcaaccagttcaagatgatgccgttcctgatcctgtcaggacagctttgcccacctggaatcgagggcacactgtttgctctcttcatgtcaatcaacaaccttggttcaacactaggctcattcctgggggctgctatggcatcagctttgaacctctccacagcacagtttgacaatcttgctctgggtttgggtgtacagatgatttgtactctcttgccgattgggttcctatctctgattccaaaggaagtcacagggctaacatcataggttgaggtacgggcctgatcatacttgttctattcctgccggaaggtaatggtctgtgctcgaacctcaaatttctgactcacgtaaagcacgcatacttacagctgtgtaccagagagagaggaatatacaca

SEQ ID NO: 110275 - DNA, 2241 bp, Zea Mays
aacaaacaaaaaaaaaacgctgggcttgacaacaaaaggcccaacattaggaaccaggcccggccaacccccgcacgtgactgccgtccgccgttccggtcctcgcccggtcgcccctccccgcgtcgtgctcgtgtcgtgtcggccgtcggtggttcctggaactggaaggaaggagacccggcccctcgcctcgtctgacctctctcgtcccctccgccatctcatttcgcttccctttacctccctccccggtggatgtggatccataccgtgtcctagccctacatcgcagcgcgaagcaaggagccatggcggcggcccagcatcatcagttgtggtggccggggcggatggcagcggcgttcgggccctccttcctctgcctcgtctgcctcatctacttcatccagggtttcaggtctttcgtctggacagctgtctcctaccaaatgaaggacgtgatgaagctatcgccctctacatcgcagtttctggtctcccttgcatatttcccttggagcatcaaacctatatatgggatcttgtcagattgcgttccaattaaacagaggaagcgtataccctatttgatcatttctagttgcctttctctacttccgtggcttatcctaggactatcacaagctttaaggagctcagccaatatgctcactgccttgctcatagtacagaatctgggatctgcgatggcggatgttgttatagatgcaatggttgcggaagcagttcgatcagccgggtaggcttcttgatgtttcctgtgtccctatttggcatgctgctatggagtattgtgaaaacctactaattttatttccaggccggagtttgctggcgatctacagtcattatcttggtcatcgatggctgtaggtgggatttttgggagtttactgggaggatatgcattatccaatctcccaatacatgcaatatatattgttttctcagtcctcccattcttccaattagtttcctgcatgtttgttgaggattctccaaaagggttccacaacgccagtgatgaacataagtatgtagacaaccagagttctgttactgttttttctggaaaaggctctagtgagggcactagaaggcgaaagggaacttctaaaagtaacaacagaagtccacaggcaaagcgaactgagtctaatgaaaaacacaacgggtcaattaattcgttgccatgtttgtctctgaggtcagccttcttcagtctctgcacagcttttaagcagccaaatattctgcggcctatggcatggtttttcttttcaaatgttacaattccaaatatctccacagttatgttctattatcaaacagaggacctaaatttggaggcatcctttctagggactgcacgtgtgattgggtggttcagtctgatgcttggcacctacacctacaaccgctattttaaacagaagaagctcaggaatattcttgtgtttgctcatgttggtcttgccgtaattaccctactggacattgttttggtgtcacggttacatgttcagtatggaattgccgataagtacatggtgctgtggggttccgcgttggctgatgcaatcaaccagttcaagatgatgccgttcctgatcctgtcaggacagctttgcccacctggaatcgagggcacactgtttgctctcttcatgtcaatcaacaaccttggttcaacactaggctcattcctgggggctgctatggcatcagctttgaacctctccacagcacagtttgacaatcttgctctgggtttgggtgtacagatgatttgtactctcttgccgattgggttcctatctctgattccaaaggaagtcacagggctaacatcataggttgaggtacgggcctgatcatacttgttctattcctgccggaaggtaatggtctgtgctcgaacctcaaatttctgactcacgtaaagcacgcatacttacagctgtgtaccagagagagaggaatatacacatcataggaaggaaattcaagatagttggaaaatagacagttgtgttgacagtatatgtacaagctctgtaccaggacgagagaaaaatagagtgcaatagatctgtaggcaaagattaaaatcacttgatgttgacagatgttgatgttacttgacatgtgtagaaatgagaacaaacatgaaagtgacgttgctaatgaatgaatctgtgcatgtcttttgttttc

SEQ ID NO: 110276 - DNA, 2026 bp, Zea Mays
gtcgtgtcggccgtcggtggttcctggaactggaaggaaggagacccggcccctcgcctcgtctgacctctctcgtcccctccgccatctcatttcgcttccctttacctccctccccggtggatgtggatccataccgtgtcctagccctacatcgcagcgcgaagcaaggagccatggcggcggcccagcatcatcagttgtggtggccggggcggatggcagcggcgttcgggccctccttcctctgcctcgtctgcctcatctacttcatccagggtttcaggtctttcgtctggacagctgtctcctaccaaatgaaggacgtgatgaagctatcgccctctacatcgcagtttctggtctcccttgcatatttcccttggagcatcaaacctatatatgggatcttgtcagattgcgttccaattaaacagaggaagcgtataccctatttgatcatttctagttgcctttctctacttccgtggcttatcctaggactatcacaagctttaaggagctcagccaatatgctcactgccttgctcatagtacagaatctgggatctgcgatggcggatgttgttatagatgcaatggttgcggaagcagttcgatcagccgggccggagtttgctggcgatctacagtcattatcttggtcatcgatggctgtaggtgggatttttgggagtttactgggaggatatgcattatccaatctcccaatacatgcaatatatattgttttctcagtcctcccattcttccaattagtttcctgcatgtttgttgaggattctccaaaagggttccacaacgccagtgatgaacataagtatgtagacaaccagagttctgttactgttttttctggaaaaggctctagtgagggcactagaaggcgaaagggaacttctaaaagtaacaacagaagtccacaggcaaagcgaactgagtctaatgaaaaacacaacgggtcaattaattcgttgccatgtttgtctctgaggtcagccttcttcagtctctgcacagcttttaagcagccaaatattctgcggcctatggcatggtttttcttttcaaatgttacaattccaaatatctccacagttatgttctattatcaaacagaggacctaaatttggaggcatcctttctagggactgcacgtgtgattgggtggttcagtctgatgcttggcacctacacctacaaccgctattttaaacagaagaagctcaggaatattcttgtgtttgctcatgttggtcttgccgtaattaccctactggacattgttttggtgtcacggttacatgttcagtatggaattgccgataagtacatggtgctgtggggttccgcgttggctgatgcaatcaaccagttcaagatgatgccgttcctgatcctgtcaggacagctttgcccacctggaatcgagggcacactgtttgctctcttcatgtcaatcaacaaccttggttcaacactaggctcattcctgggggctgctatggcatcagctttgaacctctccacagcacagtttgacaatcttgctctgggtttgggtgtacagatgatttgtactctcttgccgattgggttcctatctctgattccaaaggaagtcacagggctaacatcataggttgaggtacgggcctgatcatacttgttctattcctgccggaaggtaatggtctgtgctcgaacctcaaatttctgactcacgtaaagcacgcatacttacagctgtgtaccagagagagaggaatatacacatcataggaaggaaattcaagatagttggaaaatagacagttgtgttgacagtatatgtacaagctctgtaccaggacgagagaaaaatagagtgcaatagatctgtaggcaaagattaaaatcacttgatgttgacagatgttgatgttacttgacatgtgtagaaatgagaacaaacatgaaagtgacgttgctaatgaatgaatctgtgcatgtcttttgttttca

SEQ ID NO: 110277 - DNA, 1416 bp, Zea Mays
atcatgctcttatgatctgttttaattctgacttttctgatttggtcccggcttctcctccttccccctcggatcggcggcagttcccgtgccctcacagtcacaggggacgcggctcgcctttccttccccgccaatccatccgctcttctcagcggcgagaagaagagatggggagcaacgccgccggcaagcctcctcctcctcctgctgctgctgtgtcgtgggagttccacgcgacggggcctcgcaacttgaccagccccggctggagggacctcatccgctccagctggagagatccaagctacagaaggatcgcagtgtcgtgcttcgtgcaggccgcgtatctgctggagctggacaggcaggagggcagagccggtgaagccgcgctcgctcccaactggtggaagcccttcaagtacaagctggtgcgcccgctcatcgactccagagacgggtccatctacggggcgcttctagaatgggaccagctcgccgccctcgctgacctgatagtggccaagcctcagggcgctcccaaggtggtcctcgcgctcaggggcaccatgctgaggcagctgaccgtggtgagggacctggaagacgaccttcggctgtttgccctggagagcctgagggggtccgtcaggttcacaggcgcgctggaggtgctcaagtcggcgatccacaggcacggcagcgccaacgtgtgcgttgccggccactccctgggcgccggctttgcgctgcaggtcggcagggccttggccaaggatggaaccttcgtggagtgccatctgttcaacccaccgtcggtgtcactcggcacgggcctcaggaaaatccaggagaaggccagcagtgtcctcaagcggtatatcagtagaagcggcggcggtggcagcagctcctcgtcaaatgtttccccaggaccaggagaggagctacaagccgccgccgctcgagatggagttggagaagaagtgatgagcagggaggtcaaaagatgggtgccaaacctgtacgtgaacagctgcgactacatctgctgcttctacgctgaccgtagcggcgtcgctaccgtcaccgaggagaagcgttccggaatgcattccaagctgtacgtgatcgccaaaggaccgagcaagttcctggaggctcacgggctgcagcagtggtggtccgatgattctgagctccacttggccgtgcacgacagcaaactcatgtataggcaccttaagtccctctatgtcgaacagtagtagagaaggcattagtacttgtttctcagaatgcctagttcttcttctctagtacagccagacaagaaaacatgtaaaccgtcagctgattaagagctccaactcttgcaactcgtctaagcatatcttcttctcttctcgcgta

SEQ ID NO: 110278 - DNA, 308 bp, Zea Mays
tccagcaaaccctggttacaacttcatagatcagccattaaagcacaatacatggctacaattttcttccagatcaaattccttcatttttcacaaggcggagtcatctccgtctggtttatttacgactaagagcaaggtctttgttctccttgttataaacatgaataattgcgaatgcagaacagacatccattacgatgttgattgcacgatttcttcgacacatggacaccatgtactactgtatgtatgtacaatgacaatacaatgtaagctaaaaaaaacatgagttccacttccacttc

SEQ ID NO: 110279 - DNA, 840 bp, Zea Mays
atccgggtccgcgcattgcactagctccccccaggctctaccagaaccgccgccgtttctggatctctcgacggcgagcagcgactcgtccggtcgtccctcagcactgtgcttggcggacgcaggacaagacacaggatgagggctgtggtgcagcgcgtcctctcggccagtgtcgaggtcgaggggcgaatagtgtctgcgatcggccctggactcctcgttctcgtcggcgtccacgaggcggacacggactccgacgccgactacatttgtcggaaggtcctgaacatgaggctgttttcaaatgacaagactggaaaagcatgggatcaaagtgttatgcagcgtaactttgaagtgctattggtcagtcagttcaccttatacggcatcctgaagggtaataagccagattttcacgtggctatgtcacctgcaaaagcgaaaccattctatgcttctctagttgagaaatttcaaaggtcatactcggctgattcagtgaaagatggtgtttttggagcgatgatgaaggtttctttggtgaatgatggccccgtgacaatgcaaatcgactcaccctcactgcaaggtgctgctcagtcaagttggatctgaaagccctcctgctgtgcacttggtatgaactttgcgtctatctggtaggctggtcacaaagaaaatatcagaattgaagttggtattagtcatgtgatttgccgttaattttttttaaacagttctagcgctttgtcattgccagtcagttacagcactgcttcagtctgcggaggcatagccttttgcgcaaatgacagaaccagacacattctctag

SEQ ID NO: 110280 - DNA, 1126 bp, Zea Mays
atccgggtccgcgcattgcactagctccccccaggctctaccagaaccgccgccgtttctggatctctcgacggcgagcagcgactcgtccggtcgtccctcagcactgtgcttggcggacgcaggacaagacacaggatgagggctgtggtgcagcgcgtcctctcggccagtgtcgaggtcgaggggcgaatagtgtctgcgatcggccctggactcctcgttctcgtcggcgtccacgaggcggacacggactccgacgccgactacatttgtcggaaggtcctgaacatgaggctgttttcaaatgacaagactggaaaagcatgggatcaaagtgttatgcagcgtaactttgaagtgctattggtcagtcagttcaccttatacggcatcctgaagggtaataagccagattttcacgtggctatgtcacctgcaaaagcgaaaccattctatgcttctctagttgagaaatttcaaaggtcatactcggctgattcagtgaaagatggtgtttttggagcgatgatgaaggtttctttggtgaatgatggccccgtgacaatgcaaatcgactcaccctcactgcaaggtgctgctcagtcaagcaatggttatgatgatttggttgcggatggtgaagcaagagtagctaaagagacgtgttaaaattctgggtctcttgctgacctagggtttagggttctccatcacatctttctcattcagatttttttggtgcagttggatctgaaagccctcctgctgtgcacttggtatgaactttgcgtctatctggtaggctggtcacaaagaaaatatcagaattgaagttggtattagtcatgtgatttgccgttaattttttttaaacagttctagcgctttgtcattgccagtcagttacagcactgcttcagtctgcggaggcatagccttttgcgcaaatgacagaaccagacacattctctagactatatttgtcatcttattcatttttctactgcggataatactcttatcaatatgggagctacacatgagcttgtggcttctcaacaatgtagtatctagggtcttattactgaattagcaatcttcagtacatctatggatgaagttc

SEQ ID NO: 110281 - DNA, 1173 bp, Zea Mays
atccgggtccgcgcattgcactagctccccccaggctctaccagaaccgccgccgtttctggatctctcgacggcgagcagcgactcgtccggtcgtccctcagcactgtgcttggcggacgcaggacaagacacaggatgagggctgtggtgcagcgcgtcctctcggccagtgtcgaggtcgaggggcgaatagtgtctgcgatcggccctggactcctcgttctcgtcggcgtccacgaggcggacacggactccgacgccgactacatttgtcggaaggtcctgaacatgaggctgttttcaaatgacaagactggaaaagcatgggatcaaagtgttatgcagcgtaactttgaagtgctattggtcagtcagttcaccttatacggcatcctgaagggtaataagccagattttcacgtggctatgtcacctgcaaaagcgaaaccattctatgcttctctagttgagaaatttcaaaggtcatactcggctgattcagtgaaagatggtgtttttggagcgatgatgaaggtttctttggtgaatgatggccccgtgacaatgcaaatcgactcaccctcactgcaaggtgctgctcagtcaagcaatggttatgatgatttggttgcggatggtgaagcaagagtagctaaagagacgtgttaaaattctggttggatctgaaagccctcctgctgtgcacttggtatgaactttgcgtctatctgttctagcgctttgtcattgccagtcagttacagcactgcttcagtctgcggaggcatagccttttgcgcaaatgacagaaccagacacattctctagactatatttgtcatcttattcatttttctactgcggataatactcttatcaatatgggagctacacatgagcttgtggcttctcaacaatgtagtatctagggtcttattactgaattagcaatcttcagtacatctatggatgaagttcagctctggtctatatatcagctgaactgtctctgtctcctacttgagcagaactcaaacaaccaaaaatcaatacttgggatcctctttcacccgagttattacttgttagcagcactgtagcagctagtgtcacatgcagcagagacaatgcagagatgccaacatgactgaaggataattttcttttgca

SEQ ID NO: 110282 - DNA, 1453 bp, Zea Mays
gtgacccgcggcccactataaccaaaccaacctccccctccccctccccccgacctctctgccttttccttttccttcccccgctttctccttccttcctcctcctcccggctcccctcacccagccaccggccatgtcggtggagacggagcggagctccaccgagtcctccggggcttccgggctcgacttcgaggacaccgcgctcacgctcaccctccgcctcccgggctccgcgccttccgccgccgccgccgccgcggcttccctgtccctctcctcctcgtcgtcctccgccttccccgaccccgaccgcaagcgcgcctcctccgacgctgaccccggccgctcctccccgctcgccgcgtcctccgacgctgcaccggcacccaaggctcgtgtggtgggctggccgccggtgaggtcgtaccgcaagaacgcgctcgccgacgccgcgggctccagcaaggccgccaagttcgtcaaggtggccgtcgacggcgcgccctacctgcggaaggtggacctgcaggcgtacgccggctacgaccagctgctccgcgcgctccaggacaagttcttctcccacttcaccatcaggaagttcgccgacgacgagaggaagctggtggacgcggtgaacgggacggagtacgtacccacgtacgaggacaaggatggcgactggatgctcgtcggcgacgtcccctggaagatgttcgtggaaacctgccagcgccttcgtctgatgaaaggttcagaggccgtgaacttggcaccaagagccgcccgatgaggcacactccgttgggcgttggcacgcacgcacgcactggcgtcttgaaggaaagggggaactctgctggtcttgatgaggatcttcacgtgagataggaacgtgtgtacagttgtcgccttatggtattgagttgaggaaacttggaagttccattacttgtctgtagtctctactttatatagatgcgaagaagcttgagatacacattgcctacaatgtcttttgatgaataagaccagacagcaccgaaccgaactcgtcctccacacggttgctttgccatctcggtggttttgtggtggtggtggtggtcgtgcttcctataggtgtgaggctgatggcgtggctgccatttatacaatctttaatcgtgttttgttgagctttattatatggttttgtttgagagttcatggctctgcatcctgttcctacgggatgctggtcagcttttcccctagcaagtacattctggtttgcttcgtctcctcgtcgtgcctgtttgtttcgtcgtaacactggctgacatgcgtaacaaagcttgatgttccactcccgttcatgcgcagtaggatgtttcaatggttatagttgggctgaaactagttggtgacgatctaggatttaatttatgcaagaatttaaagaagcct

SEQ ID NO: 110283 - DNA, 2571 bp, Zea Mays
ctcggagtgtgtcctctcgcctcctcccctctccgccagcggctgccaccagcccaccaccgcccctcctcaaaacgccaaaaatttccccacctctagacgccctttcccctccccccgagatcccatccatggccacctcccgcccccggatctggcgctgagcccgccattgccggatccctgccaggtctccaccccgccgtcgcgctcccggcccggttctattgggcgcggcgtggcattccctttcttctttgtgcgctaaccggggggtggtggttgatctgtactggcgggtgcagcgcgccttgcgatctctagctgttgctgcgggaggaccggccgcctcgtcgccgttgccaagtgcgctcttttaaagcccgaagattcgccccctccgcgtgttcgtgtcgccgagaggaggtcggacttgtcggaatggtcgtctaattggggagatttgatgtgttattggtgccgccggatctcgccgacatgtggaagcaatttatcggaaagctatcgtggaagtcaatgaaatccagctctggcagcggggggtcgccgccggcgccactatcgtcgccgcgggataatggagcctcaccgcgggagaatggggccacggggaagcctaacgtctcgcctcggtctcccgcggctggcgccggagccggagccgaggtgaggtccagggaggacgcctttgtccagaaagttaacatttgctgcgcggtgtacgacttctccgaccgaggcaaggactcgccggagaaggagcggaagcggcaaatgctcatgtccctcgtcgactgcattggcgccgccgaggagccgctcacggagacgatgatagcagcgtgcgtgcgcatgttcgctgctaacctgttcagggtcttcccgcccaaagtccggtctggcacctcggcttcggagaccgaggaggacgagccgttcttcgatccgtcctggtaccacctgcaagtcgtttacgagtttctccttaggtttgtgacctcaccactcgtggatgctaaggtggctaggaagtatgtggatagccctttcgtctccaagctgctcgatctgtttgattcggatgacccgagagaaagggactgcttgaagacaatattgcataggatatatggcaagttcatgggaaaccgaccgttcatccgtaaggctgtgagcaacatcttctataggtttgtgttcgagacggatcaccacaatgggattgccgaactattggaggtctttggcagtgtgataagtgggtttgcaaagccattgaaggaggaacataagttgttcttatggaaagcattgataccacttcataagccgaaatcaatgggagtgtatctgccacagctgacatattgcatcacacaatttattgacaaggaaccaaagcttgctgggactgtgatcaggggcctgttaaagtattggccagttacaaatagtcaaaaggaaatgatgtttttgggggagttggaggaggtgctggagttgactgacatggctgaatttcagaagtgcatggtccccttattccggaagattgctagttgcctgaatagctctcattttcaggttgcagagagagccttgttcctatggaacaacgagcacctattcgacatgatctcccaaaaccgccaagtaatcctaccaatcatatacccagctctggagaggaacacccgctggcactggaaccagtcggtcctcaacgtaaccatgaacgtgcggaaaatgttccgcgacatggacgagaggctgcttcaagcctgccacgacaacttccaagaggaagaggagaagcgggccgtgactgaggagcggcggaggctcatgtgggagcagctggagcgaagtgccgctcgcgggtaccaccagccgacgacgatcgctgccgatgcgagcagcttccccgcgccctcttcatcggctcgtcttgtatccctcaccgtgacatgagaacacgaggttgcaaccagatgttgctctgttttcgccgcttggtagctaaagctagatgatggagttgcttgcttcgctgggggatgcacgcacgaaggcattttgttaccttctgtgtatgcataaccccccttgtcaaagtctgtaattaatagctgacggtttgaggacaaagggacgttttggatttttgcaatggcgtattcttgaaatgggcatggtgttctcttcttgctgcctaaatgttgtctggttctaccacagcgctctctgctgtgtatctggacagtatgtatgccccatgggaggatgacaatcgacaagtttgcagctttccttttttttggttgttgatttcgtggcaaatagcttgtgcttatttttttattcttttaagtggacataatcagtaaaaaaagaaacaagaacagctgaggctggatgaaaacgaacaagtctctctcaaaatgttgtgcttaggttatctacttgctgattggtactgttttttttttggaaatcaagtgctccttagattttctcggggtaacgcgcacactctagattctataatct

SEQ ID NO: 110284 - DNA, 1255 bp, Zea Mays
gctaggtagaattgtgattttcaatcggttctgtatcgattttgtgcacggatgtggatgaacacagcaacactcatttccttgtatgtacaatatattgtattcatctgtcttcgtcgactaaataggatacataaatgtagggttgggaacagcatgatgtttgtgattatactatctttgttcgtgtcactggcatgttcaacaacacatgcatattgcattgttgcgtaaagggattatcctttgacactcaagcactgccttttcttggcatgcttttttgcaggttgcagagagagccttgttcctatggaacaacgagcacctattcgacatgatctcccaaaaccgccaagtaatcctaccaatcatatacccagctctggagaggaacacccgctggcactggaaccagtcggtcctcaacgtaaccatgaacgtgcggaaaatgttccgcgacatggacgagaggctgcttcaagcctgccacgacaacttccaagaggaagaggagaagcgggccgtgactgaggagcggcggaggctcatgtgggagcagctggagcgaagtgccgctcgcgggtaccaccagccgacgacgatcgctgccgatgcgagcagcttccccgcgccctcttcatcggctcgtcttgtatccctcaccgtgacatgagaacacgaggttgcaaccagatgttgctctgttttcgccgcttggtagctaaagctagatgatggagttgcttgcttcgctgggggatgcacgcacgaaggcattttgttaccttctgtgtatgcataaccccccttgtcaaagtctgtaattaatagctgacggtttgaggacaaagggacgttttggatttttgcaatggcgtattcttgaaatgggcatggtgttctcttcttgctgcctaaatgttgtctggttctaccacagcgctctctgctgtgtatctggacagtatgtatgccccatgggaggatgacaatcgacaagtttgcagctttccttttttttggttgttgatttcgtggcaaatagcttgtgcttatttttttattcttttaagtggacataatcagtaaaaaaagaaacaagaacagctgaggctggatgaaaacgaacaagtctctctcaaaatgttgtgcttaggttatctacttgctgattggtactgttttttttttggaaatcaagtgctccttagattttctcggggtaacgcgcacactctagattctataatct

SEQ ID NO: 110285 - DNA, 1860 bp, Zea Mays
cttcacttcatgtatctttgtttagagaccttgccttgttggggcaggggacttgggacgacagagaggggagggcggagttggtgagcgtgctcgggatcagcgggtgacctcagaggttgttgcctcggggggcggggcaattctttagcacccaatcttccagatgtctttcgactcgctgctgctcttttggttggtatccttggatctctgactctagactgttccacgaaatctccagtcctttcttcctcttggaggaggagggctgcggcctgagcaggagacggagacatgggtagcttcgttaaactggcgaggagggcggtggagacggacgcgccggtcatggtcaagatacaagaactgcttcgaggggccaaggatgtcatgtcgcttgcgcagggagttgtttactggcaacctcctgagtcagcaatggctaaggtcgaaaaaataattagggaaccaacgctcagtaaatatggctctgatgatggtcttcccgagcttcgagaagcactttttgaaaagttacgcagagagaataagcttactaagtcatcagttatggtcactgctggtgcaaatcaagcttttgtgaacttggtcctcactctttgtgatgccggtgattctgttgtcatgtttgcaccatattatttcaatgcctacatgtcattccagatgacaggtgttactgacatattagttggtggttctgatcccaagacacttcatcctgatgttgattggttggagaaggttctgaaagaaaatgaccctatccctaaacttgttaccgttgtgaatccgggtaacccctctggagcttttattcccaggcctatgcttgagaggatttcagatctgtgcaaaaacgctggtgcatggcttgtggttgacaatacctatgaatactttatgtatgatggaatgaagcactattgcttagaaggcactcatattgtcaacctcttctcattctcaaaggcttatggaatgatggggtggcgtgtaggatacatcgcttttccaaacgaagtcgatggcttccacgaccagctcctcaaagtgcaggacaacatacccatctgcgcctccatcatcgggcagcgcctggcgctctactcgctggaggccggccccgagtggatcaaagaaagggtgagagacctggtgaaaaaccgcgcgctgctcgtggacgcgctgtccccgctcggtgacgacaacgtcaggggcgggcagggcgccatctacctgtgggcgaagctcccggacacctgctccgacgatttcgaggtcgtcaggtggctcgcgaacaggcacggcgtcgccgtgatccctggcagcgccagcggaggccccgggcacatccgcatctccttcggagggctcaaggaggaagacaccaggctggccgctgagaggctacggcgcggcttgcaggaactggtggctgatggaacggtacagtaacggctccattggtgtaggtaaaaagcacagcattgtagttttacacaacgactccgattttccaatggcataactccgccgggattgattcgagagaagaactggaccttgttatgaagactgcattgttcggacgagagctgggacagaataaaaggcatccggtctgcagtcatctttgttataaaatatgagtactacatattataatcagcagtaagtatttgtttctgtttggttttcagttatctatattactgatggcacccatttgtacagaatcaaaagcataagcaagaaagtcctgacgtacggagctgcctgttaggccgtttccaacagtggacctaaagtttacctcaaagcactttttacatt

SEQ ID NO: 110286 - DNA, 110 bp, Zea Mays
cttattatttttttttgcaattttgttagagatcatatgttagtatgcatttttctcctaagaccatctctagcagcttacccatacatatactcatattcaaactatac

SEQ ID NO: 110287 - DNA, 4667 bp, Zea Mays
atggccgcactgccgcgccacacaccgggcggaaaggcgcgggcagcggcagctagggtttggtgtggcgggggagaccgatcgggggcgagatgtgggcggcggaggcggcgttctcgcgctccgggtcgtggcgggaggcggaggacgagcgggaggcgctgcggtgggccgcgctgcagcggctgcccaccgtcacccgcgcgcgacggggcctgctcaggtccccggctcccgacggggccgcggccgtcgagggcgacgacgtgctctgcgaggtcgacgtcgccgggctctcctccggggaccgcaccgcgctcgtcgaccgcctcgtcgccgactctggcgactccgagcacttcttccgacgcatacgcagccgcttcgacgcagtgcagatagagttccccaagatcgaagtgaggtatgaggatgtgacagtggacgcttacgtgcatgttgggagcagggctctaccgaccatcccgaacttcatatgcaacatgacagaggcttttctgaggcatctgaggatctatcgaggaggaagagttaaactgccgattttggacaacatcagtggggtaattcgcccatcaagaatgacactgcttttgggccctccaagttccgggaagaccaccttgcttcttgctcttgctggacggctcggtcctggactaaagatgtctgggaacattacttacaatggccaccatttgaacgaattcgtgcctcagcgaacatctgcttatgtcagtcagcaagactggcatgcttcagaaatgacggtcagagaaacgctggagtttgccgggcgctgtcagggtgttggaataaagtatgacatgcttgttgaactgttgaggagagaaaagaatgcggggataaaacctgacgaggacctagatgtgttcatgaaggcgttggctcttgagggtaagcagacaagcctcgtagcagagtatataatgaagattttaggactggacgtctgtgctgatactattgttggagatgaaatgatcaaagggatctccggagggcaaaagaagcgcctgacaacaggtgaattgctagttggttctgcccgcgtgctgttcatggatgagatatcgacaggccttgacagtgcaactacatatcagattatcaaatacctaaggaattcaacacatgctcttgacggaactacaatcatatccttgcttcagccagctccggaaacatatgagctatttgatgatgtcattcttatagccgaaggtcaaatcgtataccaaggtccacgtgaatatgcagttgacttttttggtgctatgggattcaggtgtccagaaagaaaaaacgtggctgattttttgcaagaagttttgtccaagaaagatcaacagcagtattggtgccactatgattatccataccaatttgtttctgtatcaaaatttgctgaagccttcaaaacatttattattggtaagagattgcatcaggaattaactgttccatacaaccgacatcacaatcatcctgcagctctttgtacatcaagttacggtgtcaagaggcttgagcttctcaagtccaactaccagtggcagcgtctgctcatgaaaaggaactcattcatatatgtcttcaaattcattcagcttctacttgttgcccttatcacaatgacagtgtttttcagatcaacaatgcaccatgactcagttgatgatggaatcatttatctcggtgccctttactttgcaatagttatgattctgttcaatggcttcactgaagtctcaatgctggttacaaagcttcctgttctttacaagcacagggacctgcacttctacccaccttgggcgtacacacttccttcttggctcttgagcatccccacctcactttacgaatccggaatgtgggtgcttgtaacatattatgtggttggttatgatccccaatttacaagatttttgggacaatttttgttgcttttctttctgcaccaaacatctttggctcttttccgagtcatggcctctttgggccgcaatatgatagtcgctaacacctttggatcattcgctttgttggttgttatgatccttggaggattcatcataaccaaagaaagcataccagtatggtggatatggggttattgggtatctcctatgatgtatgcacaaaatgctatttctgtcaacgaattccatggtcattcttggaacaagcaatttgcaaaccagaacatcacaatgggtgaagcgatactcactggatatgggttattcaaggaaaaatactggttttggatcggtgttggagcattgtttggttatgcaattattttgaacatcttgttcacaatgttcttgacacttctcaaccctattggtaatctgcaagctgttgtggccaaagatcaagtacggcacagggattctaggaggaagaatgacagggtagccctagagctaagatcatatctgcattcaaattcactaagtgtacttccacctgcaggtaatctcaaggaacagaaggggatggtgttaccttttcaacccctttctatgtgcttcaggaatatcaactactatgttgatgtaccagtggaattaaaaaagcaaggtgtagcagaagaccgcctgcagctgcttgttgatgtcactggagcttttaggccagggatactaacagctcttgttggagtcagtggagctggcaaaaccaccctcatggatgttttagctggcaggaagactggaggtctcatagaaggaagcatcactatatccgggtatcctaagaaccaagagactttcactaggatatccggatattgtgaacagaatgatgttcactcaccttgcttgactgtgatcgagtctttgttatactcagcatgccttcggttgccttctcatgttgatgcagacactcaaagggcttttgttgaagaggtgatggaacttgttgagttgaatcccttaagcggtgctcttgttggtctgcctggggtaaatggtttatcgactgaacaacgtaaaaggttgacaatcgctgtggaacttgttgcaaatccttctattgtgttcatggatgaacccacgtcaggattggatgctagatctgcagccattgtaatgaggacagtgcgtaatattgttaatacaggacggaccattgtctgcacaatccatcagccaagtattgacatatttgaatcttttgatgagcttttattcatgaagcgtggaggacagcttatatacgctggtcccttaggtgccaaatcgcgtaatctggttgacttttttgaggcaattccaggagtgcctaaaatcagggacggctataatcctgctgcatggatgttggaagttacaagcacccaaatggagcagattcttggagtggattttgctgaatactatcggcaatcaaaattatttcaacagaccagagaaatcgtcgaggccctaagcagaccgagcagtgaatcaaaagaacttactttcgccacgaagtatgctcaaccattttgtgctcagtatatggcttgcctatggaagcacaacctatcgtactggaggaaccctcagtacaccgcagttagattcttctacacagttattatttccttgatgtttgggacaatttgctggaaattcggttctagaagggggacccaacatgatatattcaatgcgatgggtgccatgtatgcagcggtgctgttcataggaattaccaacgccacttctgttcagcctgtgatctccatcgaaagatttgtatcttatagagagcgagctgctgggatgtattcagcgttgccttttgcattttctctggtcactgtggagttcccttacatccttgtgcagtcactcatatacggttcaatcttctacagtttgggatcatttgagtggacagcagccaagtttctgtggtacctgttcttcatgtacttcacgttgctgtacttcactttctatggcatgatgacgacggcgatcactccaaaccataccattgcgcctattattgcggctccattctacacgctgtggaatctcttctgtggattcatgatcccaagaaagcgcatcccagtttggtggaggtggtactactgggccaacccggtgtcgtggacgctctacgggctcctgacctctcagttcggcgacctggaccagcccctgcttatggccgacggcgtcacctccaccaccgtggtggctttcctggaggagcacttcgggtttcgccacgacttcctcggcgccgttgcggccatggtggccggcttctgcgtcctcttcgccgtcgtcttcgccctggccatcaagtacctcaacttccagcggcgatgagagagcaagtggttcagctagctagctagtatagtagccaccgccgacacagacccaccaaacggatcgcagcctactgtacatgcatacaccgatcagtgcaggagggcagcagcacaatgaattatgaatgcgatgtacctaccagcgcgtcgtattggcacagttaatttgcccattacccccagaacatttcgccggggtaaataatcttccggtcggtcacgggagcgagagtgagaaaaagtaaagggtactgtatagccagctattccatgt

SEQ ID NO: 110288 - DNA, 859 bp, Zea Mays
cgcccaaaggggcgccccatggtgctgtgatttcagagaaaatcagaacaagttctgttatacttaaacatgagatgtaccacttccacgcgcacctgtggtgggagatcgagatcgagtgtgaccacaacctccccaacgttccatgacgaagaacgagtcgtcctcatcctcgagcacgaggccattggcgagatcaataaggtccttcacgccgctagccgctcaataagatttttcatgggagactcgttgaagcagatgcacgcagatactttcagcagcttattgacggtgttgatttttgtcacaagaaaaggagtctaccattgagacttaaaggtgaccattggataggaaaaatattaagtatgcactcatgatttttggggatgttaattttattttacaagcacacagcccgaaaatctcttccttgattctaatttcatacttcggactgagtgcatggcctgctcagatgtgtatctttgtgcagctttattatagtttattctttttgttccctgaggatgcttagtgggtcaactgtagggatctttccttctacatacgacctgtgggactcgcttttgtatgtcaattatctgtcaattcttccatttctgaatcctaaagaaaaatggtccctaatagcttatggtttacttgaaaagttcatgaatactccggtaacagaattcgaggtgatattccagaacaatcatatccggtcgctctttggtatcacaattatttgtcaattcttctattcctgaatcctaaagaaaaatggtgcatgatgtctcagtgagtcagctctcaccatgttcaatgtacatgataatttaataaactg

SEQ ID NO: 110289 - DNA, 992 bp, Zea Mays
atgtatagctgtaccatgcactatgagaagatttttcatgggagactcgttgaagcagatgcacgcagatactttcagcagcttattgacggtgttgatttttgtcacaagaaaaggagtctaccattgagacttaaaggtatactcataactgagggtaaaacagagttcaggaagttattgctcttttttgttggcatttcaaaatggcaaccacgcaaattagaaggcaacatggaattgctcaggcgtccacagtttgtgttctgccatcgcacgctccccgcgcccgcggtccccgccgccctcctcgcggtcgcagccgagcacagccaccgcgctcgcaaatcacgggactccccttccatccatggcagatctatgaacactaataacaagaagatgagctgcccaacaatggaccctgaagcaagaaatacattgattttctctctgcaaattatttctgtggcaagtcgaagtcatggtgacttgtcactgacaggtgagattctcgggctggacatgtgcgcggatatcatcgtcgacaacgagctaatacgcggcatctccggcggccagaagaagcgcctcaccacaggggaggtgctggtcggcccaaccaaggtgctattcatggacgagatctccatgggcctcgacagctccaccaccttccagattgtcaagtgcatccagcagatcgtccacctgggcgaggccaccgtcctagcctcgccactccagcccgcgccggaggtcttcggcctcttcgacaatgtcatgctgctgtccgaggggcagatcgtctaccaggggcccaggagtacgtgcttgagttcttcgagaggtgtggcttccggtgcccgcagaggaaaggtgtccctgatttccttcaggaggttggttacttcgtggcagaaagcttcctaatacatattttttccaacattatttcttaaacatagtgttgggactatgcttcgtcgccg

SEQ ID NO: 110290 - DNA, 1797 bp, Zea Mays
tgccaccataccactagtgcaaggtcctagatttacacttggtgctacaccttgcttcgcccccttccttccttccttccttccttccctccttccttggtctctaggcagctagcagtgtggtgctgctgccggccgcctattggccgcctgggactgggatccattaattactgcgcgcgcgcggctaaccaaccaatcccagcgtgcgtaatctattgcccacatgccgacgccgtcgcacctcaacaagaacccgcgctacctggacttccgggcggcgcggcgggtgccggagtcgcacgcctggccgggcctgcacgaccaccccgtcgtggacggcggcgcgccgggccccgacgccgtgccggtggtggacctgggcgccgcggacccggcgccggcgccggcggcggcggtggcccgcgccgccgagcaatggggcgcgttcctgctcacgggccacggcgtccccgcggacctgctggcgcgcgtggaggaccggatcgccaccatgttcgcgctgccggccgacgacaagatgcgcgccgtgcgcgggcccggcgacgcctgcggctacggctccccgcccatctcctccttcttctccaagtgcatgtggtccgagggctacaccttctcgccggcctccctccgcgccgacctccgcaagctctggcccaaggccggcgacgactacaccagcttctgtgatgtgatggaggagttccacaagcacatgcgcgccctcgcggacaagctgctggagctgttcctcatggcgctggggctcaccgacgagcaggccagcgccgtcgaggccgagcggaggatcgccgagacgatgaccgccaccatgcatctcaactggtacccgaggtgcccggacccgcggcgcgcgctggggctgatcgcgcacaccgactcgggcttcttcaccttcgtgatgcagagcctcgtgcccgggctgcagctcttccgccacgccccggaccggtgggtggcggtgccggccgtgccgggcgccttcgtcgtcaacgtgggcgacctcttccacatcctcaccaacggccggttccacagcgtgtaccaccgcgccgtcgtgaaccgggacctcgacaggatctcgctcggctacttcctcggcccgccgccgcacgccaaggtggcgccgctgcgcgaggccgtgccgcccggccgggcccccgcgtaccgcgccgtcacgtggcccgagtacatgggcgtccgcaagaaggccttcaccaccggcgcctccgcgctcaagatggtcgccctcgccgccgccgccgacctcgacgacgacggcgacgccgccgtcgtccatcagcagcagcagctagtcgtctcgtcgtagccgagaccgatcgccggagactgatgctgatgatgatgcatatatacatgagagaaatcgtcgagtagactagccgattgcaaaagcaaccccagctgccgaaacctggcatatcgatcccattctctgctgcgcacatgtatgcatgcatgcgcttcgtccgttcgactcgtgtgtgcttgcttgcttgcgcgtgcagcagaactaattccgttccgcagctagctgctctgctctgctctgctggaatgtaattaagtagtagtatatggtagtagagaaaagattagctaggcgatcgatatagatgacgggccggggaagaagacgaattaattaagatcgatcgacgacgacgagctgtgcgtggctggctgtgttcttctctagcctagttacagaggccggctgctgctgcttcc

SEQ ID NO: 110291 - DNA, 939 bp, Zea Mays
atggcttttcacctcatcattggtcaatccatccaccttcatcagctcgcggatctgcttcggggtcgccacttgagcgccgccgaggatctggagggcattgacgaagcggcggtgcagctccggcgaccagcaccgccgcgccttgcggtgcgtctgcggcggtgccgcctgctgcccttccggcgcgttcggcgccggcttgacgttgacgaccccgctctggacggcgtctctccgcgagcccaggacgccaccgttgttgctgccggcggcggcatcaaggtacggcttcctgtcagcgtcggccgcgtccttgtccgcgggcgcgagggcgagctccggcagcgccgcgccttctgccgcggacgcggtcttgtccttggcgaacgggaggaacgcgccgccgccgccgccgccgttgcgctgcccgtggccggcgcccgcggcgccgtgcgcgcactccgcgctctccttgggcgtctgcggccccctggcggccacgtccgccgttgccgcgggcccgttccagagctgcgccgactccatccagctcgccttctccgacgtcgggttccccatcttgtcggcggcggcgtcgatcccgatgttcttgagcggcatgaactcctccagcaccagcggcctcgccggcgcgccctgcaggctccccatctggtacgcctccagctgctgccggtacgactccatggcgtggttgaggagctgcatgcagagggggagctcgcgcttgaaggcgtcgatcttgagccgctcctcctccaggcgcgcgaggaactcccggagcttctgcgtcgtctgctccgccgccgtcagatggtggtggtggtggtgtccgtccaccacgagcgtctcctgcggcggcttcggggtcgtcactgcgtacgcggcgccgttgccgttgggcttgtagtctag

SEQ ID NO: 110292 - DNA, 690 bp, Zea Mays
cgataatgacgaggagaacgcttcggatgagcagcgaacgcagagccgggttgaccaagagagctgcaggaatggggtaactgaatgttctgatgagatcgtcgaggtcgaggacgagattgtttctgaccagggagcagaaagagggaggaacagctttggaattaaagacagagaggaaaagaagatttggttccctaggtctgacagcaccaggggtttccggtcactgccatcatcaccctccatgatcctgggaatgagaaaaggtgtggaacgcatggctgtcgacgatgaccgcaaatatggctatgaggattcagtgtccagaagcagcactaagtttcttagcaggtgcaagcaggcaatcaagaaagcagtaaacaaataggtcactgcaccatacgtctgaatacctctttatttttccttttctttgtgtgagttcaaaatcgattccaattgttgtagtctgtgtagctgaataagcgagtgagcttagcttgcagacttttgtgtggtatttcttatggtcaccctaacgtgatcagattagtgtgtgtacaagtattttttttatttgatactttgtttgaaaagataaaaatattattgttcctgagccgcagaagtctagggtaaatgttttggtttgatctcattcaacacagtcagcggaccgagtcggac

SEQ ID NO: 110293 - DNA, 1585 bp, Zea Mays
atggaggtggcccccatggcaggagctctcgtcgagggcaaattggacccagtcgttggtagacaagatcagattgagcgtgttactcagattttgggcaggcggacaaagaacaacccctgcctaattggagagcctggtgttggaaagactgctattgctgaggggcttgctcagcgtattgctaattgggatgttcctgaaacaattgaaggaaagaagagcgtcggctccatggacgaggacgatgacagtcccgcctccggctccggtcgccataagaagaagctgcgcctcatcatgggcctccacgacggatcagcaaaggttcaaacaggaatatctctgaacaccttgggctctctaggctatgagatagatcatggatggagacagagaatagcagtgtgtcattctaaactgggagtggtggtcaacccaactcagcaggccgctgccgatgcaatgccaacacaacctcgcggtgtcgctgtgctttctgtgatgctatttggctggcgcacagagttcagtggcgagaaggtacaattttccagtgattgttgtattcaaactggccgactttaatttccactgcttttctccatgggaaatgatgcatttgatgatatgagttgcagaagtacatgtgggtgaggcaggggttgatatttccatttttagactacatgaaccggtgagtagtagtttaaaatgcataactacatggacaactgttagaatgctgctaaaacacctgctcgagtagttttgacaactttactatggttagaatatgccagcttgtgccttaagaacaagttgtatttgtcatttcagatttcaagggcagacagaactaagcagttgcaaacctgttgatttccggagggcagtagaagaggcctttttggctgatcagggattctcagaagtagtcgtacattgcagcaccaagggcatatatgctcatacaaatgtttcccaggagttatttttttcaaaacacagttgaaaggttgcacttcaattatgagaactaaatctaactcttttcaattctaaaaaaacaggtgaatatttagcgaccacagaggcacagaccattacagggatatactttaacacaagcaagtaaagatcttttaattcgttaccaatatcaaaatctgacctgcatcgagaaattaaatgtcataattttttttccaggcaatacctcttctcccatcagaaaaacagaaggatcagcagacatctcttcatccagtgcagagttcaatgcatcacggacagtcatctgaacatgtagaacaataatgtatatgacttgccacataaagatgtagaaactacagcatgggaataaaacactagcgggtgctggcatagggtcaaaatagagtaaaaatcaagaatgaaacaatgcataaaatgcataaacacaatgatttgatgacacatcaaatgaaccccaagtaaaaaattaacataagaaactaccaagtgtgcttcatatatatgtatcagtatatatatacaatgatgtatattctctgtttttcgagcatacaaatgtttccca

SEQ ID NO: 110294 - DNA, 690 bp, Zea Mays
tccatgcgctcgccccctgctcctcgtcctcggcgccccacaacaactgtcagagcgtcggctccatggacgaggacgatgacagtcccgcctccggctccggtcgccataagaagaagctgcgcctcatcatgggcctccacgacggatcagcaaaggttcaaacaggaatatctctgaacaccttgggctctctaggctatgagatagatcatggatggagacagagaatagcagtgtgtcattctaaactgggtgatcagccgaaaagatcccatggataatcattaacaattatatggttgtttctaatttaacagagggagggaaccagcaaaggcactccatgggggaatggttgtggccagatttattaatggtgttgcggctgcaagcgtcgtgtggcatctgtcgcgacctagaggactagaggcatagaccgtcatctaattttgggctatcgtcaacatcttgagagcatcggggtgagccttgatttcctccttggaatgtgattgcaagttcttgtgcttctgaactgtgctttaataattcctgggggttggggggaaatcacattttttgttattgtggtcgtgactcctataatgcattcattttattaaacaaaatgaaattagataattgccatcttattctaatgcctcatgttgatgacaaaaatcataa

SEQ ID NO: 110295 - DNA, 1306 bp, Zea Mays
caacagtattcgtctccaagtttacaaaggagccccacgaggaacagctaactaccaaaacgtccattccgaagccgaggagagatctcatctcggcttctccgccgccgtcgccgccatgcctccctccccatcttccgccggtgcgggcgccgcctcgccttccggttccgcgtccgcttccggctccgacccgaccccgtcttggtgggagtccgtctcgcaggcacggtcccgcatcctggcgctctcctccatcctgcccgcggcggtctcccacgacgtggcggcgctggccgacgccgaccgcccggcgcgcgcgctcctccgctcgcccgctgcctattcggcgctctccgacgcgctccgggcgggcgggggcgccgacgacccggcctgccactggctctacgacacgctcctctccgccgacccggacctccgcctcgccgcgctcgcgttcctgcccctgctggcggcgctctacctccgccgcctcccacccgagctccctttctcgctctccggcttcgaggccgtcctcctcgccgtttactcctccgaggccaagaatcgccaggggaagccggtcctcgtccaggtgcccgacctctccgtcccatccctgtaccacacgccggcgtccagccccagctccaagtcccctcgccggtcgcagcccccgccgatcccccctccgcaggcgactcccgtggtgggggtgctgtcgccgccgctggagccacaggccgcggtgaaatcgacgaagcgcgctggaattattggagttgcatttgaggcctactactccaagatttcgcagatgcctgctgcgtcgaaggtggatgcctgcaatgctgtggctgcgtgggcggggcagtactgcaaatgccgttttgagctggatgagaaagaactggaagaagaggaaggtgactctttggggtctgcctcgtcaatgacctcggagattgagaatgggaaggaactggaggacgaattggccaggacgcatatcaatggagacagcagtggccggaattgcagcggggacgacaaggaggcgagggtgccacttccctgggagctgctccagccagtgatgagggttcttgggcactgcttgcttgccccgctgaacccacctgaggtgcgtgatgccgcagcagacgcagtgagggtcgtctatgcccgtgcatgccacgatcttgtggcacaggcaatcttagcatcacgaagcttgattgagcttgacaagagcgcacgaaaggctgccaacgtatctcatgcggcttctggtcaaatt

SEQ ID NO: 110296 - DNA, 2006 bp, Zea Mays
attctccggttctcctcctcacacaagtgacgcacattccaacacagaaatgctgcacactgttcgtcttccgtcctcacgctccttatcgcgtcgtcccgtctcggccactcctcactagaaccccccctcgtcgtccacgcgtcacgtcgtcagcctcgatcttggccgtgcaaactttgcaccggtcgtatcgcggccggtgtgtggagctggcattgttttataagccgcacgtacgcgcgctcgtcatttaagctatcgagagaaagcagagagagagagagagagagagaggcaggctaggttaggaagacgcagccaatggcggggcttcacttcgtgctcgtgccgctactggcgcagggccacataatcccgatggtggacctggcgcgcctcctcgccggccgcggcgcgcgcgtcagcgtggtcaccacgcccgtcaacgccgcgcgcaacggggccgtcgtcgagagcgcgcggcgagcggggctcgacgtcgagctggcggaggtcgcgttccccggcccggggctcgggctgccagaagggatggagaacgtcgacatggtggtggaaaaggagcacttcatgccattcttccaggccacgtggaagatggacgcgccgctggaggagtacctgcggtcgctgccccggcgcccggactgcgtcgtcgccgactcgtgcaacccgtgggcggcgcgggtgtgcgcccgccacggcatcccgcgcctggtgctgcactgcccgtccgcctacttcctcctcgccacgcactgcctgtccacgcacggcgtgtacggccgcgtggcccacgagctggagccgttcgaggtgccgggcttcccggtgcgcgcggccgggaacgtggccacgttccgcggcttcttccagtggccggggatggaaagctacgagcgcgacgtggcggaggccgaggccaccgccgacggcctgctcatcaacacgttccgcggcctcgagggcgtcttcgtcgacggctacgcggcggcgctcggaaggaagacgacgacgacgtgttgggccgtcggcccgacgtgcgcctcctcctccggtggcctggacgcgggcgcgacggccgcccgcggcaaccgcgccgacgtcgacgtcggcctcgtcctgtcgtggctcgacgcccggcccgcggcgtccgtgctgtacgtcagcttcggcagcctcgcgcagctgtcgctgaagcagaccgtcgagctcgcccggggcctcgaggcgtccgggcggccgttcgtctgggccatcaaggaggccaagtccagcgccgacgtgcgggcgtggctgctggccgagcggttcgaggagcgcgtccgggacaggggcctcctcgtccgcgggtgggcgccgcaggtgaccatcctctcgcaccccgcggtgggcggcttcttgtcgcactgcgggtggaacgcctcgctggaggccatcacccacggcgtgccggtgctgacgtggcccaacttcgccgaccagttctgcagcgagcggctgctcgtcgacgtcctcggcgtcggcgtcaggtccggcgtcaagctgccgcccatgagccttcccgacgaggccgagggggtgcaggtgacgagcgccgacgtggagaaggcggtggccgagctgatgggcgtgggcgccgacgggacggcgaggagggcgagggccaaggagctcgccgcaaaggccaaggcagccatggaggaaggcgggtcgtcgtatgccgacttggacgacatgttgcgccatgttgcggagctaaacatgaagaagagccacgaagagggcacgggcttcagcactctgccggagcttggaactggaagcaagaacaatgacaacataggtgccggggctgccttgtcagtacagtcctaagttgcattgcaccatgcgcttgccttcttggacgatgtttaacacaagtagaccagtgtactttctctatgtttttgtacacataatacatgtagttagtattc

SEQ ID NO: 110297 - DNA, 1734 bp, Zea Mays
tcgatcggagtgacgtgctggggattgtaggtgcaagcgcgcgcgacattgcagctaccgagaagaaagcagaggggcaatcgagcagttgacgggcgtgcagcaatggcgggacttcacttcttgctcgtgccgctggtagcgcaaggccacatcatcccgatggtggacctggcccgcctcctcgccggcaggggagcgcgagtcaccgtggttaccacgcccgtcaacgccgcgcgcaaccgggccgttgtagaaagcgcccggcgggcggggctcgacgtcgaggtcgcggagatcgcgttccccggcccggggcacgggctgccggagggtctggagaacatggacctgctcacgaggagggagcacttcttgcccttcttccaggcggcgtggaagatggacgcgccgctggaggagtacgtgcggtcgctgccccggcgcccggactgcctcatagcagactcgtgcaacccgtggacggcggaggtgtgcgcccgccacggcatcccgcgcctggtgctgcactgcccgtccacctatttcctcctcgccatgcacagcctgtccaaacacggcgtccacgaccgcgtcgccgacgagctggagacgttcgaggtgccggacttcccggtgcccgcgctcgcgaacagggccacgttccgcggtttcttccagtggcccggagccgagggcttccagcgcgacgtcgccgaggccgaggccaccgccgacggcctgctgctcaacaccttccgcgacatcgagggcgtcttcgtcgaccgctacgcggcggcgctcggacggaagacgtgggccatcgggcccatgtgcgcctccggcggcctggacgcggacgccagggccagcaggggcaaccgccccgacgtcgacgccggccttttcgtgtcgtggctagacgcccggccgccctcgtccgtgctgtacatcagcttcggcagcctcgcgcacctgccggcgaagcaggtcatcgagctcggccgcggcctcgaggcgtcggagcggccgttcgtctgggccatcaaggaggccaattcgaatactgacgtgcaggcgtggctcgccgaggggttcgaggagcgcgtcagggacagggggctcctggtccgcgggtgggcgccgcaggtgaccatcctttcgcaccccgcagtgggcggcttcttgacccactgcgggtggaacgccgcgctggaagccatcgcctacggcgtgccggtgctgacgtggcccagcttctccgaccaattcagcagcgaacggctgctcgtcgacgtcctcaacatcggcgtcaggtccggcgtcaaggtgcccgccatgttcttacccaaggaggcggagggcgtgcaggtgtcgagcgccgacgtggaaaaggcggtgggcgagctcatggacgagggtcccaaggggacggcaaggagaggaagggccaaggacctcgccgcgaaggcgaaggtaaccatgatggaaggtgggtcgtcgtacgccgacttgaccgacatgatccaccacgtcgcggtgctcggcagtcggcagtaagaaaagccatgatcacacagactagatcactagaatctactagtgtaccaatgctagtgcacatactagaatcttgttctactagtgtacctggagctattcaaaattgcttattgtacctttctctttctatatgttttgaaacaccgtatccacacggaccatttgatctcc

SEQ ID NO: 110298 - DNA, 677 bp, Zea Mays
atcccctttcccttcctcagcagcctccggccgcagccatgcccaagccatcatcaggcacctccacctccgcccccttgctccccacgaccaccatctcggttcccaagtcgtcatcccaccccgcccccgcgatgctcctcaactcgctcgccacatttgggcgctccctcctctcatcgtcgcggcgaaccccggtcgccatgctcgccaccaccttcttcctcctcacgctcgtcatgtacgacgaggacacccgcacaaatgtcgagctctccatcgacgactacctctacctagacgccgacctctacaacgtctccgacctgctgctcctcccgggtctcgcccaggatctgcatccgcatctagcgcatcgagcatgatgctgttgagcggatgagctgctcagcgctctcctcaccgcaacctcccacggtggcgacgccaggtagagagagcaggtccctatgccccgtgccgttgtggagggcatggagtgcgagctgtaggtggagtgagagcgtgtgtgggactgtggggagaggatgagttatgaaggatgcatgatccaaagaacatcaaccattgatgtgagcgagtaagagattaatggacttagagtatgatctggtccgtttatttctaatgagttggttttctgggtggagttgctt

SEQ ID NO: 110299 - DNA, 1723 bp, Zea Mays
tctatttgaactaatgacaatatatgatattattctactccatgccccttcggcattccccctttcatatccaagaagacttgtattgcatctcctctctccctctcttcttaccaatcgatcctacgtagtttacgtaagtccctgttcttacaaatcaccccttaccaacagacgcgtttgggtcaaaaacccaagtacaacactagtagtagcagtacattacatagcaacagtattcacatcaacggagtgcagcttgaggatcataattctacggataaaaagaacacttcgccgtcttcacaggcttggctgaaccgcacttgaagcaacctgtagtgtggagatgaagctgttaaacaataaactcgaaatccaaagccccctctctctctctccaaggaaagaaaaagaaagagaaaggcgtggaatgtgcttaactcgaactagcctgtgaaaatcttcctatgttaggcggaaagcagccactgacatgcgtggtgcgtacttgactacttgttatcccagagaaaagaaaagagcccaaaaaattcaaccggttggctcctattgaaggccagcaggaaaaaaaaaaggctagaacttctgtgcttcagctctccgcggttggtcgtgagttcatccaatatctccgcatcaggacggctaggacaacttcctacttcagatgcttcatcttcctgtgcattgaacaaccaagggtcaaatcacacaaaacaccagaaaatggattccatgcgaaggaaagattaatgaatgtataccagtttgtgttcaagggggaccccgtcaagttcttcgtactcagctgcatcgagctccctcaagacgacgggatcaaaaaattttgggaggagatactgcctgatgacgatcatgaggaagaaaggcactgggaacaggatcccggctatcggtatccacgttatgccgaagcatattaggaggtaaaccaactggaagatcgtgaagatggttactgttttgggaaccactgactccacaaacgatgcatggggaccttcaagaaccctgcaaccacggcgtaatcggatgattagtcgcaaagaagaaacacaggctctgcatttgtgcccgtgctagcccaatccttcattttgaagtgaattgctgcgggacagagatgttacttgtagcgtcggctttctgtaatgaacagaagctgtatcctctcccagaactgattccctggtagactgtcgatggccatgtaggcaaagtaaccccagaggaccgatgtgggtatcatcctgatgactggcatagctccaacacacccaccaaccagtatggactgcagcagattgctcagtctctgttcgttcactcggacaggcaagtgggcttctatatgtttgcgagggtcaaattctctagccaatctcccttcttcgtcgccttcttgcagaacagcatccttgaagttcttcaactccctgtcaacagaatcagtctgaaaagacaacgtgttgagcattaccattattttactggtaagttttccataaagaataatatggacaacatttaggtagtagttaggtattggacaaaaattaaggagaacccatatctaattggcaaacgcgaattgttgtaagattcaaaagctttgttttttgttggcacatataaataagtcaagtaacaaggagtcaaaaggctcacattctgttcg

SEQ ID NO: 110300 - DNA, 774 bp, Zea Mays
agaggaaaacacatacgtattaatttaccaagtcaaaccgaaaacatcaccactccataacatttagcgcaagaactaatggtacacagctacatgaacatatatctctactgggtcgcagccgatcgagtcgggtcgggagggacaccatcctaatactagtccccctcctccatctccatctccatctcctccgcagcaacaccggcactcgccacgctattcatttttttttaacaaggacggacggaagctggaaaggttcaagcacacgcacgtatgtacagacacgggctgccacggcgatctggccggcggctagggcctggcgtcgggcgcggcggaggcgaggcgggacgcgatggcggagtggtacatggcgtcgtggaagctctccgtctccatcatctgcacgcgcagccgccgcgccttgtcctccgtcagcacgccgaaccgcctggccgaggccgaggccgaggccggcccccgcggcagaggctcgtcctcggacgccggccgcgcgtcgatgtagtccggctgcccggaccaccccagcagcggcgcccaccacttggcgccgtcgccgacggggcgcgccctcgccgtggcagagcaagcgcagggccgggccggagccggcgggcggacggagaagaccatccctgatgacactgccatggatggaagttctggattcggacgagaaagaggtttgaggctgactgtgtgttgagtttgcgacctgcgggtggattgggattgggattgggattg

SEQ ID NO: 110301 - DNA, 2150 bp, Zea Mays
accacgtctcccctcacctggctctccacctgccacctcacgcgcgcccctgctctgtctcttttggctccgctgaggccgagcacacacaacaaattctctctctcctctctctctctctctctcacacacacactctgctccctgtgcggaggacgggccggccgcatggggtgggggtggacggcgctggcggcggccgcgatggcgtacgtggcggtgaagctgatggaggtgctgtggtggcggccgcggcggctggagcagcacttcgcgcggcaggggataaggggcccccgctaccgcttcttcgtcggctgcgtccgcgagatggtggcgctcatggtggccgcctccgccaagccaatgccgcgcccctaccgctcccacaacgtcctcccgcgcgtcctcgccttctaccaccactggaagaaaatctacggttccacgttcctgatatggttcggcccgacgccgaggctcgccgtcgccgacccggacctcattcgggagatcctcctgtcccgcgccgatcacttcgaccgctacgagtcgcacccgatggtgcgccagctcgagggcgaggggctcgtcagcctgcgcggcgacaagtgggcacaccggcgcaaggtgctcacgccggcgttccacatggagaacctcaagctgctgctgccgttcgtcgggaggacggtggtcgacgtggtggacaagtggcacgacatggccgccgcggcgtccggcgaggtcgagatcgacgtgtccgagtggttccaggtggtgacggaggacgccatcacccgtacggcgttcggccggagctacgaggacggcaaggccgtcttcaagctccagacccaactcatggccttcgcctccgaggcgtttcgcaaggtcttcatccctggatacaggttcctgccgaccaagaagaacacgacctcgtggaagctggacaaggagatcaggaagaacctggcgacgctgatcggccggcggcaggaagccgcggacgacgagaagctcagcggctgtgccaaggacctccttggtctcctgatcaacgcgggcagcaacggcggcaaggtgagccccatcaccgtgaacgacatagtggaggagtgcaagacgttcttcttcgcgggcaagcagaccacgtcgaacctcctgacatggaccacagtcctgctcgccatgcaccccgagtggcaggagctcgcccggcaggaggtgctccaagtctgcggggcgcgtgacatcccctcccgcgagcagctcaccaagctcaagacactcgggatgatcctgaacgagacgctgcggctgtacccgccggcggtggcgacggtgcgtcgcgccaaggcggacgtggagctgggcgggtgcctgatcccgcgcggcacggagctgctgatcccgatcatggccgtgcaccacgacgcgcggctgtgggggccggacgccacgcagttcaacccggcgcggttcgccaggggcgcggcgcaggcggccaggcaccccacggcgttcatcccgttcgggctgggcgcgcggatgtgcatcggccagaacctggcgctcctggagtctaagctcacgctggccatcgtcctccagcggttcgacttccggctgtcgcccagctacctccacgcgccgacggtgctgatgctcctccacccgcagtacggggcgcccgtggtcttccggccgcgaccgtctgagccgtccgatcgcgacagtagggatgtgtgaggagatgacggagctcgtactaaccttgtcagtgtcaattgcgcctggcatgatgaccaataaccacctccgcagcatgctgctttgccctcaagagcagagaccaaacgagcagagcagccgccgccaccgccacagcccagcaccaccagaggaacaagtgactagaaggagcaccaccgtaccgtactaagtactaacaaatatatcctgctgaaggtgccagcagcagcagcagcttagactagtagagcagagtagaaggcttgaccagtgcctcccaatttttcagtcatttgggttgatgatttccttccttccatgaggttttgccaggtgtggttggtgtatgaaggattgcaaaaattgtacacacgtcgtgttccgtttgttct

SEQ ID NO: 110302 - DNA, 3104 bp, Zea Mays
accacgtctcccctcacctggctctccacctgccacctcacgcgcgcccctgctctgtctcttttggctccgctgaggccgagcacacacaacaaattctctctctcctctctctctctctctctcacacacacactctgctccctgtgcggaggacgggccggccgcatggggtgggggtggacggcgctggcggcggccgcgatggcgtacgtggcggtgaagctgatggaggtgctgtggtggcggccgcggcggctggagcagcacttcgcgcggcaggggataaggggcccccgctaccgcttcttcgtcggctgcgtccgcgagatggtggcgctcatggtggccgcctccgccaagccaatgccgcgcccctaccgctcccacaacgtcctcccgcgcgtcctcgccttctaccaccactggaagaaaatctacggttccacgttcctgatatggttcggcccgacgccgaggctcgccgtcgccgacccggacctcattcgggagatcctcctgtcccgcgccgatcacttcgaccgctacgagtcgcacccgatggtgcgccagctcgagggcgaggggctcgtcagcctgcgcggcgacaagtgggcacaccggcgcaaggtgctcacgccggcgttccacatggagaacctcaagctgctgctgccgttcgtcgggaggacggtggtcgacgtggtggacaagtggcacgacatggccgccgcggcgtccggcgaggtcgagatcgacgtgtccgagtggttccaggtggtgacggaggacgccatcacccgtacggcgttcggccggagctacgaggacggcaaggccgtcttcaagctccagacccaactcatggccttcgcctccgaggcgtttcgcaaggtcttcatccctggatacaggttcctgccgaccaagaagaacacgacctcgtggaagctggacaaggagatcaggaagaacctggcgacgctgatcggccggcggcaggaagccgcggacgacgagaagctcagcggctgtgccaaggacctccttggtctcctgatcaacgcgggcagcaacggcggcaaggtgagccccatcaccgtgaacgacatagtggaggagtgcaagacgttcttcttcgcgggcaagcagaccacgtcgaacctcctgacatggaccacagtcctgctcgccatgcaccccgagtggcaggagctcgcccggcaggaggtgctccaagtctgcggggcgcgtgacatcccctcccgcgagcagctcaccaagctcaagacactcgggatgatcctgaacgagacgctgcggctgtacccgccggcggtggcgacggtgcgtcgcgccaaggcggacgtggagctgggcgggtgcctgatcccgcgcggcacggagctgctgatcccgatcatggccgtgcaccacgacgcgcggctgtgggggccggacgccacgcagttcaacccggcgcggttcgccaggggcgcggcgcaggcggccaggcaccccacggcgttcatcccgttcgggctgggcgcgcggatgtgcatcggccagaacctggcgctcctggagtctaagctcacgctggccatcgtcctccagcggttcgacttccggctgtcgcccagctacctccacgcgccgacggtgctgatgctcctccacccgcagtacggggcgcccgtggtcttccggccgcgaccgtctgagccgtccgatcgcgacagtagggatgtgtgaggagatgacggagctcgtactaaccttgtcagtgtcaattgcgcctggcatgatgaccaataaccacctccgcagcatgctgctttgccctcaagagcagagaccaaacgagcagagcagccgccgccaccgccacagcccagcaccaccagaggaacaagtgactagaaggagcaccaccgtaccgtactaagtactaacaaatatatcctgctgaaggtgccagcagcagcagcagcttagactagtagagcagagtagaaggcttgaccagtgcctcccaatttttcagtcatttgggttgatgatttccttccttccatgaggttttgccaggtgtggttggtgtatgaaggattgcaaaaattgtacacacgtcgtgttccgtttgttcttttgatctgcgatgatacgtacatgggaggaaaaggtgagcagggaaaagggggaatgcaggcgtatggtatgggaggtgcatgcatgatgtttgaggatcgtggcgccacagtgcgtctgcttacttccctgtcattgttctctcctccgtggtcctccttgcgatgcagaccagaagccattaataaaggaagagatgggtgccctgctgctgggtgctggccatttaagagtgccttgcaaggggaacaaacggtgtgcgacagtacagcacagacagacggcggggcgggggggagtaaacgcggcggccaagaaagtggagccggtgggtggatagataacacagcgagcgacggtcgggcgggcggacggcggagggaatcatcagggtctgctactctgctctgttctgatctgccagcagcgccagcgccaccaccccatcagcagcagcagcagcagcagcttcaattcattgccttgccacctctgcgcctgcgagggcatcgagtgtgtttgcgcccgcccgagccaatgtgcgagtacgcacggtgtccctccggccaagctggcaccggccgcgggccgaccagaggaccagaactgtgtagcggccgatgagcctcgcctcctccccataaaggtgctgccgcatcggaccgcggtgaggagtggtggggggtcctggcctgtcgtgatggtgctgctgctgctcggcccttgtgtaactgttcatctcctctcccctgtcagactgcgctggccggcaccggcatagcagcgctgccacaccgcattgcatcgggagcgtgaaatggaaatgggggtgggatgcccacctgcagctgcaaatgctgctggattggattggcctgactccactccactccactccactgctctgtggggtgagcagtactacttgcgacaggcaggcgacctgctcttgg

SEQ ID NO: 110303 - DNA, 2109 bp, Zea Mays
cgcctccgggcgcacccgccgcgacctgtccgtccctggcccaaccgtcacgccgctgcggccaccacctgctctgctccgcccttctcttcgtgtcgtcttgtgatccctgcctgcctactgggtgctggctggctggctggctacagtgctggtgcggcagtgcgcgggtacagtgtaatgcggcgggcgctgccacagggggaggagctgggtatcgtagcgtagcgtacctgctccgcgcgtacgtacgcatgttgtgcctgcgcctgcatcgccggcacctctccctgccatgtcctgtccctgcccccttggcagctggcgggatgctgctgatgtggcggaacatggcctccctgcccccaatcattggctgcctcgtcgccttgtcacgctcacgcccgtgcctgattttgcctctccctccaggttccacgttcctgatatggttcggcccgacgccgaggctcgccgtcgccgacccggacctcattcgggagatcctcctgtcccgcgccgatcacttcgaccgctacgagtcgcacccgatggtgcgccagctcgagggcgaggggctcgtcagcctgcgcggcgacaagtgggcacaccggcgcaaggtgctcacgccggcgttccacatggagaacctcaagctgctgctgccgttcgtcgggaggacggtggtcgacgtggtggacaagtggcacgacatggccgccgcggcgtccggcgaggtcgagatcgacgtgtccgagtggttccaggtggtgacggaggacgccatcacccgtacggcgttcggccggagctacgaggacggcaaggccgtcttcaagctccagacccaactcatggccttcgcctccgaggcgtttcgcaaggtcttcatccctggatacaggttcctgccgaccaagaagaacacgacctcgtggaagctggacaaggagatcaggaagaacctggcgacgctgatcggccggcggcaggaagccgcggacgacgagaagctcagcggctgtgccaaggacctccttggtctcctgatcaacgcgggcagcaacggcggcaaggtgagccccatcaccgtgaacgacatagtggaggagtgcaagacgttcttcttcgcgggcaagcagaccacgtcgaacctcctgacatggaccacagtcctgctcgccatgcaccccgagtggcaggagctcgcccggcaggaggtgctccaagtctgcggggcgcgtgacatcccctcccgcgagcagctcaccaagctcaagacactcgggatgatcctgaacgagacgctgcggctgtacccgccggcggtggcgacggtgcgtcgcgccaaggcggacgtggagctgggcgggtgcctgatcccgcgcggcacggagctgctgatcccgatcatggccgtgcaccacgacgcgcggctgtgggggccggacgccacgcagttcaacccggcgcggttcgccaggggcgcggcgcaggcggccaggcaccccacggcgttcatcccgttcgggctgggcgcgcggatgtgcatcggccagaacctggcgctcctggagtctaagctcacgctggccatcgtcctccagcggttcgacttccggctgtcgcccagctacctccacgcgccgacggtgctgatgctcctccacccgcagtacggggcgcccgtggtcttccggccgcgaccgtctgagccgtccgatcgcgacagtagggatgtgtgaggagatgacggagctcgtactaaccttgtcagtgtcaattgcgcctggcatgatgaccaataaccacctccgcagcatgctgctttgccctcaagagcagagaccaaacgagcagagcagccgccgccaccgccacagcccagcaccaccagaggaacaagtgactagaaggagcaccaccgtaccgtactaagtactaacaaatatatcctgctgaaggtgccagcagcagcagcagcttagactagtagagcagagtagaaggcttgaccagtgcctcccaatttttcagtcatttgggttgatgatttccttccttccatgaggttttgccaggtgtggttggtgtatgaaggattgcaaa

SEQ ID NO: 110304 - DNA, 3094 bp, Zea Mays
cgcctccgggcgcacccgccgcgacctgtccgtccctggcccaaccgtcacgccgctgcggccaccacctgctctgctccgcccttctcttcgtgtcgtcttgtgatccctgcctgcctactgggtgctggctggctggctggctacagtgctggtgcggcagtgcgcgggtacagtgtaatgcggcgggcgctgccacagggggaggagctgggtatcgtagcgtagcgtacctgctccgcgcgtacgtacgcatgttgtgcctgcgcctgcatcgccggcacctctccctgccatgtcctgtccctgcccccttggcagctggcgggatgctgctgatgtggcggaacatggcctccctgcccccaatcattggctgcctcgtcgccttgtcacgctcacgcccgtgcctgattttgcctctccctccaggttccacgttcctgatatggttcggcccgacgccgaggctcgccgtcgccgacccggacctcattcgggagatcctcctgtcccgcgccgatcacttcgaccgctacgagtcgcacccgatggtgcgccagctcgagggcgaggggctcgtcagcctgcgcggcgacaagtgggcacaccggcgcaaggtgctcacgccggcgttccacatggagaacctcaagctgctgctgccgttcgtcgggaggacggtggtcgacgtggtggacaagtggcacgacatggccgccgcggcgtccggcgaggtcgagatcgacgtgtccgagtggttccaggtggtgacggaggacgccatcacccgtacggcgttcggccggagctacgaggacggcaaggccgtcttcaagctccagacccaactcatggccttcgcctccgaggcgtttcgcaaggtcttcatccctggatacaggttcctgccgaccaagaagaacacgacctcgtggaagctggacaaggagatcaggaagaacctggcgacgctgatcggccggcggcaggaagccgcggacgacgagaagctcagcggctgtgccaaggacctccttggtctcctgatcaacgcgggcagcaacggcggcaaggtgagccccatcaccgtgaacgacatagtggaggagtgcaagacgttcttcttcgcgggcaagcagaccacgtcgaacctcctgacatggaccacagtcctgctcgccatgcaccccgagtggcaggagctcgcccggcaggaggtgctccaagtctgcggggcgcgtgacatcccctcccgcgagcagctcaccaagctcaagacactcgggatgatcctgaacgagacgctgcggctgtacccgccggcggtggcgacggtgcgtcgcgccaaggcggacgtggagctgggcgggtgcctgatcccgcgcggcacggagctgctgatcccgatcatggccgtgcaccacgacgcgcggctgtgggggccggacgccacgcagttcaacccggcgcggttcgccaggggcgcggcgcaggcggccaggcaccccacggcgttcatcccgttcgggctgggcgcgcggatgtgcatcggccagaacctggcgctcctggagtctaagctcacgctggccatcgtcctccagcggttcgacttccggctgtcgcccagctacctccacgcgccgacggtgctgatgctcctccacccgcagtacggggcgcccgtggtcttccggccgcgaccgtctgagccgtccgatcgcgacagtagggatgtgtgaggagatgacggagctcgtactaaccttgtcagtgtcaattgcgcctggcatgatgaccaataaccacctccgcagcatgctgctttgccctcaagagcagagaccaaacgagcagagcagccgccgccaccgccacagcccagcaccaccagaggaacaagtgactagaaggagcaccaccgtaccgtactaagtactaacaaatatatcctgctgaaggtgccagcagcagcagcagcttagactagtagagcagagtagaaggcttgaccagtgcctcccaatttttcagtcatttgggttgatgatttccttccttccatgaggttttgccaggtgtggttggtgtatgaaggattgcaaaaattgtacacacgtcgtgttccgtttgttcttttgatctgcgatgatacgtacatgggaggaaaaggtgagcagggaaaagggggaatgcaggcgtatggtatgggaggtgcatgcatgatgtttgaggatcgtggcgccacagtgcgtctgcttacttccctgtcattgttctctcctccgtggtcctccttgcgatgcagaccagaagccattaataaaggaagagatgggtgccctgctgctgggtgctggccatttaagagtgccttgcaaggggaacaaacggtgtgcgacagtacagcacagacagacggcggggcgggggggagtaaacgcggcggccaagaaagtggagccggtgggtggatagataacacagcgagcgacggtcgggcgggcggacggcggagggaatcatcagggtctgctactctgctctgttctgatctgccagcagcgccagcgccaccaccccatcagcagcagcagcagcagcagcttcaattcattgccttgccacctctgcgcctgcgagggcatcgagtgtgtttgcgcccgcccgagccaatgtgcgagtacgcacggtgtccctccggccaagctggcaccggccgcgggccgaccagaggaccagaactgtgtagcggccgatgagcctcgcctcctccccataaaggtgctgccgcatcggaccgcggtgaggagtggtggggggtcctggcctgtcgtgatggtgctgctgctgctcggcccttgtgtaactgttcatctcctctcccctgtcagactgcgctggccggcaccggcatagcagcgctgccacaccgcattgcatcgggagcgtgaaatggaaatgggggtgggatgcccacctgcagctgcaaatgctgctggattggattggcctgactccactccactccactccactgctctgtggggtgagcagtactacttgcgacaggcaggcgacctgctcttgg

SEQ ID NO: 110305 - DNA, 98 bp, Zea Mays
ctactgctcacctgcttgccggttctaacgggattaaacaactgcggtttacatacagatacagcccaccattgtcttgccttgccagtgcccagtag

SEQ ID NO: 110306 - DNA, 101 bp, Zea Mays
aaaataaagcaaatacaactgttgttaagaaatgcgaaggcaatcacgctcgattctttatgagacttgagaagacatcagagaaatatcttgtcagctag

SEQ ID NO: 110307 - DNA, 276 bp, Zea Mays
atgaaatcttttactactaggcatcatgatgtggacaaggtatctcttgagttattgacttcatatggacaaggggttgatacgtactttcatagtggcaggacctatgacctaagatcacaccatgggtacaacgtagttgataaacggtatgttggcaaattcaggcgtgactacaaggacaatggcacgcactgtacaatgatcccagggacaatgtacagtggtcatgggtacacctgctacctccgttacggcaacagtgcacctctttga

SEQ ID NO: 110308 - DNA, 1942 bp, Zea Mays
cccgcacaagtcacaacagaacaacctacccccacaagcagaaggatccgggcggccaccgagagtcactggaagaagctcgtccggcgccccgcgacgagacgacggcctcctcctccgctccgctgaagaacgacctccccgctgacaggttcgcgaatcgcaatctccttccctccttccctctctcttctcccccaaggccccaactgggtcgaccgcttttccgaacccgtgcggccagttactgttcccatcttattcttttggtgcgtgcctggctgcctgcctgccaccgccatcaccaccacgcgcggctcatgtggcgtggcgcagaggcggagcgctccgcagaggcgcagagagaggtggcgtctgccttgctgcgctgcgggtctgcggtctcctgcagattcccgcacccacaaggccagaggcgacccaccagcgccacccaaaaaaggcgcacccctttccgccgcccaaatctccctttaccccgatccccaagccccgccgctgctccctcgtacgcaccgttggcgggccttgtagcgaggagggggtgcggaggcgccgcgactgttcgcgggatgagcttcggcggcagcagctccctcgcatcaggtgcgaagaggccgttcgagtacgggagaacgcatgtggtgaggcccaagggcacgcacaaggccaccattgtctggctccatggacttggggacaatggagccagctggtctcaactactggaaactcttccccttcctaatgtaagttaggacatagattcgaaatatgcaatgttttaatttcttatggtggtttaggccctgtttggaatctctagaagtaatagttagctactaaaaattatttgttgggttccaaacaccctcagctaataccacaactaattgttagctatgagatagctaacaattagttcattagctgactctaacccagctgataatttattagctagctagctattagctctaggggttccaaacaggggcttaaagcttaatctcacaccttgttgctcaaatccaatacgatatttcttcctgtatatctttgctgtgctcagataaaatggatatgccccactgcaccttcaagacccgtgtcagtgtttggcgggttcccctccacagcatggtttgatgttgctgatctttctgaggatgctcctgatgacattgagggaatcgatgcctcagcagcacatgttgcgaatttgttgtcaactgaacctgctgacatcaaacttggtgttggcggctttagtatgggtgctgctactgctctgtactctgcaacttgctttgcccatggaaaatatgggaatggcaaaccattccctgtgaacctaagtcttgccgttggtcttagtggctggcttccatgtgccaggaccttgaagaacagaattgaagcctcaccagagtgtgcacaaaaggcttcatcaatacctcttttgctctgtcatggaaaagctgatgatgtagttgcctacaagcacggggagagatctgctggtgccttgaaggcaaatggcttttccaatgtgctcttcaaggcatacaatagtcttgggcactacactgttccagaggagatggatgaagtttgcaaatggatcacagcaaatttggggcttggcactaagtcatcttgattggaatttgatgcgagaaagactcgcagggacggtgtccaaataataccggtatcttttccaggaggtatatggtttaatagcaaatttgggcttgggtatacggccatgttctagcttttcttaacgcagacgtgtctgcgaatgatgtatgcttataatatctatattttggtctacgtcgatttggttgtggcacggataatgtttgtttcaaatattctgctctgcgaattggaattgtgatgttttgctttc

SEQ ID NO: 110309 - DNA, 1233 bp, Zea Mays
cccgcacaagtcacaacagaacaacctacccccacaagcagaaggatccgggcggccaccgagagtcactggaagaagctcgtccggcgccccgcgacgagacgacggcctcctcctccgctccgctgaagaacgacctccccgctgacagcgttggcgggccttgtagcgaggagggggtgcggaggcgccgcgactgttcgcgggatgagcttcggcggcagcagctccctcgcatcaggtgcgaagaggccgttcgagtacgggagaacgcatgtggtgaggcccaagggcacgcacaaggccaccattgtctggctccatggacttggggacaatggagccagctggtctcaactactggaaactcttccccttcctaatataaaatggatatgccccactgcaccttcaagacccgtgtcagtgtttggcgggttcccctccacagcatggtttgatgttgctgatctttctgaggatgctcctgatgacattgagggaatcgatgcctcagcagcacatgttgcgaatttgttgtcaactgaacctgctgacatcaaacttggtgttggcggctttagtatgggtgctgctactgctctgtactctgcaacttgctttgcccatggaaaatatgggaatggcaaaccattccctgtgaacctaagtcttgccgttggtcttagtggctggcttccatgtgccaggaccttgaagaacagaattgaagcctcaccagagtgtgcacaaaaggcttcatcaatacctcttttgctctgtcatggaaaagctgatgatgtagttgcctacaagcacggggagagatctgctggtgccttgaaggcaaatggcttttccaatgtgctcttcaaggcatacaatagtcttgggcactacactgttccagaggagatggatgaagtttgcaaatggatcacagcaaatttggggcttggcactaagtcatcttgattggaatttgatgcgagaaagactcgcagggacggtgtccaaataataccggtatcttttccaggaggtatatggtttaatagcaaatttgggcttgggtatacggccatgttctagcttttcttaacgcagacgtgtctgcgaatgatgtatgcttataatatctatattttggtctacgtcgatttggttgtggcacggataatgtttgtttcaaatattctgctctgcgaattggaattgtgatgttttgctttc

SEQ ID NO: 110310 - DNA, 1434 bp, Zea Mays
cccgcacaagtcacaacagaacaacctacccccacaagcagaaggatccgggcggccaccgagagtcactggaagaagctcgtccggcgccccgcgacgagacgacggcctcctcctccgctccgctgaagaacgacctccccgctgacagaggcggagcgctccgcagaggcgcagagagaggtggcgtctgccttgctgcgctgcgggtctgcggtctcctgcagattcccgcacccacaaggccagaggcgacccaccagcgccacccaaaaaaggcgcacccctttccgccgcccaaatctccctttaccccgatccccaagccccgccgctgctccctcgtacgcaccgttggcgggccttgtagcgaggagggggtgcggaggcgccgcgactgttcgcgggatgagcttcggcggcagcagctccctcgcatcaggtgcgaagaggccgttcgagtacgggagaacgcatgtggtgaggcccaagggcacgcacaaggccaccattgtctggctccatggacttggggacaatggagccagctggtctcaactactggaaactcttccccttcctaatataaaatggatatgccccactgcaccttcaagacccgtgtcagtgtttggcgggttcccctccacagcatggtttgatgttgctgatctttctgaggatgctcctgatgacattgagggaatcgatgcctcagcagcacatgttgcgaatttgttgtcaactgaacctgctgacatcaaacttggtgttggcggctttagtatgggtgctgctactgctctgtactctgcaacttgctttgcccatggaaaatatgggaatggcaaaccattccctgtgaacctaagtcttgccgttggtcttagtggctggcttccatgtgccaggaccttgaagaacagaattgaagcctcaccagagtgtgcacaaaaggcttcatcaatacctcttttgctctgtcatggaaaagctgatgatgtagttgcctacaagcacggggagagatctgctggtgccttgaaggcaaatggcttttccaatgtgctcttcaaggcatacaatagtcttgggcactacactgttccagaggagatggatgaagtttgcaaatggatcacagcaaatttggggcttggcactaagtcatcttgattggaatttgatgcgagaaagactcgcagggacggtgtccaaataataccggtatcttttccaggaggtatatggtttaatagcaaatttgggcttgggtatacggccatgttctagcttttcttaacgcagacgtgtctgcgaatgatgtatgcttataatatctatattttggtctacgtcgatttggttgtggcacggataatgtttgtttcaaatattctgctctgcgaattggaattgtgatgttttgctttc

SEQ ID NO: 110311 - DNA, 1516 bp, Zea Mays
cccgcacaagtcacaacagaacaacctacccccacaagcagaaggatccgggcggccaccgagagtcactggaagaagctcgtccggcgccccgcgacgagacgacggcctcctcctccgctccgctgaagaacgacctccccgctgacagaggcggagcgctccgcagaggcgcagagagaggtggcgtctgccttgctgcgctgcgggtctgcggtctcctgcagattcccgcacccacaaggccagaggcgacccaccagcgccacccaaaaaaggcgcacccctttccgccgcccaaatctccctttaccccgatccccaagccccgccgctgctccctcgtacgcacgtacgcaccgcgtcgccctttatctgctcccgagggccgctggtcggctgctgaatcgtcgccgttgttgctgggactgcagcgttggcgggccttgtagcgaggagggggtgcggaggcgccgcgactgttcgcgggatgagcttcggcggcagcagctccctcgcatcaggtgcgaagaggccgttcgagtacgggagaacgcatgtggtgaggcccaagggcacgcacaaggccaccattgtctggctccatggacttggggacaatggagccagctggtctcaactactggaaactcttccccttcctaatataaaatggatatgccccactgcaccttcaagacccgtgtcagtgtttggcgggttcccctccacagcatggtttgatgttgctgatctttctgaggatgctcctgatgacattgagggaatcgatgcctcagcagcacatgttgcgaatttgttgtcaactgaacctgctgacatcaaacttggtgttggcggctttagtatgggtgctgctactgctctgtactctgcaacttgctttgcccatggaaaatatgggaatggcaaaccattccctgtgaacctaagtcttgccgttggtcttagtggctggcttccatgtgccaggaccttgaagaacagaattgaagcctcaccagagtgtgcacaaaaggcttcatcaatacctcttttgctctgtcatggaaaagctgatgatgtagttgcctacaagcacggggagagatctgctggtgccttgaaggcaaatggcttttccaatgtgctcttcaaggcatacaatagtcttgggcactacactgttccagaggagatggatgaagtttgcaaatggatcacagcaaatttggggcttggcactaagtcatcttgattggaatttgatgcgagaaagactcgcagggacggtgtccaaataataccggtatcttttccaggaggtatatggtttaatagcaaatttgggcttgggtatacggccatgttctagcttttcttaacgcagacgtgtctgcgaatgatgtatgcttataatatctatattttggtctacgtcgatttggttgtggcacggataatgtttgtttcaaatattctgctctgcgaattggaattgtgatgttttgctttc

SEQ ID NO: 110312 - DNA, 1701 bp, Zea Mays
cccgcacaagtcacaacagaacaacctacccccacaagcagaaggatccgggcggccaccgagagtcactggaagaagctcgtccggcgccccgcgacgagacgacggcctcctcctccgctccgctgaagaacgacctccccgctgacaggttcgcgaatcgcaatctccttccctccttccctctctcttctcccccaaggccccaactgggtcgaccgcttttccgaacccgtgcggccagttactgttcccatcttattcttttggtgcgtgcctggctgcctgcctgccaccgccatcaccaccacgcgcggctcatgtggcgtggcgcagaggcggagcgctccgcagaggcgcagagagaggtggcgtctgccttgctgcgctgcgggtctgcggtctcctgcagattcccgcacccacaaggccagaggcgacccaccagcgccacccaaaaaaggcgcacccctttccgccgcccaaatctccctttaccccgatccccaagccccgccgctgctccctcgtacgcacgtacgcaccgcgtcgccctttatctgctcccgagggccgctggtcggctgctgaatcgtcgccgttgttgctgggactgcagcgttggcgggccttgtagcgaggagggggtgcggaggcgccgcgactgttcgcgggatgagcttcggcggcagcagctccctcgcatcaggtgcgaagaggccgttcgagtacgggagaacgcatgtggtgaggcccaagggcacgcacaaggccaccattgtctggctccatggacttggggacaatggagccagctggtctcaactactggaaactcttccccttcctaatataaaatggatatgccccactgcaccttcaagacccgtgtcagtgtttggcgggttcccctccacagcatggtttgatgttgctgatctttctgaggatgctcctgatgacattgagggaatcgatgcctcagcagcacatgttgcgaatttgttgtcaactgaacctgctgacatcaaacttggtgttggcggctttagtatgggtgctgctactgctctgtactctgcaacttgctttgcccatggaaaatatgggaatggcaaaccattccctgtgaacctaagtcttgccgttggtcttagtggctggcttccatgtgccaggaccttgaagaacagaattgaagcctcaccagagtgtgcacaaaaggcttcatcaatacctcttttgctctgtcatggaaaagctgatgatgtagttgcctacaagcacggggagagatctgctggtgccttgaaggcaaatggcttttccaatgtgctcttcaaggcatacaatagtcttgggcactacactgttccagaggagatggatgaagtttgcaaatggatcacagcaaatttggggcttggcactaagtcatcttgattggaatttgatgcgagaaagactcgcagggacggtgtccaaataataccggtatcttttccaggaggtatatggtttaatagcaaatttgggcttgggtatacggccatgttctagcttttcttaacgcagacgtgtctgcgaatgatgtatgcttataatatctatattttggtctacgtcgatttggttgtggcacggataatgtttgtttcaaatattctgctctgcgaattggaattgtgatgttttgctttc

SEQ ID NO: 110313 - DNA, 2264 bp, Zea Mays
actggaaactcttgcaaacttcatcgctcgattccagttcttcagccatgctctttttttttcccctttccctttcaatacgctttgtacgtcccatctatacttgctgcttgggtttactctcgtgcagtgcagctagcagctagcagcttgagccttgaggacacacttagccaggcagtttccaactagcccttgtggggggtccaatgatgcaatgattctggcctgtaatcatccatgcaagtggagaaaaaggtgaatcaaaccctgttagatccttgggaatagttatatacatagcaatagatactctcctgcagtgtaaagctggcttacgcggctttaaacatttttaaacctgctatccacacgaccacacattagctcatctcatggcagccacagtcgtcccgtccaccccctcccctgcttatatagcaacacagaggagttagctgcctgggaggcagagacgaaagcctactagcttccctttgggtcggtctcgcgctcccgctgcgcgtctgtctgtctgtctgtcttggagcctcatcaatggctaccatcagagaggagtccgactacgacagcagccggtcctcgctgacggcgccgggcggctcccgccggagctggatcagcgacattggcagcgccagctcggtctcggcgcgctccgtggcggggcgaggctgggacgcgccggcgtgccgccaccgccacaagcctcacaaggcgaaccaggccgagtgggaggccatcgggcgcgtccgcgccgccgcgggccgcgtcggcctggagcacttccgcctggtgcggcgcctgggcagcggcgacctcgggaacgtctacctctgccagctgcgcgagccctggtccaccacggggtgcctgtacgccatgaaggtggtggacaaggacgcgctggcgttccgcaagaagctgcggcgcgcggaggtggagcgcgagatcctccgcgcgctcgaccaccccttcctccccacattgtacgccgacttcgaggcgtcgcactacgcctgcctcgtcatggagttctgccccggcggggacttgcatgttgcccgccagcggcagcccggcaggcgattcagcatctcctcagcgaggttctatgtggccgagacggtgctagccctggagtacctgcacatgatgggggtggtgtacagggacctgaagccggagaacgtgctggtgcgcggcgacggccacatcatgctctcggacttcgacctctccctcaagtgcgacgtcgtcccgaggctgctccgtcacaacagcctcccggcgcagaatggcagcagcgccggtggcgggcgagcggacagcgggaagccgtcctgcgtgccgccgatccagccggtgctgtcgtgcctgttcaacggcgtgcacaagtgccatcaggcgaaggagggcgcggcggcggcggcgagggacggcggcgaggcggacgacagcaccgagccctgcgacaggaacccggagctggtggtggagcccgtgtcggcgcggtccaggtcgttcgtgggcacgcacgagtacctggcgccggaggtgatctccgggcagggccacggcagcgccgtcgactggtggaccctgggggtgttcatgtacgagatggtgtacgggcggacgccgttcaagggcgcggacaacgagaagacgctggtcaacatcatcaagcagccgctggccttcccgcgggtcgtggcggccagcggtagggagtgggacgagcacctgcgcgcgcaggacctcatgacccagctcctggccaagaaccccaagaagcggctgggcggctgcacggggtcggcggaggtgaagcggcacgacttcttcaagggcgtcaactgggcgctcgtcaggtccgtccggcctcccgaggtgcccaagccgccggtggtgccggcgccggcgccggcgctggcgccgcagaagaaggtgctgatgatgagcaggaaggagcggcaggagccgtacaactacaacccccgccccgacgacgaacgcttcgagtacttctaggccgtacgtcgatattggcgtagctagatctcggtcgtttgcgcgtacggcagcgtgtgtttggggtgacggaagtgtacatagagtggtagcacgacgtacgtgcgtacgctccttgaagaccggagatcagtctcgctgcatgcatgctgtagagatcgtggctacgtatcttcagctggccaataaagaagctcgcatttgccgca

SEQ ID NO: 110314 - DNA, 903 bp, Zea Mays
tgcttatatagcaacacagaggagttagctgcctgggaggcagagacgaaagcctactagcttccctttgggtcggtctcgcgctcccgctgcgcgtctgtctgtctgtctgtcttggagcctcatcaatggctaccatcagagaggagtccgactacgacagcagccggtcctcgctgacggcgccgggcggctcccgccggagctggatcagcgacattggcagcgccagctcggtctcggcgcgctccgtggcggggcgaggctgggacgcgccggcgtgccgccaccgccacaagcctcacaaggcgaaccaggccgagtgggaggccatcgggcgcgtccgcgccgccgcgggccgcgtcggcctggagcacttccgcctggtgcggcgcctgggcagcggcgacctcgggaacgtctacctctgccagctgcgcgagccctggtccaccacggggtgcctgtacgccatgaaggtggtggacaaggacgcgctggcgttccgcaagaagctgcggcgcgcggaggtggagcgcgagatcctccgcgcgctcgaccaccccttcctccccacattgtacgccgacttcgaggcgtcgcactacgcctgcctcgtcatggagttctgccccggcggggacttgcatgttgcccgccagcggcagcccggcaggcgattcagcatctcctcagcgaggtactgtactgtactgtactgtactgtggattttttttttcttcccaaactctcgcatggctgcatgagtttttttttttgtttgggttctcgtcacatctgaaactggggcttggtaagcagagctctgtttcggggtcaagctttgtttatttcagtgtcacttttgtaaaagcatggcactttaggctagtgatcctctt

SEQ ID NO: 110315 - DNA, 1421 bp, Zea Mays
cgggcatcggtgccatagctttcagcaggctctttttgtctcgccgtgccaatctttccaagcatatctgttggaaccactagggctttagctaagctgacgatctgagctgcgcgtatagcgacatgtatatgccggctggctggctggctgtatctgtatgcacaagctagcaggcgatgtttatcctctccagatcactgtcgaacgcaatgttttgtattaaagacgtgattatctttgtgaaaaaaaagaagataactcgaatgatacatacacggtggcaggttctatgtggccgagacggtgctagccctggagtacctgcacatgatgggggtggtgtacagggacctgaagccggagaacgtgctggtgcgcggcgacggccacatcatgctctcggacttcgacctctccctcaagtgcgacgtcgtcccgaggctgctccgtcacaacagcctcccggcgcagaatggcagcagcgccggtggcgggcgagcggacagcgggaagccgtcctgcgtgccgccgatccagccggtgctgtcgtgcctgttcaacggcgtgcacaagtgccatcaggcgaaggagggcgcggcggcggcggcgagggacggcggcgaggcggacgacagcaccgagccctgcgacaggaacccggagctggtggtggagcccgtgtcggcgcggtccaggtcgttcgtgggcacgcacgagtacctggcgccggaggtgatctccgggcagggccacggcagcgccgtcgactggtggaccctgggggtgttcatgtacgagatggtgtacgggcggacgccgttcaagggcgcggacaacgagaagacgctggtcaacatcatcaagcagccgctggccttcccgcgggtcgtggcggccagcggtagggagtgggacgagcacctgcgcgcgcaggacctcatgacccagctcctggccaagaaccccaagaagcggctgggcggctgcacggggtcggcggaggtgaagcggcacgacttcttcaagggcgtcaactgggcgctcgtcaggtccgtccggcctcccgaggtgcccaagccgccggtggtgccggcgccggcgccggcgctggcgccgcagaagaaggtgctgatgatgagcaggaaggagcggcaggagccgtacaactacaacccccgccccgacgacgaacgcttcgagtacttctaggccgtacgtcgatattggcgtagctagatctcggtcgtttgcgcgtacggcagcgtgtgtttggggtgacggaagtgtacatagagtggtagcacgacgtacgtgcgtacgctccttgaagaccggagatcagtctcgctgcatgcatgctgtagagatcgtggctacgtatcttcagctggccaataaagaagctcgcatttgccgca

SEQ ID NO: 110316 - DNA, 892 bp, Zea Mays
tcccaagtgtggtcctgacttcggccatctgtaaaacctccatcaaagcggacactagtgtggggaaaaaacccctgctgggccgtccgctcccgttcccatcagatcggatcgatcactcgacgagacatctcgcctcctccgccaatcggcatggcggcgctgctgctccgtagactcgccggaacccaccgcggccgcgtcccgctgggggccgccgccgccgccgcctgcggtggagcgacgctcttctacgcgtcgtcttcccccaccgttgcgcacttggaggagacgggcaaagccgctgagcaagttgcacttaaccctgataagtggctagagttcaagctccaagagaaggcaacagtcagtcacaactcacagttattcaggttttcatttgatccatcaactaaactgggacttgatgttgcctcgtgcctcatcacaagggcacctataggcgaggaagctgagggaagaaggaaatatgttattcgcccgtacacacctatctctgatccagactctaaaggatattttgacctactgatcaaggtttaccctgatggaaaaatgagtcagtattttgcaagtttgaagccaggagatgttgttgaagtcaaagggcccattgaaaagctcagatacaacccgaacatgaaaaaacaaattgggatgatcgctggtggttctggtataacaccaatgctgcaggttgtcagggctatcctcaaaaaccctaatgacaacactcaggtaagctatcacaacaaactccaaagttttttcgaaattggctctttttatgcatttcagccgcacttcagcgtctttctgagaaaacatagttttaccggcctgtttgggattgctccactccacgtttttt

SEQ ID NO: 110317 - DNA, 1429 bp, Zea Mays
cttcggccatctgtaaaacctccatcaaagcggacactagtgtggggaaaaaacccctgctgggccgtccgctcccgttcccatcagatcggatcgatcactcgacgagacatctcgcctcctccgccaatcggcatggcggcgctgctgctccgtagactcgccggaacccaccgcggccgcgtcccgctgggggccgccgccgccgccgcctgcggtggagcgacgctcttctacgcgtcgtcttcccccaccgttgcgcacttggaggagacgggcaaagccgctgagcaagttgcacttaaccctgataagtggctagagttcaagctccaagagaaggcaacagtcagtcacaactcacagttattcaggttttcatttgatccatcaactaaactgggacttgatgttgcctcgtgcctcatcacaagggcacctataggcgaggaagctgagggaagaaggaaatatgttattcgcccgtacacacctatctctgatccagactctaaaggatattttgacctactgatcaaggtttaccctgatggaaaaatgagtcagtattttgcaagtttgaagccaggagatgttgttgaagtcaaagggcccattgaaaagctcagatacaacccgaacatgaaaaaacaaattgggatgatcgctggtggttctggtataacaccaatgctgcaggttgtcagggctatcctcaaaaaccctaatgacaacactcaggtctccttaatttacgccaatgtgtcaccagatgatatattgctcaaaagagaactggatagacttgccagtagctatcctaacttcaaggtattttatacagttgataaaccgtcaactgactggaggggtggtgttggttttgtatcaaaggacatggttttgaaaggtttgccaggcccagcggaggactctctgattcttgtttgtggtccaccaggaatgatgaatcacatatctggagacaaggccaaggatagatcacagggcgagctctctggcgttctgaaagacttaggatacaccgcagagatggtatacaaattctgagaagacagtagtagactctgctgacgcacacacattcttgctgccctgcagtcaataaaccacacctgaactttttgttgttgctgctgcatctggctctgaactggaaaccgttttgacttgtttcctgatgtaataataattttcatccgagaattctaggtgtagcttcgggtgttctgcagatgccacgctgcgatgtttgcgaaaattctagtatgctggcacttgagataagagctatcgagttctactggatagctgcagcgaattatggtatgttggaagttggaacccagtcatttgtcgcaatctggcgcgtatgtgccgtggcatctaggaactcgttgccgtatgg

SEQ ID NO: 110318 - DNA, 748 bp, Zea Mays
tcttatctagcctgcaggtccataccattgtcctcctctctctctcactcaagtcgttgcacgccacaccatacacaaactgcagagggaggagcatcaagcatggcagggctgcagagatcgtcacagacattcaggaggtccggctcatcaggcttggtctgggacgagaggctcacgtcccaggacgacgaccagagcgggccagaggacgcggacgcagccacggatttaaaggagctgaggcactcccgcagcgttggctccgttgggctgcagccgcagccgcagccgcagccgcagcgccggcgcagcgacgacagcggccagggcttccgtactcggcgtgtggccccagccctggacccgccttcgcccaaggttcctggctgcatcttctgcggaattttcaggaaggcgggagcatcagagccaaaatctaaacccagaaggtactaactaagttgttttaccgtgtattggggagctaggatcagagaccgtcagttttccttgagcccgcagaagttcgtgtttttcgtgtatggaatggtagatgagatgtatatgtattgttgtaagtttggagtggacaaagcttttgtgtttcttcttcctgtgttgctgctttatggctctatccttgaccatcatgtacataataaagtttgcgtaactagcatactgcatacatgtaagttacaagtacatgaacatggtgctcttatttgtatgcttctacatggat

SEQ ID NO: 110319 - DNA, 754 bp, Zea Mays
taaaaataaattcatgatttttagatcaaatagagaattctagagtatttaaaatagcctaaactactggttctggatttttagaaaatagataataatcccaaaattgcccaaactttttatgtgagcttttcacattatttagaagccatgggtagagtttggtttgatttgaacattgtttgataactagaacccaaaacccctacccctgccctttgaattcctttaccgactccggaaaccctaagttctcggagttccgtgaaggaaagttgtattcaagacctagttaataaacctttattatctatgcactctcatgagcatgacatggcattcattcttatatatatacctatatggttatatttagaaaacgaagaagagagtgaagtgactcaagagaagacatcaccacctttggaatctcaggcagagacttggctctacttcgacatctgtgagtccgagcctgactcacctactaacaaaggcaagccccggtgcatgcaacccctttccttgtgttttaaaatacttttcgcacacttaagtctagtgaaatgcgcattaggttcataggaattgcttgaaaccctttgatgcattgctttccttgatatccatacctttatagatacttctgtgaagtatcaaaatatgatttacaaaaatgcttagccttgcttagatcttgtggttagaggttgtccttaatttaactcgagaaaggatggcttctacctgcaag

SEQ ID NO: 110320 - DNA, 101 bp, Zea Mays
cattgaccataaaggcttgctaaaattcaagcatactgagattgtagattcaatatgttgccatttatatagtcataatttataacttttggtttcgagaa

SEQ ID NO: 110321 - DNA, 552 bp, Zea Mays
gtatgtctgacagctgcacttatctttttctacagtactcctatattggtgtaaatagaaagcctggaagctatggcttctatgatacagacttgagatgagctaacagaaaagtatctgaacgtggcagaggattagaaagaatggaatttccactaatgaaataaagctacgtattagttagtggtttccaggtgttggattggcatggttgccggagcgacgggcgggcacgtatgcattttgtggcgtttctttttccgataacaaaaatatttattttctcatcttttttgttcgaaattcagaaattaaatgcttaatgacctatccagggaaaaatgaaatggctagcattaaatcttccgtgagtttcttatggtattgcctcaatcaactcccaaaaatcatcctaaatcaaaatcttgacattttgtggcgtttctttttccgataacaaaaatgtttattttctcatcttttttgttcgaaattcagaaattaaatgcttaatgacctatccagggaaaaatgaaatggctagcattaaat

SEQ ID NO: 110322 - DNA, 1247 bp, Zea Mays
ccccgcccacctcttccgtcctcccgttcccgtcccgcacacagactctttctctctcctcccctctctcgtcctctctctctcgtccgatctgcatctgcttttctcccccttgtctgtctctctcctgtccgtggcgtgcgcaaagatttgattttttttttctcggggaggagccggagtccgagcaggagtggcggcgggagggaggagatcctgatctgttgtcgcagcggggaggggaggaccggaggaggaagatggctgcgcaggagcaggagcaggagcaggagaagcagcaggcgaagacgagcaccacgagctcgctcccctccagcagcgagcgctcctccagctccgctcgcaacaacctcacggaaggaggggcggagagcgacgaggagatacggcgggtgccggagatgggcggcgcgtcggcgtcggcctcgtcgggcgccggcgcggacgagcgtcccaagggggaggacggcaagcaggggcaggtggcggcgggggcgcagcctccggcgggcgggaagaagcgcgggcgcacggcgggggacaaggagcagaaccggctgaagcggctgctgcggaaccgcgtgtccgcgcagcaggcgcgggagcggaagaaggcgtacctgacggagctggaggcgaaggccaagggcctggagctccgcaatgcggagctggagcagcgggtgtccacgctccagaacgagaacaacacgctccgccagattctgaagaacacgacggcgcacgcgagcaagaggtccggcggcggcggcggcggtggcggcaagggcggagacggcggcaagaagcaccacctcgccaagagctagtgagaaacgagagagggagctggttcgtgccctgctcgcgctcgcctgatctgaccattgctggcgtgttgctgttcctgacgacgccttctctttttcttcttttctcctactgttacccgtgggtttcgtctcttgcctcgctgatgcactgttttaactgttagccatcccgtctactcaccagtgaacactgctgctagttaatttctcggtggtttagggtgccgtgccagaacgccgtgtaacttcgttcttgtactgtcttgtagttcagccttgcggtttggcaattcgattcaagattactgtacgctgccagctcttggagagaaaaaaagaagttttcggtgcatgtaaataaccatgcgcgggaaagaaaaacgtgataacaat

SEQ ID NO: 110323 - DNA, 3691 bp, Zea Mays
cagtcgggacactcaccaccagctaacgcgcactcgcgtcggaatgcgtgctgcgtgaagagaggcgagacgggctgcggggaggaggcggatagcggcggcgtcggcatggaggcgaaccgggggatggtggctggctcccgcggcggggtcgtaacgatccggcacgacggcgacggagccgctaagcagttgaagaatgtgaatgaacaaatatgtcaaatctgcggtgacacgctcgggctctcagcaacaggcgatatctttgttgcgtgcaacgaatgtgccttcccagtgtgtcgtccgtgctatgagtacgagcgtaaggaggggaatcagtgctgccctcaatgcaagactagatacaagaggcacaaaggaagccctcgagttcggggagatgaggaagaggatggagttgatgatttggacaacgaattcaactatacacaaggcaatgtccaagggcctcagtggcagctgcggggacaaggggaagatgttgacatctcttcgtcttctcgacatgaaccccatcacagaattccacgtctgacaactgggcagcagatgtctggagatatccctgatgcatctcctgatcgccattctattcgcagcccaacaccaagttatgttgatccaagcattccagtacctgtgaggattgtggacccctcgaaggatttgaattcttatggagttggaagtgttgactggaaagaaagagtcgagagctggaaagttagacaggacaaaaatatgatacaggtgactcataaatatccagctgaagggaaaggggacattgaagggactggctcaaatggtgaagatctgcaaatggctgacgatgcacggctacctctaagtcgcatagttccgatatctccaaacgagcttaacctttatcggatcgtgattgttctccggcttatcatcctatgtttcttctttcaatatcgtataactcatccagtggaagatgcttatgggttgtggcttgtatctgttatttgtgaagtttggtttgccttgtcttggcttctagatcagttcccaaagtggtatcctatcaaccgtgaaacttacctcgatagacttgcattgagatatgatagggagggtgagccatcccagttggctccaatcgatgtctttgttagtacagtggatccacttaaggaacctcctctaattactggcaacactgtcctgtccattcttgctgtggattaccctgttgacaaagtatcatgttatgtttctgatgacggttcagctatgttgacttttgaagcgctatctgaaaccgcagagtttgcaaggaaatgggttcccttttgcaagaaacacaatattgaacctagggctccagagttttactttgctcaaaagatagattacctaaaggacaaaatacaaccttcttttgtgaaagaaaggcgggctatgaagagggagtatgaagagttcaaagtacggatcaatgcccttgttgcaaaagcgcaaaaaatacctgaggagggctggaccatggctgatggcactccttggcctgggaataaccctagagatcatccaggaatgatccaagtattcttgggccacagtggtgggcttgacacggatgggaatgagttgccacggcttgtttatgtttctcgtgaaaagaggccaggcttccagcaccacaagaaggctggtgccatgaatgctttgattcgcgtatcagctgtcctgacgaatggtgcttatcttcttaatgtggattgtgatcactacttcaatagcagcaaagctcttagagaggctatgtgtttcatgatggatccagcactaggaaggaaaacttgctatgttcagtttccacaaagatttgatggtatagacttgcatgatcgatatgcaaaccggaacattgtcttctttgatattaatatgaagggtctagatggcattcaaggacctgtttatgtgggaacaggatgctgtttcaataggcaggccttgtatggctatgatcctgtattgacagaagctgatttggagcctaacattatcattaaaagttgctgtggcggaagaaaaaagaaggacaagagctatattgattccaaaaaccgtgatatgaagagaacagaatcttcggctcccatcttcaacatggaagatatagaagagggatttgaaggttacgaggatgaaaggtcactgcttatgtctcagaagagcttggagaaacgctttggccagtctccaatttttattgcatccacctttatgactcaaggtggcatacccccttcaacaaacccaggttccctgctaaaggaagctatacatgtcattagttgtggatatgaggataaaacagaatgggggaaagagatcggatggatatatggctctgttactgaagatattttaactggtttcaagatgcatgcaagaggttggatatccatctactgcatgccacttcggccttgcttcaagggttctgctccaattaatctttctgatcgtctcaaccaagtgttacgctgggctcttggttcagttgaaattctacttagcagacactgtcctatctggtatggttacaatggaaggctaaagcttctggagagactggcatacatcaacaccattgtttatccaattacatctatcccactagtagcatactgcgtccttcctgctatctgtttactcaccaacaaatttattattcctgcgattagcaattatgctggggcgttcttcatcctgctttttgcttccatcttcgccactggtattttggagcttcgatggagtggtgttggcattgaggattggtggagaaatgagcagttttgggtcattggtggcacctctgcacatctctttgctgtgttccaaggtctcttaaaagtgctagcagggatcgacacaaacttcacggtcacatcaaaggcaaccgatgatgatggtgattttgctgagctgtatgtgttcaagtggacaactcttctgatcccccccaccactgtgcttgtgattaacctggttggtatagtggctggagtgtcgtatgctatcaacagtggctaccaatcatggggtccactattcgggaagctgttctttgcaatctgggtgatcctccacctctaccctttcctgaagggtctcatggggaagcagaaccgcacaccgaccatcgtcatcgtttggtccgtccttcttgcttccatattctcgctgctgtgggtgaagatcgaccccttcatatcccctacccagaaggctctttcccgtgggcagtgtggtgtaaactgctgaaatgatccgaactgcctgctgaataacattgctccggcacaatcatgatctaccccttcgtgtaaataccagaggttaggcaagacttttcttggtaggtggcgaagatgtgtcgtttaagttcactctactgcatttggggtgggcagcatgaaactttgtcaacttatgtcgtgctacttatttgtagctaagtagcagtaagtagtgcctgtttcatgttgactgtcgtgactacctgttcaccgtgggctctggactgtcgtgatgtaacctgtatgttggaacttcaagtactgattgagctgtttggtcaatgacattgagggattctctctcttgaaatttatatatgtatttc

SEQ ID NO: 110324 - DNA, 847 bp, Zea Mays
cgcgcactcgcgtcggaatgcgtgctgcgtgaagagaggcgagacgggctgcggggaggaggcggatagcggcggcgtcggcatggaggcgaaccgggggatggtggctggctcccgcggcggggtcgtaacgatccggcacgacggcgacggagccgcggctaagcagttgaagaatgtgaatgaacaaatatgtcaaatctgcggtgacacgctcgggctctcagcaacaggcgatatctttgttgcgtgcaacgaatgtgccttcccagtgtgtcgtccgtgctatgagtacgagcgtaaggaggggaatcagtgctgccctcaatgcaagactagatacaagaggcacaaaggaagccctcgagttcggggagatgaggaagaggatggagttgatgatttggacaacgaattcaactatacacaaggcaatgtccaagggcctcagtggcagctgcggggacaaggggaagatgttgacatctcttcgtcttctcgacatgaaccccatcacagaattccacgtctgacaactgggcagcagatgtctggagatatccctgatgcatctcctgatcgccattctattcgcagcccaacaccaagttatgttgatccaagcattccaggtgtgctatcgtgttatgtatatttgtgttggtaatcagttcccctgcagattcactagaatgcaatcatttgttccatgatatcagtacctgtgaggattgtggacccctcgaaggatttgaattcttatggagttggaagtgttgactggaaagaaagagtcgagagctggaaagttagacaggacaaaaatatgatacaggtgactcataaa

SEQ ID NO: 110325 - DNA, 3611 bp, Zea Mays
atggaggcgaaccgggggatggtggctggctcccgcggcggggtcgtaacgatccggcacgacggcgacggagccgcggctaagcagttgaagaatgtgaatgaacaaatatgtcaaatctgcggtgacacgctcgggctctcagcaacaggcgatatctttgttgcgtgcaacgaatgtgccttcccagtgtgtcgtccgtgctatgagtacgagcgtaaggaggggaatcagtgctgccctcaatgcaagactagatacaagaggcacaaaggaagccctcgagttcggggagatgaggaagaggatggagttgatgatttggacaacgaattcaactatacacaaggcaatgtccaagggcctcagtggcagctgcggggacaaggggaagatgttgacatctcttcgtcttctcgacatgaaccccatcacagaattccacgtctgacaactgggcagcagatgtctggagatatccctgatgcatctcctgatcgccattctattcgcagcccaacaccaagttatgttgatccaagcattccagtacctgtgaggattgtggacccctcgaaggatttgaattcttatggagttggaagtgttgactggaaagaaagagtcgagagctggaaagttagacaggacaaaaatatgatacaggtgactcataaatatccagctgaagggaaaggggacattgaagggactggctcaaatggtgaagatctgcaaatggctgacgatgcacggctacctctaagtcgcatagttccgatatctccaaacgagcttaacctttatcggatcgtgattgttctccggcttatcatcctatgtttcttctttcaatatcgtataactcatccagtggaagatgcttatgggttgtggcttgtatctgttatttgtgaagtttggtttgccttgtcttggcttctagatcagttcccaaagtggtatcctatcaaccgtgaaacttacctcgatagacttgcattgagatatgatagggagggtgagccatcccagttggctccaatcgatgtctttgttagtacagtggatccacttaaggaacctcctctaattactggcaacactgtcctgtccattcttgctgtggattaccctgttgacaaagtatcatgttatgtttctgatgacggttcagctatgttgacttttgaagcgctatctgaaaccgcagagtttgcaaggaaatgggttcccttttgcaagaaacacaatattgaacctagggctccagagttttactttgctcaaaagatagattacctaaaggacaaaatacaaccttcttttgtgaaagaaaggcgggctatgaagagggagtatgaagagttcaaagtacggatcaatgcccttgttgcaaaagcgcaaaaaatacctgaggagggctggaccatggctgatggcactccttggcctgggaataaccctagagatcatccaggaatgatccaagtattcttgggccacagtggtgggcttgacacggatgggaatgagttgccacggcttgtttatgtttctcgtgaaaagaggccaggcttccagcaccacaagaaggctggtgccatgaatgctttgattcgcgtatcagctgtcctgacgaatggtgcttatcttcttaatgtggattgtgatcactacttcaatagcagcaaagctcttagagaggctatgtgtttcatgatggatccagcactaggaaggaaaacttgctatgttcagtttccacaaagatttgatggtatagacttgcatgatcgatatgcaaaccggaacattgtcttctttgatattaatatgaagggtctagatggcattcaaggacctgtttatgtgggaacaggatgctgtttcaataggcaggccttgtatggctatgatcctgtattgacagaagctgatttggagcctaacattatcattaaaagttgctgtggcggaagaaaaaagaaggacaagagctatattgattccaaaaaccgtgatatgaagagaacagaatcttcggctcccatcttcaacatggaagatatagaagagggatttgaaggttacgaggatgaaaggtcactgcttatgtctcagaagagcttggagaaacgctttggccagtctccaatttttattgcatccacctttatgactcaaggtggcatacccccttcaacaaacccaggttccctgctaaaggaagctatacatgtcattagttgtggatatgaggataaaacagaatgggggaaagagatcggatggatatatggctctgttactgaagatattttaactggtttcaagatgcatgcaagaggttggatatccatctactgcatgccacttcggccttgcttcaagggttctgctccaattaatctttctgatcgtctcaaccaagtgttacgctgggctcttggttcagttgaaattctacttagcagacactgtcctatctggtatggttacaatggaaggctaaagcttctggagagactggcatacatcaacaccattgtttatccaattacatctatcccactagtagcatactgcgtccttcctgctatctgtttactcaccaacaaatttattattcctgcgattagcaattatgctggggcgttcttcatcctgctttttgcttccatcttcgccactggtattttggagcttcgatggagtggtgttggcattgaggattggtggagaaatgagcagttttgggtcattggtggcacctctgcacatctctttgctgtgttccaaggtctcttaaaagtgctagcagggatcgacacaaacttcacggtcacatcaaaggcaaccgatgatgatggtgattttgctgagctgtatgtgttcaagtggacaactcttctgatcccccccaccactgtgcttgtgattaacctggttggtatagtggctggagtgtcgtatgctatcaacagtggctaccaatcatggggtccactattcgggaagctgttctttgcaatctgggtgatcctccacctctaccctttcctgaagggtctcatggggaagcagaaccgcacaccgaccatcgtcatcgtttggtccgtccttcttgcttccatattctcgctgctgtgggtgaagatcgaccccttcatatcccctacccagaaggctctttcccgtgggcagtgtggtgtaaactgctgaaatgatccgaactgcctgctgaataacattgctccggcacaatcatgatctaccccttcgtgtaaataccagaggttaggcaagacttttcttggtaggtggcgaagatgtgtcgtttaagttcactctactgcatttggggtgggcagcatgaaactttgtcaacttatgtcgtgctacttatttgtagctaagtagcagtaagtagtgcctgtttcatgttgactgtcgtgactacctgttcaccgtgggctctggactgtcgtgatgtaacctgtatgttggaacttcaagtactgattgagctgtttggtcaatgacattgagggattctctctcttgaaatttatatatgtatttctaatattcatgccatgtcattattg

SEQ ID NO: 110326 - DNA, 1105 bp, Zea Mays
atgatacctagctacccaccctatataaacatatacaaccacattgaaccataccagcaatcaacattcaagccatggcactgttcaagtgcatgtgcatcttcttagtctcgcttctactcgccctcaccttcaccaatgcccaggaagaatcttcacatcggactctcccaccgttcccctgcatcccaggccagccacggcccccgcggttgccaccttgcccgccggcaccaaccgagtgctacacgtcgctgtcgggaatgatgccgtgcgcggacttcctcacccacaacgaggtgccaccgatgccacccacggtcgcctgttgtgatggtctcaggtcactcgtcaccaacgcgtccatctgtctatgccatatcgtcaacggtaacatcaacaagctcctaccggcgcccatgatacccgtgcgcatggtggcgctcccccgcttttgtgttgtccgcttcccacgagccatacttcgccggtgtatcagagggcatttgccaccgatgaaccctccgcctccaccagaggcatcaccgtcggaaccaccatctacttcgccagcagcatcaccgccggaatcaccaccaactccaccaacatcatcaccaccaactgcatcgccaccagagtcaccgccaactccaccaccaactgcatcgccaccagaatcgccgtcgacaccaccaccagagtccgtcgactacaccgtcgacaccagcagcagcaccaccgaaatcaccgtctgatcgaccaccagctacgccaccagaatcatcatctgatccaccgtcgacaccagcagctacaccaacggcgactcgatccccatcatcttaatcacgaaagatatttcaaaagcagtagtagtttagtcaaattagatatgcgttttaggattctagttgatatgcgtccattattttgttcacatcgaatgcagtagtgtgttagctatgtagttgcatacctatcataactaagtctattagaagtatctctaataatatttaggatctgtcatcaataaaatgtatgcaacaaaacgactattgtattattttgtctactcaacatgcatgttattacatagacg

SEQ ID NO: 110327 - DNA, 734 bp, Zea Mays
cgtccctgctctctcacttctctagccacggactccatggaacagcagtaggcgcccagctccttgcatcaagtgagcccggtggccaattccctctctcagccgagcgctcctctattcgctcgcgtaaagtcgcgcctctgcgctcccccagtcttcgcgcggcagctttgcgctgccggtgcccaagttcctgcgtgtccctccctctcggctccctgcttccatggctggattttcctgctcccttggctccctccgttcaagctcccatcagccgctcaacactgctccaccgtcgcacatgaccatgccaagctggccgcccctgctctactcgcccggctcgccgtggagcctcaccgtcgcagctccagctcggattgagtccaatttcttgcgccgcggtcgccctctctgctctccgcgcgtgcagttctctggcgcgcccttgtcttatccctgatcgctcgcgtggatggatgggttgctgcggtgctgtcttgctggatgagcactgagtcgattcgatccgtcagcttcgtatcggggaatctcggagtttgcgttaactgctcgtcgtcgagctcctctattgcgcgcgcgagattctcggctcgccacggcgtgtcgagtctcctcgtcgagtctcgccgcacgtcctgtttcctgctcgccagcgtgccctctcagctcgctcgcctctaaaatccctatctcgtcgtcaacctcgc

SEQ ID NO: 110328 - DNA, 1017 bp, Zea Mays
caagcccacgcatcatcactcacgcgcggggccgtccgaccgggcctctcctccctcgttttacccgcactcgccgcaacgccgagaagacgcgagaggaagggaggaggtgagccaccggaagcggagacgtgagcactcgaccaaccccgtcgatccggctgcggcgcggcgtgctagatcgctaccgaccatggtggtggaggagatcgccgagggggtgaagaacctaaccgtcaccggagatgcggcggcttcaggcggagaggggcagaggaggggcggcggcggcagcagcaaccgcatccaggtgtccaacaccaaaaaacccctcttcttctacgtcaacctcgccaagaggtatatgcaacagcacggcgatgtagagctatccgctcttgggatggccatagcaacagttgtgaccgtggcagaaattctgaagaacaatggatttgctgttgaaaagaaaattaggacctctactgttgaaataaacgacgaatcaagagggcgtccattccaaaaggccaagattgagataatcttgggaaagagcgacaaatttgatgagctgatggccgctgctgcagaagagaggggcgaagtggaagatggtgaagagcaggcttgaaaacagtaccgatgacaagctgctgctgctgtgctctgttagtgttgtttaatttagtttaataccgtgtgcatgagatatggcacgcgttcttgctcaactacatcaccatggcaatgtctgcaaatccatggattgatggatggatgttggttgtttcttaacattctggacatgttgttcatttgtttctttggctatgtatgttttagcagtccagcgttccccttacaaaatatggcgtgctttgttgactacacagaccgctgttcctttcctgaattattgtctgcaaagattagagataatcaatgggtaactaatacccaatggataaaaactctattagggctagtttggaaccttatttttctaagggctag

SEQ ID NO: 110329 - DNA, 767 bp, Zea Mays
acatacaatgatacaaaagctttccatttcaaatttctgcatcagtgtattgtttgaggcacactaaccaagctttattttgtttccagccatagcaacagttgtgaccgtggcagaaattctgaagaacaatggatttgctgttgaaaagagtgagacttcagggctttgttgtcttgtagattatgcctaatctatattattatatttgccgctctgaatcatccctttgtgtcttaaacctacatagaaattaggacctctactgttgaaataaacgacgaatcaagagggcgtccattccaaaaggccaaggtcagaaatactatacctttaattgagtgtacttaagctattcattgtgtttgtcagtttggtcattctatctttaactgtatgcaattcgtcttttactgagaattaaactgacatgaacctctccctcagattgagataatcttgggaaagagcgacaaatttgatgagctgatggccgctgctgcagaagagaggggcgaagtggaagatggtgaagagcaggcttgaaaacagtaccgatgacaagctgctgctgctgtgctctgttagtgttgtttaatttagtttaataccgtgtgcatgagatatggcacgcgttcttgctcaactacatcaccatggcaatgtctgcaaatccatggattgatggatggatgttggttgtttcttaacattctggacatgttgttcatttgtttctttggctatgtatgttttagcagtccagc

SEQ ID NO: 110330 - DNA, 354 bp, Zea Mays
atggcgtcgatgaggctaggcctagcgtcgcggggagccggggcgatgggggagatgctccaaggcaaggttggcggcaccgtggaaacgcctggcctcccgatgccaaggtttttcctgaccggaaaagatgtttctctggaggaaaggattgattcaaacctacaacccatagattgggatagtgttgcagagtttgatggccctgctcatgaactcgatttcaacatggtctgggatgatggaatagaagatcatgaaattgtagcagatgaagtgcaaggtaatggtgcagcatatggcatttatgtttcttcagaaacaatagtagatggtgttcaggttcctgtgtag

SEQ ID NO: 110331 - DNA, 1439 bp, Zea Mays
aaatttagcgtatggattagcgacacagggaaaacaccgggttccgggcgggaaaagcggctgccaaatcagccctgagtgggcccgcttccatttgggctgcttgaatcgtcggctaaggaggttgggccgagacatcccatcgccggttccgtcaagcccacgcatcatcactcgcgcgcggggccgtccgaccgggctctcctccctcgttttacccgcacccgccgcaacgccgagaagacgcgagagggagggaggaggtgagccaccggaagcggagacgtgagcagtcgaccaaccccgtcgatccggctgcggcccggcgtgctagatcgctaccgatcatggtggtggaggagatcgccgagggggtgaagaacctcaccgttaccggagacgcggcggcttcaggcggagaggggcagaggaggggcggcggcggcagcagcaaccgcatccaggtgtccaacaccaagaaacccctcttcttctacgtcaacctcgccaagaggtatatgcaacagcacgaagatgtagagctatccgctcttggaatggccatagcaacagttgtgaccgtggcagaaattctgaagaacaatggatttgctgttgaaaagaaaattaggacctctactgttgaaataaacgacgaatcaagagggcgtccattccaaaaggccaagattgagataatcttgggaaagagcgacaaatttgatgagctgatggccgctgctgcagaagagaggggcgaagtggaagatggtgaagagcaggcttgaaaacagtaccgatgacaagctgctgctgctgtgctctgttagtgttgtttaatttagtttaataccgtgtgcatgagatatggcacgcgttcttgctcaactacatcaccatggcaatgtctgcaaatccatggattgatggatggatgttggttgtttcttaacattctggacatgttgttcactttggctatgtatgttttagcagtccagcgttccccttacaaaatatggcgtgctttgttgactacacagaccgtagttcctttcctgaattattgtctgcaaagataagagatatcaatgggtaactaatacccgatgtataaaaactctattacggtatgggtatgaggaattttgatgcttacaggtatgttattgggtcattttatatacctaatggatatggtgggtgtgggcatcttcgataatgttgggttggatgaatctatcatgctggataaaaagttaatacactattctacaatcttccattattaataaggtttgggctttttatattttgtaaattttgtatttggttcttattattgtgataaaaataagcacgttagtcggtatggatactcgatggatatctgttatccatatgagtggcgtgtatgaagtaattttatacccattata

SEQ ID NO: 110332 - DNA, 691 bp, Zea Mays
caccaccagttcaccccctctcctctccgggagcttagacacctgtaggctagcgcattgttctcaaggtcagagcttcgccgaggaggcgaggacgatggcaatcgccgggcagtgctcctcctgctattatacgtcacccaccctgcagctccaccgacgtcacagccacctgccgcggcagccccaagccgcacgaagagcgcggcggccgaggttgcaggtggccgcagctgccgacagcgggcccatcagggcggccacggacgccgagttcttccagccttccgacaccaggccaatcatgctcttcgacggcgtctgcaacctctgcaacggcggcgtccgcttcgtgcgggagcacgaccccaacaggagcatcaggtacgtgccgctgcagagcgagtccgggaggaagctcctgcagaggtcagggaggtcccctgacgacatctccagcgttgttctcgtcgagaaagacaggtctttcatcaagtctgaagcggtgctgaggataatggagtacctcaacctgcccttcccgcagctcgccgtcttcctcaagttcgtccctctgttcctgagggacttcgcgtacgacaacgttgcgaacaacaggtacgccatgtttggccgcgccgaagcagaagcatgcgagatactgtaacaactggtgcccctgagatctcga

SEQ ID NO: 110333 - DNA, 102 bp, Zea Mays
acgagcaaaggggaggcgcggtccaacagagaagataaaaccagagagcggacctgtacgatgagggagaaggctccatcggcttctattgggataaggaag

SEQ ID NO: 110334 - DNA, 1347 bp, Zea Mays
atatcttagttgcacggttaggtaagacatatggacacaggcagttgcgtctctgtctcttatatacatatgctagttttgctatattgagttgacatgcccttagttgcgatttgcgaagctagctcccaccatctgcgacgccatgtcttcttcctctgtccaacaaacggcctttcccgagcaagaagccgatgcggaaggcgaaacgaaccctgagctctaccagcatttcgccaacttggtctcctccctgccgagctccaaaggcttgtccaacaacaaattctaccgccacggccaaggctggcactgcagcgaggtgggcatagtgggcgccatggtcaccgacgcgtgcttcagcgcgcgcccgtcggacgtcatcatcgccaccctgcccaagtccggcaccacgtggatgaagtcgctcctgtacgccaccgtgcaccggagagagcgtcccgtcgtcggcgccgccgccgccgaccagcatcctctcaacagctggggcccccacgacctcatcaagttcttcgagtaccagctctacacgcgggacagggtcccggacctggacaggctccccgaccctcgtctcttcgcgacgcacgtccctttcgtgtcgctgccgagctccgtggtcgccacgccgggctgcaagatcgtctacgtgtgccgcgaccccaaggaccacctcgtctccctgtgggacttcgtcaacaaatacttcagggtcaaggatgggctcgagcccctctccgtggaggccgccgccgagctgttctgcgccggcctgaccccgttcgggccgtactgggaccacgtgctcggctactggcgcgcgcaccgcgcggaccccgacaaggtgctcttcttcaggtacgaggagatgcagagggaccccgcggcgcacgtccgcaggctggcggagttcgtcggcctcccattcagctccgaggaggaggacggcggcgtggtggatgccgtcgtggggctgtgctcgttcgagcgcatgaggggcatggcgccgaccaagggtggcaggactgagttcccgatcggcgtggtgcccaacagctcctttttccggcagggcgtggtgggggactgggtgaaccacctgtcaccggaaatggcgcgccgcattgacgcgatcactgcagacaagttcaggggttcgggtctcgtcgtctagctggctgttacggatcaatcattactcatcatcagtgcgccactctaccgtggtttctcaaatgctcaataatgcaaggactacctattagtattatatatctatactattctattaataagaacttatatatgttgctatcgcggcttcaa

SEQ ID NO: 110335 - DNA, 1094 bp, Zea Mays
ccggctggattcatcgcccccgcgacgtgcgccatttctccagcacacacgcaccggacgcgcaaggaaaacaagtcacaaatggcacacccggggtcccattccatcccaagctcggatctcgctccccgttgctgcgcgccgcgtgcgtgacggtgcggcaccagcacaccactccgtcggcgtcgatccagccatataataatctcgctcgcccgatcggatcggcttcacttcccacgatttggcttccttttctaccccgcaggccgcggcgcgtagtcttctgctctctagctcaccatcaccgtcgtcatcaatcacggtgaccttgccctcgctgctcgactggaaccgtgcctcgctcagatctgccccgttccactccccgctgttggctgttgctctgctctcatcgtcttcggccgggaaaggacgctgctgctgctggtaggctgacagcgaggaggacgagacgagggggccatggctcagatcttgctccacggcacgctccacgccaccatcttcgaggccgagtcgctctccaacccgcaccgcgccactggcggcgcccccaagttcatccgcaagcttgtggaagggatcgaggacaccgtgggtgtcggcaagggcgccaccaagatatatgccaccgtcgatctcgagaaggcccgtgtcgggcggacccggatgatctccaacgagcccgtgaaccctcgttggtacgagtccttccacatctactgcgcgcacatggccgccgacgtcatcttcaccgtcaagatcgacaactccatcggggcctcgctcatcgggagggcctacttgcctgtccaggacctcctgggaggggaggagatcgacaagtggcttgaaatctgcgatgaaaatcgtgagcctgttggggacagcaagatccatgtgaagctccagtactttgacgtcggcaaggaccgtaactgggcgaggggtgtccggagcaccaagtaccctggtgtcccttacaccttcttctcgcagaggcaggggtgtaaggttactctgtaccaggacgctcatgtgccggacaactttgttcccaggatccagct

SEQ ID NO: 110336 - DNA, 1089 bp, Zea Mays
ccggctggattcatcgcccccgcgacgtgcgccatttctccagcacacacgcaccggacgcgcaaggaaaacaagtcacaaatggcacacccggggtcccattccatcccaagctcggatctcgctccccgttgctgcgcgccgcgtgcgtgacggtgcggcaccagcacaccactccgtcggcgtcgatccagccatataataatctcgctcgcccgatcggatcggcttcacttcccacgatttggcttccttttctaccccgcaggccgcggcgcgtagtcttctgctctctagctcaccatcaccgtcgtcatcaatcacggtgaccttgccctcgctgctcgactggaaccgatctgccccgttccactccccgctgttggctgttgctctgctctcatcgtcttcggccgggaaaggacgctgctgctgctggtaggctgacagcgaggaggacgagacgagggggccatggctcagatcttgctccacggcacgctccacgccaccatcttcgaggccgagtcgctctccaacccgcaccgcgccactggcggcgcccccaagttcatccgcaagcttgtggaagggatcgaggacaccgtgggtgtcggcaagggcgccaccaagatatatgccaccgtcgatctcgagaaggcccgtgtcgggcggacccggatgatctccaacgagcccgtgaaccctcgttggtacgagtccttccacatctactgcgcgcacatggccgccgacgtcatcttcaccgtcaagatcgacaactccatcggggcctcgctcatcgggagggcctacttgcctgtccaggacctcctgggaggggaggagatcgacaagtggcttgaaatctgcgatgaaaatcgtgagcctgttggggacagcaagatccatggcttccggatgtctctttggtacgagcacctgggaatgctggaagacgtcttccagcggcccgagagcgtagagtgtgtgcagaaggtgaacgaggtcgccgagaagtactgggacctgtactcgagcgacgacctggagcaggacctcccgggccacctcctcagctacccgatc

SEQ ID NO: 110337 - DNA, 3274 bp, Zea Mays
ccggctggattcatcgcccccgcgacgtgcgccatttctccagcacacacgcaccggacgcgcaaggaaaacaagtcacaaatggcacacccggggtcccattccatcccaagctcggatctcgctccccgttgctgcgcgccgcgtgcgtgacggtgcggcaccagcacaccactccgtcggcgtcgatccagccatataataatctcgctcgcccgatcggatcggcttcacttcccacgatttggcttccttttctaccccgcaggccgcggcgcgtagtcttctgctctctagctcaccatcaccgtcgtcatcaatcacggtgaccttgccctcgctgctcgactggaaccggacgctgctgctgctggtaggctgacagcgaggaggacgagacgagggggccatggctcagatcttgctccacggcacgctccacgccaccatcttcgaggccgagtcgctctccaacccgcaccgcgccactggcggcgcccccaagttcatccgcaagcttgtggaagggatcgaggacaccgtgggtgtcggcaagggcgccaccaagatatatgccaccgtcgatctcgagaaggcccgtgtcgggcggacccggatgatctccaacgagcccgtgaaccctcgttggtacgagtccttccacatctactgcgcgcacatggccgccgacgtcatcttcaccgtcaagatcgacaactccatcggggcctcgctcatcgggagggcctacttgcctgtccaggacctcctgggaggggaggagatcgacaagtggcttgaaatctgcgatgaaaatcgtgagcctgttggggacagcaagatccatgtgaagctccagtactttgacgtcggcaaggaccgtaactgggcgaggggtgtccggagcaccaagtaccctggtgtcccttacaccttcttctcgcagaggcaggggtgtaaggttactctgtaccaggacgctcatgtgccggacaactttgttcccaggatccagctcgctgatggcaagaactatgagccgcacaggtgctgggaggatatctttgatgctataagcaaggctcagcatttgatttacatcactggctggtccgtgtacacagagatcaccttggtcagggacaccaacaggccaaaacctggtggtgatgttactcttggggagttgctcaagaggaaggccagtgaaggtgtccgggtgcttatgctggtgtgggatgacaggacttctgtcggcctgcttaagaaggatggcttgatggctacccatgatgaggagactgcaaattacttccatggcacggatgtcaactgtgttctgtgccctcgcaaccctgatgattctggcagctttgtccaggatctgcagatatcaactatgttcacgcaccaccagaagatagtagtagtcgaccatgagatgccgaaccagggatcccagcaaaggaggatagtcagcttcattggtggcattgacctttgtgatggaagatatgatacccagtaccactccttgttcaggacgcttgacactgtccatcacgatgacttccaccagccgaactttgagggtggatcaatcaagaaaggtggcccaagggagccatggcatgatatccactcacggttggaagggccaatcgcttgggatgttctttacaactttgagcagagatggagaaagcagggtggtaaggacctccttgtgcgtctcagggatcttcctgacattatcatccccccttctcctgtgatgttcccggaggacagagagacatggaatgttcagctcttcagatccatcgatggtggtgctgcttttggcttccccgagactcccgaggaagctgcaagagctgggcttgtgagtggaaaggatcaaatcatcgaccggagtatccaggatgcatacgtaaacgccatacggagggcgaagaacttcatctacattgagaatcagtacttccttggaagttcatacggctggaagcccgaaggcatcaagccggaagaaatcggtgctcttcacttgattccgaaggagctctcgctgaagattgtcagcaagattgaagctggggagcggtttactgtttatgttgtggtgccaatgtggcctgagggtgttccagaaagcgcttctgttcaggcaatccttgactggcaaaggagaacgatggagatgatgtacactgacatcgcacaagctctcgaagccaacgggattgaagcaaaccccaaggactatctcactttcttctgcttaggtaaccgtgaggtaaagcaggagggagaatatgaaccagaggagcacccagaacctgacactgattacatccgggctcaagaggctaggaggtttatgatctatgttcataccaaaatgatgatagtggacgacgagtacatcatcattgggtccgccaacatcaaccagaggtccatggacggtgccagggactccgagatcgccatgggcgcgtaccagccgtaccacttggcgactaggcagcctgcccggggccagatccatggcttccggatgtctctttggtacgagcacctgggaatgctggaagacgtcttccagcggcccgagagcgtagagtgtgtgcagaaggtgaacgaggtcgccgagaagtactgggacctgtactcgagcgacgacctggagcaggacctcccgggccacctcctcagctacccgatcggtgtcactgccgacggcagcgttaccgagctgcccgggatggagaacttccccgacacccgcgcccgcgtcctcgggaacaagtcggattacctcccgcccatcctcaccacatagagtgcacactgcaggcagcgccatggctgctctcctctctggcctcaccttggtgtccctgtgtttgtgtttgggacactggaggttcagattgcagtgttgatattatatcccccctccgtccagagggattcgacgttattgagtcataataaaatgcattgtgcacggtgggagactgggaggataggaattatagttgtttattacagtacgactgcttactgcatccagattgtgttgtcccttgtctggtgtagcttctgttgcttgctgcgttgcagtgccggaagtgactccagatttcagaacttaaacatgattgcttgttcaagtgtgtgctgctaaatgtcaaactgtcgatgtcatgctacaacaacaatattgataatctctcatctttctataaagacctttaaacctggt

SEQ ID NO: 110338 - DNA, 1020 bp, Zea Mays
cgctttgctctaaccagtggtgcttaaccaaaggctctgctgctagtgcctcgctcagatctgccccgttccactccccgctgttggctgttgctctgctctcatcgtcttcggccgggaaaggacgctgctgctgctggtaggctgacagcgaggaggacgagacgagggggccatggctcagatcttgctccacggcacgctccacgccaccatcttcgaggccgagtcgctctccaacccgcaccgcgccactggcggcgcccccaagttcatccgcaagcttgtggaagggatcgaggacaccgtgggtgtcggcaagggcgccaccaagatatatgccaccgtcgatctcgagaaggcccgtgtcgggcggacccggatgatctccaacgagcccgtgaaccctcgttggtacgagtccttccacatctactgcgcgcacatggccgccgacgtcatcttcaccgtcaagatcgacaactccatcggggcctcgctcatcgggagggcctacttgcctgtccaggacctcctgggaggggaggagatcgacaagtggcttgaaatctgcgatgaaaatcgtgagcctgttggggacagcaagatccatgtgaagctccagtactttgacgtcggcaaggaccgtaactgggcgaggggtgtccggagcaccaagtaccctggtgtcccttacaccttcttctcgcagaggcaggggtgtaaggttactctgtaccaggacgctcatgtgccggacaactttgttcccaggatccagctcgctgatggcaagaactatgagccgcacaggtgctgggaggatatctttgatgctataagcaaggctcagcatttgatttacatcactggctggtccgtgtacacagagatcaccttggtcagggacaccaacaggccaaaacctggtggtgatgttactcttggggagttgctcaagaggaaggccagtgaaggtgtccgggtgcttatgctggtgtgggatgacaggacttctgt

SEQ ID NO: 110339 - DNA, 2077 bp, Zea Mays
cccctgcagtcactggagtagttcccttcgatcagtctattttaggctcgtctcgaagtatgcctgcctcgtgtctcaccggattcgtcttttgctctgctaacatgacatgttcgtctcgtttcgacagcttgtggaagggatcgaggacaccgtgggtgtcggcaagggcgccaccaagatatatgccaccgtcgatctcgagaaggcccgtgtcgggcggacccggatgatctccaacgagcccgtgaaccctcgttggtacgagtccttccacatctactgcgcgcacatggccgccgacgtcatcttcaccgtcaagatcgacaactccatcggggcctcgctcatcgggagggcctacttgcctgtccaggacctcctgggaggggaggagatcgacaagtggcttgaaatctgcgatgaaaatcgtgagcctgttggggacagcaagatccatgtgaagctccagtactttgacgtcggcaaggaccgtaactgggcgaggggtgtccggagcaccaagtaccctggtgtcccttacaccttcttctcgcagaggcaggggtgtaaggttactctgtaccaggacgctcatgtgccggacaactttgttcccaggatccagctcgctgatggcaagaactatgagccgcacaggtgctgggaggatatctttgatgctataagcaaggctcagcatttgatttacatcactggctggtccgtgtacacagagatcaccttggtcagggacaccaacaggccaaaacctggtggtgatgttactcttggggagttgctcaagaggaaggccagtgaaggtgtccgggtgcttatgctggtgtgggatgacaggacttctgtcggcctgcttaagaaggatggcttgatggctacccatgatgaggagactgcaaattacttccatggcacggatgtcaactgtgttctgtgccctcgcaaccctgatgattctggcagctttgtccaggatctgcagatatcaactatgttcacgcaccaccagaagatagtagtagtcgaccatgagatgccgaaccagggatcccagcaaaggaggatagtcagcttcattggtggcattgacctttgtgatggaagatatgatacccagtaccactccttgttcaggacgcttgacactgtccatcacgatgacttccaccagccgaactttgagggtggatcaatcaagaaaggtggcccaagggagccatggcatgatatccactcacggttggaagggccaatcgcttgggatgttctttacaactttgagcagagatggagaaagcagggtggtaaggacctccttgtgcgtctcagggatcttcctgacattatcatccccccttctcctgtgatgttcccggaggacagagagacatggaatgttcagctcttcagatccatcgatggtggtgctgcttttggcttccccgagactcccgaggaagctgcaagagctgggcttgtgagtggaaaggatcaaatcatcgaccggagtatccaggatgcatacgtaaacgccatacggagggcgaagaacttcatctacattgagaatcagtacttccttggaagttcatacggctggaagcccgaaggcatcaagccggaagaaatcggtgctcttcacttgattccgaaggagctctcgctgaagattgtcagcaagattgaagctggggagcggtttactgtttatgttgtggtgccaatgtggcctgagggtgttccagaaagcgcttctgttcaggcaatccttgactggcaaaggagaacgatggagatgatgtacactgacatcgcacaagctctcgaagccaacgggattgaagcaaaccccaaggactatctcactttcttctgcttaggtaaccgtgaggtaaagcaggagggagaatatgaaccagaggagcacccagaacctgacactgattacatccgggctcaagaggctaggaggtttatgatctatgttcataccaaaatgatgataggtaatctttgcccctcgtattgtgctatatttcatatttatgtttactaa

SEQ ID NO: 110340 - DNA, 1365 bp, Zea Mays
gcacgctacgccgcattcttcccccgtagccgcttccttcgcccacacgcccgcgcgctcggaatactccgcggagggtgctcgaggcgaaccaccgccccactcgccgccgccgctggtcatccctccacccaaccccgctcctcggggacctctcgtcgccggagccgccggcggcctcgagcgatagggatcgacagcgagcgcgcgagctcgtcccgcaacctgatctgcgaggaccaccgggtgggaggctgcgagatcgacgacgggttcggttcgattcggctggcacgagcaccagcctatctgagacggccatcggcggcggatagacctggcgcgcggcggaacgctgaggttatcttgtattctcgtcaagacaactgtcttccctcagagcactgaacaatcattgtgatttatgactacctctgagtggtgaaagaattaaaaaaatgcagaacaccgcgatggctgttagatgctcatgtactgctcttttccctctactcttctgttttatgatctgtcagctttgctatggcacagtaactgatatccaatgtctgaagaagctgaaggcatcagttgatcccgacaataagttagaatggacattcaataacaatacagagggatccatatgcgggttcaatggtgtggagtgctggcatcctaatgagaacatggtcctttcgcttcatcttggtagctttggtcttaagggcgaattccccgatggacttgagaattgtagtagcatgactttgctggatctctcaagcaacagcctctcaggacctatcccggctgacatctcgaggagagttccatttgttagaaaccttgatctgtcatttaatagcttcttgggagagataccagaagcactagccaattgttcttatctcaacattgtcaatttacaacataacaaattgactggaacaatcccagttcagcttgctgcaatcagtcgcctagcccagtttaatgttgctgacaatcaattgtcagggcagattccttcatctttgagcaagtttacagcctctgattttgcaaatcaagacctttgtgggaggcctctaagcaatgattgcactgccaattcaagcagtcgaacggggataattgttggttctgctgttggtggtgcagttataactttaataatagctgctgttattttattcattgtattgcaaccctcgcattctttataggaacattagttccaagtgcatattgcttgatgatgactatgagcctaagatttctgattttggcttggcaaggcttacgaagtttgctaattaattgtgttctaagttacggccgcgtactgttcatagagcaaat

SEQ ID NO: 110341 - DNA, 2616 bp, Zea Mays
gcagcgttcggtgacgaaaaaaaaaacccaatcgcctccgccccctcccctactccgggcgcagccgccgacgtcgccacgcgcattccgccgcgccaatcgggtacacgagcagggcgggggatgacgtcgtcggcgtccgcgccggcgtccaatggaccgcgctacgcgccgccggatccaacgctgcccaagccgtggagggggctcatcgacggcaacacggggtacctctacttctggaaccctgagaccaaggttacgcagtacgagcgccccgtcgcggccgtgcccaactccccgccgcagccgcctggctactccaggcccgaggagaggccgagaagcagcacaccttccgagcggagctcggaaaccacggtgagccgcccgcagtatgcacctctctcggataacagggcaaggaatgaccactcggagccacattatgcatctggagtgaacctttcacaaagtgctccttccactaatcaagtttctcaggctgccagtggaaaccaaatgtcgacagaagcatatcgtgctaagcatgagattaccatcatcggcaacgagtcacctgcaccattcatgacatttcagtccacatgcttcccatcagatattctaagggaggttctgcaagcaggattctctgcaccaactcctatccaagctcagtcatggccaattgctatgaagggtagggatatagtagctgtggcaaagacaggttcaggaaaaacactgggctatctcctcccagggtttattcttctgaagcgcctgcatcataattcaagggaaggtccaacagtattagttttgtccccaaccagggaattggcaacacaaattcaagatgaagcaatcaagtttggcagatcttcaagaatatcttctacttgcttatatggaggtgctccaaaaggtcctcagctaagggagttggagcgtggtgccgatgttgttgttgcaactcctgggagattgaacgacattttggaaatgaataaagtgagcctgcgccaagtatcatatcttgtccttgatgaagctgaccgtatgcttgatatgggatttgagccacaaataagaaaaattgtgaaacaaataccacctagacggcaaactcttatgtacactgccacatggccaaaagaggttagaaaaatagcgtcggatttactgaataacccagttcaagttaacattggaaacactgatcagctggttgcaaataaatcaattactcagcatgtggaagttatcccacatatggagaaatcaagacgacttgatcagatcttgcgttcacaagatcctggatcaaaaatcataatattttgctccaccaagaggatgtgtgatcagttggctagaaacctatcacggcagtatggtgcttctgctattcatggtgataaatcacaggctgagagggattctgtgttgaatgacttccgaagcggcaggtgtccagtactcgtagccactgatgtggccgctcgaggcttggacataaaggacatcaggatcgtggttaattatgatttcccaactggtgtggaggactatgtccatcgaattgggagaacaggtagggctggcgcaacaggatctgcctacacattctttggtgaccaggattcaaagtacgcttcagaacttgtgaagattttggagggtgcaaaccagtctgtgccaccacaattaaaagaaatggcccttcgtggaggatatggtggaagatcacgtcgatgggcatcttctgatgactcttatggtagtcagggatatggtgctaaaagatcaactgatagtttcaagaacagcagcttcggcaaccaggccgggggtggttcaagctttcactcgagcttccataacagctctagtggcaatcagttcggtgatactacaagctttcatgccagctatggtaacagcagccagaacaatcagacgggtgacaatccgagcttcccacccagctccagcaacaatcagtccggggatggtctcagttttcatgaaaggttctatggatcacgcggaagggacgagagcagatcaaacaatgatggattccgtgctaggagcagaagtcctggcaagcctgtggaagtttccaactggtgattgcatccactaggtgcaatccaatttttgcgatggtgacgaaaccaagtaaaagatggtacctcgacaagttatattttcctcttatcctgcttaaatctaaggatgtcctggaacatcactaacttaggatatgggtgatggtctgatcccaatggacaatggtctcctactttcttgatttgacgcctgagagacgcctgattccataccatatgcctgtggttgtagtttgtaaaatgttaaaaacttgactttgctagtatatttcctaatgctataacccaatcctgggtaaacagacgcatggggatgaattttggacggaaccatggacatttgatgtatgtgtttaatgttgtgtacaatctatgtcgaattctgttgtaagtgccgtccgcatcgttttatatctttgtgcccgttattacaggtcttaaagaatcatgctgcccgtatgtgactcttctcatg

SEQ ID NO: 110342 - DNA, 969 bp, Zea Mays
gcgcacacttcggcagttgagagaacaaacgaactggtgggtgggttggggggtcgtcgccgccggccggtggagttgctcgctcctgcctcttggatctgccgcccggtggtggctcgccgccaaggatggcgcgggcggagaagatacgctccggtagcacggcgttggcgacggcttcgacggagacgccaggcaggtcgacggaccaccggagggcgctctacttcgccgccttcctggtgctggccgacgccgcgctcgtcgccctcatcgtcgccttcgtcccgtataccaagatcgactgggacgcctacatgtcccaggtggacgcttttctggagggggagagggactacaccaagatcgagggagacacagggccattggtctacccggccggattcctctacgtctactccgccgttaagttccttacgggaggccgcgtcttccctgctcagattttgtttggcgtcttgtacattgtcaacttgagcctcactcttctgctttacgtcaagactgaagtgaaaattgttgagccctcgctagcggctgcgaccgtggggacggcggcctttgatctatcaagcacctagcatatcaagaggaggggagatgtgagacaacagacaagagcctagcaaatcaagagaggagctgggagacgaaccacggggaggcaggatgatggagagaaggcgagatggagaggggacgatcgtcttcttcatcggctcgtcgccgagaaacgaatggggtgacctagcgatgagattggggcgggcgtgtgggtctggatcggtggcggcgaggaagttgtctccgtgaaatgtccagcggaggttggaaagaccgcgaacagtattgggccgcacgttttgagtcccaaatatgccactctttagcttgagccctaaaacatttacatgaattttattaaaatgaggctcctgttggagctcc

SEQ ID NO: 110343 - DNA, 1758 bp, Zea Mays
gcgcacacttcggcagttgagagaacaaacgaactggtgggtgggttggggggtcgtcgccgccggccggtggagttgctcgctcctgcctcttggatctgccgcccggtggtggctcgccgccaaggatggcgcgggcggagaagatacgctccggtagcacggcgttggcgacggcttcgacggagacgccaggcaggtcgacggaccaccggagggcgctctacttcgccgccttcctggtgctggccgacgccgcgctcgtcgccctcatcgtcgccttcgtcccgtataccaagatcgactgggacgcctacatgtcccaggtggacgcttttctggagggggagagggactacaccaagatcgagggagacacagggccattggtctacccggccggattcctctacgtctactccgccgttaagttccttacgggaggccgcgtcttccctgctcagattttgtttggcgtcttgtacattgtcaacttgagcctcactcttctgctttacgtcaagactgaagtgcttccatggtgggctttaggtttgctttgtttgtccaagagggttcactccatctttgttctccgtcttttcaatgactgcttcgccatgacattgctccacgctgctatggttttgatcatttatcgcaagtggtaccttggtctagtagttttcagtggagctgtctcaattaagatgaatgtccttctttttgctccttctttgcttctacttatggtcaaggccatgagcatcaaaggagtcttctttgccttattgggagctgctgtcgtacaggttttgttgggtatgccattcttgctgtcacatccagttgagtacatctcaagagcattcaatctcggtcgcgtgtttatccatttctggtctgtgaactttaaattcgtcccagagaaggtgtttgtatcgaaagagcttgccattgcattgttgattcttcacctcaccacacttatgatatttgctcactacaagtggttaaagcatgaaggaggcctattcggtttcctgcattccagatttaaaaatgctaaatcaatcaagcagcttgtttccagccagcccagaccatccagtctcagcgcagaacatattgtaactgttatgtttgttggcaacttcattggcgttgtgtgtgcccgatcattgcactaccaattctattcctggtacttctattccttgccttttctattgtggaaaacacgttaccagacacctttgaggattattctatttctcgttgtggagtgctgctggaatgtttacccttccactgcctattcatcactccttttgctatttgtgcacttgtgcattttgtttggtatatggttttcacctgctgaatacccctatatcatcagtaaagggacaaaacggacataccaagaagttgcaaagctagacttccctgcaaaatagtgtaatctttgaaggtagcagtgaggatacaagtgtcaaaggcttctggaaattgtgaggtactttggtatgccaatactcttgggactagttggcccaaatttctcgagtagcatctagacatataccaaatatgtatgtccatgtgtaacttcttaacatagatgatagcgactctaactataagagtaactatggctgcggacttccccaggatcttgttttatcatcctttagacatgtctcagcagtcagcagccaaaagagatccatgcctcaccttataaggccttgtttg

SEQ ID NO: 110344 - DNA, 155 bp, Zea Mays
agccaatcaaaacaaaaggaacataatcatagattgtcgctcttacattacatcacgacgactaaaaccattagcattcttgtcagctcctatacacaagatatgcaagctgaaacacgaattggattgtataaagtctgaccttgtcagcagca

SEQ ID NO: 110345 - DNA, 1023 bp, Zea Mays
attccattccaagcaagcggtccaggtcggaaaaacttgctccatctcatcctcatcgcgtctcccagatcacctgaccccgtggttggttggtcctcgtcgcgattggttctttcttggtccgttcgctcacttctcgccctgtctttgcctgcggctgctgctgctctgggacaggtgggagaggaggcgccacacccagacgagaggcttcccgagtccaccgccagcacgagtccaccgccggcactttgactcggagccggagattcttgcgaggaactggcagggatctgctgcccatccgcatatcatgctgcaacagtagttcactcgtcggaggaaggcgcatcacacgaactaggtggaaggaaccggacggagcttggagagggcaagcgggcaaggggagtgagtagtggttctcggtgtcttctttaaccactctgtccgatccgctggtgtgtctgcgcgatcctgttgacgaatcaatcgccgggacggttaattaagcattccaatcctcagccatggccgtggacactactcaaccggagtactggctcaactggaggttcttgctgtgcgcgctctgggtctactcctgcatggccttggcattcttcctgattaagaagtacgagggggccagttcaccggacagcaatggcgatgacggtggagacagagaagaggcgttaccacgtgtcagacctggtgttgtttatcttgaagattgctggaagacatgccttgagggtatccaccctggctggctgctggcatttcgcgttgtggccttcttcgttttggcttcgctgctcgtggtcgacatcattactgatggatggagtatcttcctatactacactcagtggacgttcttgcttgtcaccttgtattttggggtatgtagtttgccaatggaactttggcttgcgttttgttttggttatttgtcacttttgttgttatacttaaccttgagtttcagtaactgacactgacatcacatctcactgc

SEQ ID NO: 110346 - DNA, 57 bp, Zea Mays
tggccttacccatttctagacttgacattccctggtgcacctgtatggattatataa

SEQ ID NO: 110347 - DNA, 2423 bp, Zea Mays
cgctttcgcgctgcgtccgcggtggcatcattgggtgtccggactccggactggacatggaccgtcggaaagacagggtccttcttggctgctgatttcgcgagcgctgccgctgccaccgccgcttcttcttcttcctcctccctgctgctgcggcggcggaattgtgcgttggagggctgtgggctggcgactggtctctgcccctccatcttctccggcttgttcgccgaattgaatctgcgggggttgcgttgcagcgatgcgggcgcgggagccccggatgtggatggggtggtgctgggtggcgctcgctgctctgctcgccttgatcctgccgccgtccaacgccacgctctcccctgccggcatcaactacgaagtggtggctctgatggccatcaagacggagctggaggacccctacaacgtgctcgacaactgggacatcaactccgtcgacccctgcagctggaggatggtcacgtgctcctccgacggctacgtctccgccttaggactgcctagccagagcttgtctgggaagttatcacccggcatcggtaacctcaccaggctgcaatctgtgctgttgcagaacaacgtgatttctggacctattcccagtacgataggaaggctggggatgctaaagactcttgacatgtcagataaccagctcacggggagtatcccaggctcgcttggaaatctgaagaacctcaattatttgaagttgaacaataatagcttgtctggagttctgcctgattcaattgccagcattgatggttttgctctcgtagatctttcgtttaacaatctcagtggcccattacccaagatttctgcaagaacctttatcatagctggaaatccaatgatttgtggtaataattctggagatagctgctcttctgtgtcacttgacccactctcttacccaccagatgatctgaaaactcagccacaacaaggtattggaaggagccatcatattgctacaatatgtggagcaactgttggttcagtggcttttgtcgctgttgtagttggtatgcttctttggtggcgtcataggcgaaatcagcagatcttttttgatgttaacgatcaatatgatccagaagtttgtttgggtcatctaaagcggtatgctttcaaggagctccgtgcagctactaataattttaactcaaagaacatcttaggtgaaggtggatatggcatagtatacaagggttatttgcgtgatggctccgttgttgctgttaaaaggctgaaggattataatgccgtcggtggggaagttcaattccaaactgaagttgaagtcataagcttggctgtgcatcgtaatctcctccgtcttattgggttctgcactacggagagcgagaggttacttgtttatccatatatgccaaatggaagtgttgcttctcaattgcgggaacatataaacggcaagccagctctagactggccaaggagaaagaggatagcgctaggcacggcacggggcctgctctaccttcacgagcaatgcgacccgaagataatccaccgggacgtaaaggcttccaacgtgcttctcgacgagtacttcgaagcgatcgtgggagacttcgggctggcgaaactcctggaccacagggagtcccacgtcacgaccgcggtgcgcgggaccgtcgggcacatcgcgccggagtacctgtcgacgggccagtcgtcggagaagaccgacgtgtttgggttcggggttctgttagtcgagctgatcactgggcagaaggcgctggatttcggaagggtggcgaaccagaagggtggagtgctcgactgggtgaagaaactccaccaagaaaagcagctaggcacgatggtggacaaggacctgggcagcagctacgacagggtggagctggaggagatggtccaggtgtccttgctgtgcacgcagtaccacccgtcccaccggcccaggatgtccgaggtgatcaggatgctggagggggacgggctcgcggagagatgggaggcgtcgcagaacgtggacacgccggagtccgtctcgtcggagctcctgctccagaagtacatggacttcgcagcggacgagtgctcgctcggcctggaagccatggagctctccggcccgaggtgaccgaccggctggttgaccggacccggcgggcatcgcacgggtcggcgtaggtgtttttgccgtatcaagccctatattgttgtgttgcgttggacacatagggaaggcgatggattgtatggtctatatagctgtggtggcattcatttgtacatacagcagcattgtgtgaggtgagcccatccttgttgcgcgtctacttggtggcaaagagatgaagatgaatgagtatatagagatagagatcaaagttccc

SEQ ID NO: 110348 - DNA, 1931 bp, Zea Mays
cttccctatttcagtactgattcacttgagttggcttctgttatagagatctttcgtttaacaatctcagtggcccattacccaagatttctgcaagaacctttatcatagctggaaatccaatgatttgtggtaataattctggagatagctgctcttctgtgtcacttgacccactctcttacccaccagatgatctgaaaactcagccacaacaaggtattggaaggagccatcatattgctacaatatgtggagcaactgttggttcagtggcttttgtcgctgttgtagttggtatgcttctttggtggcgtcataggcgaaatcagcagatcttttttgatgttaacgatcaatatgatccagaagtttgtttgggtcatctaaagcggtatgctttcaaggagctccgtgcagctactaataattttaactcaaagaacatcttaggtgaaggtggatatggcatagtatacaagggttatttgcgtgatggctccgttgttgctgttaaaaggctgaaggattataatgccgtcggtggggaagttcaattccaaactgaagttgaagtcataagcttggctgtgcatcgtaatctcctccgtcttattgggttctgcactacggagagcgagaggttacttgtttatccatatatgccaaatggaagtgttgcttctcaattgcgggaacatataaacggcaagccagctctagactggccaaggagaaagaggatagcgctaggcacggcacggggcctgctctaccttcacgagcaatgcgacccgaagataatccaccgggacgtaaaggcttccaacgtgcttctcgacgagtacttcgaagcgatcgtgggagacttcgggctggcgaaactcctggaccacagggagtcccacgtcacgaccgcggtgcgcgggaccgtcgggcacatcgcgccggagtacctgtcgacgggccagtcgtcggagaagaccgacgtgtttgggttcggggttctgttagtcgagctgatcactgggcagaaggcgctggatttcggaagggtggcgaaccagaagggtggagtgctcgactgggtgaagaaactccaccaagaaaagcagctaggcacgatggtggacaaggacctgggcagcagctacgacagggtggagctggaggagatggtccaggtgtccttgctgtgcacgcagtaccacccgtcccaccggcccaggatgtccgaggtgatcaggatgctggagggggacgggctcgcggagagatgggaggcgtcgcagaacgtggacacgccggagtccgtctcgtcggagctcctgctccagaagtacatggacttcgcagcggacgagtgctcgctcggcctggaagccatggagctctccggcccgaggtgaccgaccggctggttgaccggacccggcgggcatcgcacgggtcggcgtaggtgtttttgccgtatcaagccctatattgttgtgttgcgttggacacatagggaaggcgatggattgtatggtctatatagctgtggtggcattcatttgtacatacagcagcattgtgtgaggtgagcccatccttgttgcgcgtctacttggtggcaaagagatgaagatgaatgagtatatagagatagagatcaaagttcccagtgcggagcggttggtgcctgtttgtgttttctgctttgctgaaaggcaaggcgtgcgcagcgctgtctgacatgcgccactgcttgtaaaacagcggtccgttacgcattccggagaggatatggtagatacagacgtggtattaggggttcacagaatctgtttctgtgtgtttggttcatgactgtttttttactgtactgagaacttgctcgtttcaccgttgatccatatggatcgaatagtattaagtcggtttaaatc

SEQ ID NO: 110349 - DNA, 348 bp, Zea Mays
cggaggtaacataaataatctcccagacattaagacttttctttgtataaagtggctgtgggcacagaagattgatgaggaatgtcattgggctagacttcaagttcaggttccacgcaatgctcaggtcttatttaaagctgctgtgcagaccacagtgggcaatggtgcttccaccaagttccggtcagatagttggttccatggaaagacattagctgaatatgctcccaacctcattcagaaaattcctaagagcggtggaacaacgaacggtggttcaagcttggcataatagaagatgggtgtcggacatcaatgttcaagggggctctaacagtgcaggtt

SEQ ID NO: 110350 - DNA, 864 bp, Zea Mays
gctgatgatcagcttgattcgttcttcgggtacgaccacccggccaagcacgtgccacacgaggactttccggacatcgctctgcctgagatgaagtgcgccaaggcgagcaacgaggagaaagcgctgattgtgtccaccttgaaactcgaggagttctggaggagttcctgctactacctggaggaggatgctcccaagaaaaagaatgaagacaaagagattgaaagattttctgataggaaacgtaagacacaaagcaaacgtgaaggtcttgcgtcatatctcaaactagctccttcaaatttcccttctgaactggtgcaaggatctagaagagggcaagcaaccaacaagaaactccggtgggataaggagtcagatgagcaggcatttgaagcatttgagaagcttgaacaaaagcacaaggatggaagcaaggtggagaaggaaggtgatgacgaggatgagcaagaagaggaagtacaagaggaggaggaaaattcagacgatgactataatcaaaatatcgagtttgatgacgatgatgatgactggaaccaagaggatgaagcacaggaagacttctacgattaattatggatgagcatattttttctccttttttcctctccttttcacttgtgacttcacccagcaaaattattagagagcaatctttattctggtatttctagtcacgatggtcacgtgctttgttagaaactcaggaatatcagaacagtgaaagacgacgttgctaacttgcattactacgcatgacttcagacagccactaatatggagtgtgcttcctcgtcaaaacagagtgcacatcttgtcttttaaataattaaccaattt

SEQ ID NO: 110351 - DNA, 2343 bp, Zea Mays
tccatcgtcatcaattcggcatttcttccccctgctccctccccacagcctaccaaccaactataggtacgtctatagcacgcacacagcacggagagaagatagtcttgacctcggagtcggagacagctccacctccacctccatcatccgaccatcccccacgctacgcggctgtatttatagcgagcgtcctgaggcctctgttcccctgctcgctcctggggagggaagaagaggacaagcaggcactactacgccaatgcgcgagcgtgccgacagctccagaggaggaagaagaggtggtgggagtgggagtgggatacagacaacgggcgccgaccgcgacgacgccgccgccgccgctccctcctcctcgtgctcctgctacgaagcattaacaatccgaggtcgtcggtccgtccatggctgccgctcctcctccttgtagcagctgcagttgcagttgccgtatccgcggcaggaagcaggcgcccgcccgacgagccctcccaaccgtcgcctcccttgtcccctgcttcctgctgctcctcctcgtcgtcgcctcgtgccagcccgccctggtctccgcggcgcacggcggcggtggcggcggcggcaggaagcacgccgccgccgccgcgcgggcgcatgcgcatgcgcagcagacgctcttccgtgccgcgggggacgagcgcgaggaggcgtacaggagggtcatggctcgcatggccaggatggacagggactccaacatgacaatccagagccccgacggagacgtcatccgctgcgtgccgtcgcacctccagccggccttcgaccaccccgtgctcagaggccagaagcccgaggacgagcccgtggagaggcccatgccgccgaagcgcgtcggcggcgctgccgaggaggaggaggacgacgacgtgttcccgcaggcgtggagcgacggcggcaagcggtgcccggaggggacggtgccgatacggcggacgacggcgcgcgacgtgctgcgcgccagctccgcccggcggttcgggatgaaggcccgggccagccaccacgcccgccgcgactcgaccagcagcggccacgagcacgcggtggggtacgtgacgggggaccagttctacggcgccaaggccagcctgaacgtgtggtccgccaaggtggcgtcggcggcggagttcagcctctcccagatctgggtcatctccggctccttcggcaacgacctcaacaccgtcgaggccggatggcaggtgagccctgaactgtacggagatagcagccccaggttcttcacatattggacgaccgacgcataccaggagaccgggtgctacaacctgcactgctccggcttcgtccagacgaacaaccggatcgccattggagccgctatctcgccgacctcggtctacaacggccggcagttcgacatcagcctgctcatatggaaggacccacaccgggggaactggtggctgcagctggggtcgacgggtcagctggtggggtactggccgtcgttcctgttcacgcacctgggcgggcacgccaacatggtgcagttcggcggcgaggtggtgaactcgcggccgtcggggtcgcacacgcccacgcagatggggagtgggcacttcccccgcgagggctccaaccgcgccgcctacttccgcaacgtgcaggtggtggacggcgacaacagcctcgtccccgccgccgcgctccgcctcgtcgccgaccacccggcctgctacgacatccagggcggctacaaccgcgcctggggaaactacttctactacggagggcctggcaggaacgtgcactgcccgtgatacatgatccggccggcgaccatgcatgcatggcgatggcatgaactgaatgaacgaagaagcagatacgtgcacagatacatatatatatatatactactacagagattcagagacggatcacagtatgcggccgtgccggaggattgatctctagtgggatcgtcgtcgccgctcatcaaccggacatggatcctatatatataggagcggtgctagtcgttatagcttagccatagtccctcgtttggttactgcgcatgctaatgagtaatgagtttttagtcgcccagcccagctgcgtacacgcgcgccgccggccgggccggtagtagcacaggcaaaaggtttcgatttgatgtatgtgaggcttctttcgtttgcatcggtctgatttttttttgtcttgagttctgtatacatgaagaaatccacagagtattttgatcaacatgcgtatatatagtacgaaccatgcatccacactgtgtttaataac

SEQ ID NO: 110352 - DNA, 138 bp, Zea Mays
atggaggaggctatgctcaacctcaatgaagagtcgtcgagcaggcccaagcgtcgtcgacgctacatcaatcgtgatcgtgagtctgcccatgatcggcttcatcaagactacttcgccgatgactgtatcgcatga

SEQ ID NO: 110353 - DNA, 768 bp, Zea Mays
atggcggctgctgagaaggctggagcagtgaagtgggatcaagtgttgagcaccctggatacaatcgtgcagaggatcgaatcggtggagcgcgctcaacagcagttggcgggacaacagtcgttggcgaattcggtggctgagcaagcggcgcgcgctcgtgatgagatggcacgccagattgccgagacaggcaagcgggtggcttcgttgacattggagcagatggcggctggcatggaacagtttggggatggatctcctgcgtcgccttcgaattcacctgtgtttgcttctgatctgaggcgtgatgttcctcctgggggacatcgtgctccacacgatcgtggtggtcatcgtcgtcggcatggggagcgcggtggccgtcatgaaccggatgggcatcaggaatttggcgaggcacctcctccgttcatgaagttttcctttcccaagtttggtggtgaatctccttcgatttggctggacaagtgccatgattattttcagatgtatcaggcccgcacgcaagcggcaaagcttcgtttcattagttcatcaagagtttttctaccagctttctgccaaaatgatgatggtcatgcatcagctatgcgagctcggaccgtgaggacaacagaaaagcggagaagggtcgctggaaatcccagccaggcagccacaggaaccggccgtctgcggcgcccaatcagcggccgggacgctagagcacgtagcgagaaaggaagcagctacctggcgtggtag

SEQ ID NO: 110354 - DNA, 2240 bp, Zea Mays
aaactaatctttactattccttaagagcataacgagggcgtccaccgtgcccccgcctgctcccgcaagtccgcaatacgtgcccccgcccccgtcagtgtccgcgagcgaccctctgcgctcgcgcaaatcccgcctgagatcgccgctgatccgaagcagcggcaccgtaaccctccccctcgcgagatccgcgaccgccccatcccggcgccacgggatccacgctccgccctcgcccttccccacccccatccgctaatctcgcggccgatccgcgcccggtcctgaccctgcctccgtcctccgcaccgccactccgtcccccgtcctcggcgccgccgtctcccgctcccctggcacgccttcggggtccttgcgggcggcaagcacctccgtcccggagacatctgccgctgcagcatagaccaccatgtcctcgctcggcagcaccgatgttgatgatggcaacgaggaggaggacggctccgcgagcacccccgagatctaccgctgccactcccacgcagttgcgtgtagcctctccatgtgatttccccaatgtttcccttcctctgtagcctctccgacggcgccgccgccgttcttcctcggccgtcggcgacattttaagaacgcctgaggctgttcaaccacttcatcgtctttttgactgcctcacattgaaggaactttgcagcggactgttatatgatctatgaaagaatgcatgcaacaagatctccagtctgatactgatgaagaaactacaaaagaacacatagccaccatcaatcaagacaaagggaaaactaccattacctcaattggatttctggtttttgggctatcattggatttctggttaactgaaatatgtaccttgcagtagctctatgtctctatatggcattatggtgtctaaaactggatcattatattttcatttgagtgaaattcttatcaaatgttgaaccttcaggctccagcttgatctggttcatgttttttctagattaccccagttgatgaagcaaagaaattatacctgttatttggccttggggctaatgttgccattatcttttctggccgtacaatgaagtatttctcaaatttgcgcaagacattgggtcctggaatgatgagcatagtggtacttcttgaacttgcatctattggggagtgagcaagtttgttttgaatgatccttcattgccaaagtcttatcgtaagaagaaaaaggtcagtagttgtttatcatgcttcctttttcccccttactcaaaataatatgctaacaaaccaggaacttcataatgatttctggttaactgaaacgcatgggcacacatccatgagtcccccaccgctacatgcctcacgcctcgtcactgagtcgttcttagtcacgacatgctgatgtcgatccacccgtcaagaacaaggtgcagcagagatctttctcctcgtcgctgcttcctcgccatccggagatggtcgtcgccgcctaatatcacagcggtgggaaggcacaacgctcccccatctcctccggttctgcctgctcgccagcacgacgcgacgatgcccccctgacccccgcgcgcacagcctccgctggagaagcgacaacgctctcgtctccggtctccatgagtcagcctccaatccatttccatgccaggtatttacctaacgtacattgaacctgcacacaaccctgtctgtgagaccagaaggtagatttcttcaaggggaacaatgtggtgtaacttcatcagcacaaccactttgctgaaggtgtccggatcatgatgcagacaacaactggtgtactcattcccactttgatggtaatcgaaatggagacaaacacaattggagggaaaatatccaaagacaaaaggagtgagttttcacttcttcagattccaccaatcagaataagaactagacatcatagagaccaacttttggtaagagcaacaaaaaactggactactaaaatttactagcgtgatcttcaactgtcctgttaccaatattttttggggtctattatggatagcaatatgcatttgttctttgtacagagatttttcctcgcaatattatgttcgtttggtcatttgtaattattagcagtaaataaacgccatttgcttcaacggttctaggttgtacacaggtaaaggaacaatcgattaccaatgactaagggtattcataaattatgc

SEQ ID NO: 110355 - DNA, 807 bp, Zea Mays
cttcgacggtgtcgtcgccgtttttgccgatcgtcagcatcactgtcgtccgcttcgcttggatgcaccgttgcgaacatgcagctagacgcgtgcacatcctttttccgtaataaattcgtctgtatcatcatccaccgtctggtcttgttctgctcaacacatatacgtggttgcgaaccatgcgactagacgcgtgggggatttcaattgacgagtatgagaaacatgaatggccgatcgatcgtgcaggtcgattgaacaaattgctcaagagatttcaaggctaccattgcttgctcgctgcaaatactactgcagtatatttagattgtattgtacaatgttataggaaattaacaatgcatacatgtaattttgcaggctgttcaaccacttcatcgtctttttgactgcctcacattgaaggaactttgcagcggactgttatatgatctatgaaagaatgcatgtaggaaatatctgtgaatgctacttatattttgttatgcctccttggtcattattctgaaccatagaacatgatctatctccagttgtattttccccttctatggaatcaccattgttggttagtggttagttgttctatttttcctttctttgtatcactacttttaatatatataagcttataggttgaaagatacgaagcagaacagttgagccatagtgcacaactacgatatggactgttagtgggaattgtaattgcatatgccctcaagtaattgatgaaaataaatgtagtattggttttagtttggttaggggtgggtggcaaat

SEQ ID NO: 110356 - DNA, 2859 bp, Zea Mays
ataaaaaaaaggcacggattaattaggggccgaagcttcgccacacgcaataggtcggtcgcctctggactcctcacacgaaacctctataaaaggagtgccaagaggcagccaaggtttccgcaaaacaaaacaccaacctttagcaccaggcaaaccaaacactaggccaacgcaattctctagagcactgtaggctctagttctccagaggcccgccacaaccacaagccaaggccacagccagtgccctcgccatggctcccaacctcagcaagaagacgcctgctggcctcctcggcgacgaggtggccccggtggagggactcaagccgtcgcggttcacccttaagggcaaggacctggccgtggacgggcacccggtcctgctggacgtgccggccaacatccgtctcaccccggcgtcgacgctcgtgcccgccgcggacgtccccgcagcgggcggcggcagcttcctcggcttcgacgcggcggcggccgagagccggcacgtggtgcccgtcggaaagctccgtgacattcggttcatgagcatcttccgtttcaaggtgtggtggacgacgcactgggtgggggacagcggcagggacgtggagaacgagacgcagatgatggtgctcgaccgctccgccggcgagcccggcggcggcggccgaccctacgtgctgctgctccccatcatcgagggctcgttccgggcctgcctcgaggccgggaaggtggaagactacgtggacctgtgcgtggagagcgggtcgtcggcggtgcgcggcgccgcgttccggagctcgctgtacctgcacgcgggcgacgacccgttcgagctcgtcgcggacgccgtcagggtggtccgtgcgcacctgggcacgttccggaccatggaggagaagacgccgccgccgatcgtggacaagttcgggtggtgcacgtgggacgccttctacctcaaggtgcacccggagggcgtgtgggagggcgtgcgccgcctggcggagggcggctgcccgccggggctggtgctcatcgacgacggctggcagtccatctgccacgacgaggacgacccgaacagcggcgaggagggcatgaaccgcacctccgccggcgagcagatgccctgccgcctcatcaagttccaggagaaccacaagttcagggagtacaagcagggcgggatgggcgcgttcgtgcgggagatgaaggcggcgttccccaccgtggagcaggtgtacgtgtggcacgcgctgtgcgggtactggggcggcctccgccccggcgcgcccggcctgccgcccgccaaggtggtggcgcccaagctctcccccggcctgcagcgcaccatggaggacctcgccgtcgacaagatcgtcaacaacggtgtcggcctcgtcgaccccaagcgcgcgcacgagctctacgatggtttgcactcccacctccaggcctccggcatcgacggcgtcaaggtcgacgtcattcacttgctggagatgctgtgcgaggagtacggcggccgtgtcgagctggccaaggcctacttcgccgggctgacggcgtcggtgcggcggcacttcggcggcaacggcgtgatcgcgagcatggagcactgcaacgacttcatgctgctgggcacggaggcggtggcgctgggccgcgtgggcgacgacttctggtgcacggacccctccggcgaccccaacggcaccttctggctgcaggggtgccacatggtgcactgcgcctacaactcgctgtggatgggcaacttcatccacccggactgggacatgttccagtccacgcacccctgcgccgccttccacgccgcgtcccgcgccatctccggcgggcccatctacgtcagcgactcggtggggcagcacgacttcgcgctgctccgccgcctggcgctccccgacggcaccgtcctccggtgcgagggccacgcgctgcccacgcgcgactgcctcttcgccgacccgctccacgacggccggaccgtgctcaagatctggaacgtgaaccgcttcgccggcgtcgtcggcgccttcaactgccagggcggcgggtggagccccgaggcgcggcggaacaagtgcttctcggagttctccgtgcccctggccgcgcgcgcctcgccgtccgacgtcgaatggaagagcggcaaagcgggaccaggcgtcagcgtcaagggcgtctcccagttcgccgtgtacgcggtcgaggccaggacgctgcagctgctgcgccccgacgagggcgtcgacctcacgctgcagcccttcacctacgagctcttcgtcgtcgcccccgtgcgcgtcatctcgcacgagcgggccatcaagttcgcgcccatcggactcgccaacatgctcaacaccgccggcgccgtgcaggcgttcgaggccaagaaagatgctagcggcgtcacggcagaggtgttcgtgaagggcgcaggggagctggtggcgtactcgtcggcgacgcccaggctctgcaaggtgaacggcgacgaggccgagttcacgtacaaggacggcgtggtcaccgtcgacgtgccgtggtcggggtcgtcgtcgaagctgtgtcgcgtccagtacgtctactgagccggacgggccgatgactctgctccctgctggcctgctcaggacgcaataatctaatgtttagagcttaccaagttttacagctctatcagtttacttttgtttgtctgctcttcgttttttaagaattatttctattgtgtgaattaatgagtgctttccttctagttttctgattactcctattcgagcactctgcgtgaacactcttttgggagcaaatgagggg

SEQ ID NO: 110357 - DNA, 2187 bp, Zea Mays
cgcgaaccgactcgccgtcccgtcccgtctcgcctcgcttgcttgtccccatccggattactcttccgctcccttcccctcctcacctcaccaccatctccagctccatccgcaccaacatctccaccaaccgacacggcgaggagatgaacgcgtcgcagttcatggacaagcagatcctcggcctcgccgcctccgcctccccgtccggcggcggcgcggggggcggtgggggtgtggatctcagcgatctgatgatcccgatcccccaggaggacggcgaggaccgtctccgtcgccggcgtagcagtagcagcgtcaacggcacatcagacgacatgctacccagctacgatttccagccgatccgcaccggcggcgccaccgccgccgcccccgtgtctcaggcctcgtggggatcgctcgactccaaggcaccctccgcctctgcctctgcctccgccgccgcctcatacaacctcaagagtgctggtatattggagccacatgtgctgaagaaagttagtcatgaggaagacaggagtaacttccctacagttactatcgcagatattgatcgaaccatgaagaagtactctgataaccttttgcatgcactggaaggtgtaagctcaaggctttcacagatggagggcagaacacaccaactagaaaactctgttgatgagttgaagttaacaattggtaactataatggtagcactgatggaaaactcaggcaccttgagaacatgctcagagaggtccaagcaggtgtgcagattttacgagacaagcaggaaattgtcgaggcgcaactccaccttgcaaagctccagacaaccaaaactgatgcccactcatcagaaaatagtgggtctggacatgctggctctcagccggtgcctcctccacaagcagccattcagccacagcaagtcttaacccctttgcaaccacctgcacttcctgcccttcctgctccaaatgcaccacttccaacgcttcaaagccaaccaccatcacagtttccaagtcatttacaacattcacaggtaccatctgtgccttctgttgcaccggttccctcagttccggctttaccaagggatgcttactatgctccatcttctcagccgaccgaaaccatgcaccagcagtatcaagctccgccagttccacagcctcaggcccctcctgcacctcagcaataccaatccccatcccagttccctcaatattcacagccatctcagccttcaaacgttaaccctccaactccacatgtgcctcctgcaccccagcaaccagaggaaactatgccttacccaccgcctcagagctatgcacctaatgcacgtcctccttcaccttatatgcaaccgcctagtggacctgctcctccttactatggacaacaaaaccctaccatgtatgaacctcccgcaggccgggctaaccctgggccgccatcatcatacggttctggtggctatggaccacagggtgggagtggtttctctgactcatatggttacgctggatctccttcccaccgcggcaatgctggaatgaagccgtctacaccttttgctcaatcctctgggggaagtggcggctatggcagtggcaggctccccacggctcagatactaccacaagcagtgccggtaagctcctccagcaccagcggtgcttcaggcaatagagtgccacttgacgatgtagttgagaaggttgccacgatgggattctcgagagagcaggtgagagcaaccgtgcggaggctgacggaaaatgggcagaatgtggacctgaacgtggttctcgacaagctgatgaacggcagataagttgagcagtagtgccatttcaacagtatgtgtatagtatggagacttgggaagtgtcagctgaaccgattttctgtctgcaactttgtaaacctggagaactctgatgaccgaacagccgctcatcctgattgccggtcatggttgctccacctgaaatggaaacagcccagtgtgcctgtcagtgaactatagtattattgcaatctgaatacgttattcatttgatgtatatgtggtgctgatgatattttaaaacatataccgtggtttcttgtgatatgttaataagaagcctttactgtgttttttaggctgcgctacagaaaaacgg

SEQ ID NO: 110358 - DNA, 2067 bp, Zea Mays
aaaggctctcgcagcgcacttgtgcctgaaccttcaggcctgtggcaggagagtgtggggaagcagcacaagaagaaacagtggaatcagaggggaagcaaagctccaagagggggagccgtcttcagcccgctcccagcagcctcgctcgcggtcgtccgccgctcgatcgagctcgcaaccggcggccagcctcctcctcctttggcatgccttcggcggcattacaccttggcacgtcggtggaggccggcggcggcttccaaggcaccggtgccatggcgccgtccgcgcgcctcctcacccccaaaggcgccggcgctgcggccgggcccgcgcaggcgcagagtcgtcgggaggaaacggccaacggcgggggcgctggccctgaccttgccgcactccggcccaccaccaccaccaacaggccgcgcgggaaagcccaggccgggaagcccagcaggcgggcgccgatctggaacctgaaggccgccgtcttcgcctccgtcgtcctcaacgtaggcctcctcgtccagcactacgtcagtagcacggctccgtcgcaccaccaccaccgccaggggcatcaggcctgcccgatgcatctagatgctggcgccagccgcgacagaagggggaggcaggaggatccgctgtccgtgcccaaggccggggcgccgtcgacgggcaagccggcggtgacgccggactcggtgatcaatctcgatcacggcgacccaaccatgttcgaggagttctggcgggggacgggggccgccgccgagatcgtcatcccggggtggcagaccatgagctacttctccgacgtgggcaacgtgtgctggttcctggagccgggcctggaccaggaggtgcggcgggtgcaccggctggtcggcaacgccgccgtggacgggtaccacgtcgtcgtcggcaccggctccacgcagctcttcatggccgcgctgtacgcgctgtcgccgcccgcgggagccggcgccggcgctgcgcccatgagcgtggtgtccacggcgccctactactcgtcctaccctgccgtcacggatttcctccggtcggggctcttccgctgggccggcgacgccagctcgttcaggggcgacacctacatcgagctggtgtgctcgccgaacaaccccgacggcgccatccgcgaggccgtcctgtcctccgccggctccggcgtggcggtccacgacctggcgtactactggccgcagtacacagccatcaccaaacgggccgaccacgacgtcatgctcttcaccgtgtccaagagcacaggccacgccgggacgcggatcgggtgggcgctggtgaaggaccgcgacgtcgcgaggaagatggccaagttcatcgagctcaacacgatcggcgtctccaaggactcgcagctgcgcgccgccaaggtcctcagggcggtctccgacgcctacgagctcccggaggcgggagatgcccgccgccgccgcctgttcgactacggccggcgcaagatggtggagcgctggcgcatgctgcgtggagcggccgccgcctccggcatcttcagcctgtccgaggagacctcggccttgtgcaacttcaccaaagagatggcggtcactaaccctgcgttcgcgtggctgcgctgcgacagggaggacgtggaggactgcgcgggcttcctgcgcgcccacaggatactgacgcggagcggggaccagttcggagcggacccgaggtacgtccgggtcagcatgctcgacagggacgacgcctacgacatatttgtgaagcgtctctcgtctctgcgatgaagacggcaggctactcacggtcacggagatgggcctagttggagaggagggtcgatgccacccggccggccggcgtcggcatgccggcccgtcgcccgtcggactgtgggagcatgcatgagtagggcagcagcgttcagtaggaagaagcgcaggaggagcgacgatttgttttgcctttcctgctgtatgttttgcggtgttccggatgtcgcatcgtctcaaaggtttcttttggtttcttgct

SEQ ID NO: 110359 - DNA, 100 bp, Zea Mays
tcaaaatatcgaagccaatgttgtgcttcgatcagattgcatctcgttttgatctacatcttagaacatagaggtacacagatttttgtatcaaaataaa

SEQ ID NO: 110360 - DNA, 570 bp, Zea Mays
atggccgcctgcgccccttgcttctcccttctctctctctgctcgactgcagaccgccggctgagctttccccagcccccagctcggctctcccatggcgacgatctccctgctcggcagttctccggctcggatctccctccccgcgtcaggccaaagcttcccctgctccctgccggcgcccattcctgcgacccttcctctctctttcctctggccccctcgccatcgccggagctccctgctcctctgctcacggcgcccatggcgagctctctgcactcgcccatgtcgcgcgccttccgattccatggccgagcttgggccgcgccctcccggctcctccagcgcgcggaatcctccctgctgcagcgtccgagcgtcctgctcttacccccagctcgccgcgcgtcctggcgttcgtgccgtggagtctctggcgtgcgttcttttgtgcctcgcttccgatgtgttcgattaaatgtcggaccaagaatccaagatgtcgctcctcctcgctgtgaaatcctcacgctcaccattctctattcaatctcgtcgtcaagctga

SEQ ID NO: 110361 - DNA, 900 bp, Zea Mays
atggctatgccttcctccaccacggcggcgctctcccgcctcgtcgaccgcacccgggttccggaccccacactgcaacgccatgcggttggggccgtcttccgccacctcctctccctccccgcgcccctcccagcggccgcccacgacgccacctcagccctcctcgcttcgccccaccctgcagtcgccgcgcacgctgcggcctccatcgcccgtctcaccgccacccgccccgatctcctcccctcggatgtcgccctcccgctcctcatcgcgcccctcgcggcctcaccgtcccccctgctcgcctcctgcctcgtcaaggcagtctccgcgctcgcaacctgcgccctccgctccggctctcgcttcccggcccacgaccaccccttcatccaggcgctcgcgtcgggggctgacggcgctcgagcggagctgatgcggcaggcagccgggatggttgccgaccgggtggattgggtggtcaagtttctgaggccgttcgtgatgttctccgtggtgaggaagggggacgccgcatttgccagggatttgatcggtgcattggccgcagcagccgtggcagcagggaaggctagtgtcgcgatcccggttctgaagatgctccaagacagcatgctgcatttcggccgcggggacgatcaggaagtgcggctatggcttagttccgcagagtgtttggttgatgcttatgtcgtgctactgaggaagttagctcatggtcaaatgatttgcagtggtatactcctgcatggtgtgatattatggtgttattacatcatttctttggttgacttaacattgaacttctcccttgttttattactcattgatgaggtgcaattaatcgatgtttgttttcgtgcaattacttga

SEQ ID NO: 110362 - DNA, 484 bp, Zea Mays
tttttttttctgatctctattgtttaattattctgctttctaacatgtagtcaaatacctttagttttgtattgagagtcgtgattctgtggttcaagctcttggcctcgagagcctctcgtacctttgtgaagcagatgtggtcgatttctacacggcgtggaaagttatatcaaagcaggtgcttgattattacgttgagcctgctgttgctcacagtttgtgtattctgttgaggtgcggagcgatggatgctgaggcatattctgtaatatctggtaaccttgtaagaacattgtggagaattggaacatccaagaaaaataatcccgatccactctgggataaagcaagaggaactgcttttcactccttgtccaactacaaggttatactatgattctttgtctatgttatgagtttaactgctatttttttggttgaaaacctatttccaaatttcatgttttttaacaaggggcgc

SEQ ID NO: 110363 - DNA, 882 bp, Zea Mays
tatttttttcattgtacgtttcacagttctatgttaacctttcctttcagattcgcagtactgccttagtcaatgaaggacatgttgatgttgcaaaaaagattatcctcagagcaagattgtgtgcaactggttgtggttcaacacatgagctgggaaatataaagacagcaatattgtgtacaaaagctgatggtgtttggtggagtgtccttgttgagatcacttcagccttaaactcagccgaaaacatcatcaaaagacagtggcttctggatgcattagacattggctgtgttacagctcacccctcaacggtgctgtgttttgttggcttgctttgtggtagctgctgcatctatatgccgcttcttcttgttaattcgataaatgtactgagcgacttgccggtcaccctgcctgcctttctctccaccatcgtttctgatgatttcaggaactctgtggcagacaggctatggctgttgactactgacatctatacttgggctgaacaattagctcacggacacgatcaacctggacatgatcgtattcatagaagtgaaactgagattgcgacttttttggccaatattctgctctctacatgcattacagtcgaggactacctgtctgttgataagcggctaaagcttgcaaatcttgaagcactctaatcaaagggagatgtgtttcttttctattttatgtatgtatttatgtacggtatcagtcatgttttaatagttgatgtccctgctgatgatccagcaatgtttttttcatgtacataattaatttaactaactcatcttatgcactgaaaacaatctattgttcaaagatagatagacctatgaaataatattgttgtgtaca

SEQ ID NO: 110364 - DNA, 786 bp, Zea Mays
atggcgtccccgtcgagcaccagcaacaactcggccttctcccctgtggcggcgtcggccgggacgacgatgcctggtgccggggcgccgtgcgcggcgtgcaagttcctgcggcgcaagtgcctgccggggtgcgtgttcgcgccctacttcccgccggaggagccgcagaagttcgccaacgtgcacaaggtgttcggcgccagcaacgtgaccaagctgctgaacgagctgctgccgcaccagcgggaggacgccgtgagctcgctcgcctacgaggccgaggcgcgcgtcaaggaccccgtctacggctgcgtcggcgccatctccgtgctgcagcgccaggtccaccgcctccagaaggagctggacgccgcgcacgccgagctcctccgctacgcctgcggcgacgtcgccgccggcatccccaccgcgctccccgtcgtcagcgccgcccccaggctctccacggcgccaatgacgacgacgagccccggccagttcgccgccggcatgtacggcagcggcaggaggcttggggtcgtcgacggactagcagcgccaccgctgcctccgtcgggcggcggcggcggctgctacttcatgcggaaccaccacaacaacgtcgtcattagtagctccccaggcgctgacgtggcgcccgtcctgccttacgcttccgtggctaattgggcggtgaatgccatcagcgcgtcgacgaccaccacctccggatcagagagcattgggttggatcacaaggaagggggagacagcagcatgtga

SEQ ID NO: 110365 - DNA, 254 bp, Zea Mays
aacattgagcctatgtatatataaattcatgtctccacacttgtgcgaccaccaaaatttgagttccattccatctttcatcgatggcatcatccatcgtttcatcaattcatcatcgtcgatggcatcattcaccagtatttctgtgcatcttctgctctgaatcctgagccttgaccacccgcaataacatgtcagcatgttcagcaggctactgcttcggctgcagctgcaacagcacaatagccacaaca

SEQ ID NO: 110366 - DNA, 1605 bp, Zea Mays
atggaggagtgcaccttcacctcggcggccatggccgtggggttcctgctggtcgtgtacctgtacgagccgtactggaaggtgcggcacgtgccggggcccgttccgctgccgttcgtcggccacctccacctgctggcgaggcacggcccggacgtcttcctcgtgctcgccaagaagtacgggccaatcttcaggttccacatgggaaggcaacctttggtcatcgtggccaacgcagagctctgcaaggaggtcggcatcaagaagttcaagagcatgccgaaccggagcttaccttcggccatcgccaattccccgatccacctcaaaggcctcttctcgacaagggattcacggtggtcggcgttgcgaaacatcatcgtctccatctaccagccctcgcacctggcggggctgatcccgagcatgcagtcgcacatcgagcgcgcggccacgaacctggacgacggcggcgaggccgaggtcgccttctccaagctcgcgctcagcctcgccaccgacgtgatcggacaggcggcgttcggcgcggacttcggcctgaccacaaagcctgccgcgccgccccctcaccacggaccaccacgacagcacggcgaggaagacggagacggtagtcacagcaccaggtcgtcggagttcataaagatgcacatccactcgaccacgtcgctgaagatggacctgtcggggtcgctgtccaccatcgtcggcacgctcctgcccgtgctgcagtggccgctacggcagctgctcctgcgggtcccgggcgccgccgacagggagatccagcgcgtcaacggcgcgctctgccggatgatggacggcatcgtggccgacagggtggccgcgagggagcgcgcgccccaagcccagcggcagaaagacttcctgtccgtggtcctcgccgcgcgcgacagcgacgcggccgcgcggaagctgctcacgccggactacctcagcgctctcacctacgagcacctcctcgccgggtcggccaccacggccttcacgctgtcctccgtgctctacctcgtcgcccagcacccgcgggtggaggagaagctgctgagggaggttgacgcgttcggacctccggaccgcgttcccacggcggaagatcttcagagccgcttcccctacaccgatcaggtgctgaaggaatcgatgagatttttcatggtctcgccgctggttgcgcgggagacctctgagcaggtggacatcgctggctatgtcctgcccaagagtacgtgggtgtggatggcaccgggggttctggcaaaggaccccgtcaacttccctgagccagagctcttccggccggagcggttcgaccctgccggcgacgagcagaagaggcggcacccctacgcgttcatcccgttcggaatcggtcccaggatttgcatcggccagaggttctccatccaggagatcaagcttgcgctgatccacctctaccggcagtacgtgttccggcactctccaagcatggagtcccctttggagtttcagttcggtgttgtgctcaacttcaaacatggagtgaagcttcagtccatcaagaggcacaaatgttag

SEQ ID NO: 110367 - DNA, 1673 bp, Zea Mays
gcaagtatacatagatttacattggatcgacgccatcgccactacgaactacgactcgatcgcaagcttccccagtagccatggaggccacggcaccagcaaaccttttctacgctgctttcctttttctgtcggtactgtatctcgccgtcacccggcgccgcaccagccgcctgccgcctggaccgacgggcctaccgcttgtgggcagcctccctttcctcgaccggaacctacacgcctgcttcgctggcctcgccgcgaagtacggtcctgtcttcgccatccgtctgggctccaaggtggaaatcgttgtcacctccccggagctggcccacgaggtcctccgtgacaaggaccctgtcttctccaaccgcgtcatccccgacgccggccgcgcggtggcgttcgacggcgtggagaacatcgtgggcgtcccggtcggacccaagtggcgcctgctccggcgcctctgcgcgcaggagatgctgagccccgcaggcctcgacagcctgtacggccttcgccggcgcgagttcaggtctaccctgcgctacctctactcccagtcccaggccggcgagccggtggacctcggcgccctgatgttcgtcaacatgatgaacgtggtcaccagcaccctctggggtggcaccatcgggagcgagagcgagcgagctgccatagggaaggagttcagggcactcgtcgccaagttgaccgagctcctcggcacgcccaacctatccgacttctttccggtgctagcgccgttcgacctgcagggcgtccggaagaagatggagcggatcagggtgcgcttcgaccagatattcgacaagatcatccagcagagggtgaacgcccagcaggacggcagcaagatggccactgacttcctcgagtgcatgctcaagatggagagggaaggcggggacggcaaggccaccttcactatgactgacgtcaagtctctgctcctggacatggtggtcgccgggacggagaccatgtcaaataccgtggaatgggccatcgcagagatgctgcagaaacctgaggttcttcggaaggtgcaagaagagctcgacaaggtggtgtccagggacgccatcgtggaggagtcccagcttcctgagctccgctacctccggatggtgatcaaggaaacgctccggctgcacccagcactgcccctcatggtgccgcactccccgagcgaagagtccacgatcggcgggttccacgtcccggccggctgccgcgtcttcgtcaacgtctgggccatccacaggaaccccctggtgtggagcgagcctctcgagttcaaccccgagaggttcagcggggacgacgacggccgcaggtgggatttcacgggcagacagttcgactacctccccttcgggtccgggaggaggatctgcgccggcatcgccatggccgacaagatgactacgtactcgctggccatgctgctgcaggcgttcgactggaagctgccgcagggtaccgagctggacctatccgagaagttcggagtcgtgatgaagaaggctacgccactgatggtcatacccaagtcaaggttccctaagcccgatctgtattgttcctgagcaagacctcagatatcatcgtgtcgatctttcccacaaacgctgtcaaataat

SEQ ID NO: 110368 - DNA, 1358 bp, Zea Mays
atggcacttttcctttattcttggtgctcagattgcatcctttaatcatcaccattcaccatagacaagttaacaagtcaagctgatcgagacgctcgcgccagaggcttcttccaaagcagggagaagagaagagaagagaagagggagcgagctatggggttcggcatggtgtccctcatcgacggtttcttccggcgcgcgctcacgtccgccggcctccgcccaggctccgccgccgtggacgccgacaccaccatccacttctgggcgcacccctccctcctccaggcccaggcccagccctcctccgcggctccgcggccggtggtggtgctgatccacgggttcgggccggacccgacgtggcagtgggcggcgcaggcgggcccgctgtcgcgccacttcgacctgctggtgccggcgctgctcttcttcggcgcgtccgccacgcgcgcccccgcgcggtccgacgcgttccaggccgccgcgctcgccgcgctgctcgcgggcggcggccacgtcccgggcctcggcggccggaccgtgcacctcgtgggcgccaactacggcggcctggtggcgtaccacctcgcccgggagctggagcagcgaggcgtccgcgtcgggaaggtggcgctgtgcgacgcggacgcgtgctggggcgccgaggacgaccgcgcgctggcgggtcggagcggcgcggcggacgtggtggacctgctggcgcctggcgacaccgccgcggtgcggcggaggtggatgatgactgatgagcgcctaccgccccttcaaacacatccccaagtgcttcctccgcgacctctttcagaaacacttcgcggacaacagggaggagaaggtggcgctagtcaaagggatcactgccaaagaaggcttcgagctgactcctctacctcaggaggtgttcatcatctggggtgagttcgaccagatctacccggtcgagaaagcacacaagatgggagggaagctcggggagaaggcgacggtgaaggtgatcccgggctgccgggcacgggacacctgccgcagcaacaggacatcaagctcttcaaccgcgtctcctcgacttcctgctgcagcctgctgctgcttccacctccaatggcagcgctgccgccaagtagctcgggttcttttcttggttctccacttgtattgtatcccgcgtggcacgagcttgctgttgtgttattgtgtatataaaattctctgcagctgggttttattccgcctcttcgttttctatccagctggtttggaaatagagacagtgcacattgttgtgtttagcaagatgtgaaataaatgatgaggcattgtttttctttaaa

SEQ ID NO: 110369 - DNA, 1149 bp, Zea Mays
atggcggtcgccttcgcctcctcgcggcgcgccctgcacaccctccaccgccgcctcctcctccacccctcccccacacccgccgccgcgcgccgcgcgctacccacttccactcgtactcccatccccgcccactcccccaccttcatctcctcctcctcctcctcctcctcctcccgcttcttcaccaccgcgcgcaccgatgcgacgaggctgcggcacggggtgctgccgcagcggctggcgggcggggtcaggtcggtggcgagcggcgggtcgaagctggcgccgctgggccagggggtcaaggggctggggcggcccatggaggcggcgaggagcgcggccgcgcggtaccgcgcggccgtcggcctgcaggtcgaggccttctggcggcgcaactacatgatcctcgtcggcgcgggggcagtcgtcgtctgcgtcgcgctgtggaggatcatgttcggcatcgccagcaccttcgtcggcctctccgagggcatggccaagtacggcttcctcgccctagccaccgcccttgtcgcctttgccggcatgtatgcccgggcaaggttaaccataaaccctgacaaggtttaccggctggctatgacaaaactcaatacatctgctgcaatccttgaagttatgggtgcgcccctaactggtactgatgtcagagcatatgttatgtctggaggaggcccgaaactgaaggacttcaaatttaagcttggcagcaaacggtgcttcctcattttccccatcaaaggatcagaaagaaggggtcttgtaagtgttgagttcaagaagaaaaagggacagtatgacatgaaactactagctgttgacataccaatggcatcaggtcctgaccagcggctgttcgtcgtcggtgatgaacaagagtacaaggtgggcgggggcttgatatctgagctgcgagacccgatcgtaaaagctatggctgcagaaaaggagtttgattatcttgatgaaagagaggacgaggaagatgagcggagggagcgtgaggaggcggagcaagaggaagcggaagcattgaggcgcgaggaggaaaggttgcgtcagcaggctgaagaacggaggcggcgggaggaggctgagagcctggagaaagcttcgtga

SEQ ID NO: 110370 - DNA, 769 bp, Zea Mays
gcttctctttcccccaccacaaccccccgccggcgcggctcccggtgtcccttccactctccaccctctccttcccttcggcgccaagtccatccgcccctccgaatctccgattgccgccgtccaggtgccggccgacagttgagaatgggactgaggcgcctgatgagatgctgctgctgcattgcaaagcacgcggacgacggcgacaagatcgatttcggaggtggcaatgttcatgttgtcacaagcaaagaggactgggaccaaagaattgccgaggcaaacaaggatgggaaaaccgtggttgcaaacttcagcgcttcctggtgtgggccgtgccgtgtcatcgcacctgtctacgccgaaatgtcgcagacgtaccctcagctcatgttcctgacgatcgatgttgatgacttgatggagttcagctcgtcgtgggacatccgcgcgaccccgaccttcttcttcctcaagaacgagcagcaggtggacaagctggtcggcgccaacaagcctgagctggagaagaaagtggccgccgtcgccgacgcggccggcagcaagacagtgtagtgtaggcaaagacccgcctagcttgttgacctggccctgtacatcgttatatcctattgttgctgtgtgtttctttcttggcaccgtgcgcatgcgtcgatctgtcggcggtaatgtcttccgccatgtgctgattgtaagagttgcccggtaatggtaatggtaatggtaatggtgtcttacggtttct

SEQ ID NO: 110371 - DNA, 772 bp, Zea Mays
gcttctctttcccccaccacaaccccccgccggcgcggctcccggtgtcccttccactctccaccctctccttcccttcggcgccaagtccatccgcccctccgaatctccgattgccgccgtccaggtgccggccgacagttgagaatgggactgaggcgcctgatgagatgctgctgctgcattgcaaagcagcacgcggacgacggcgacaagatcgatttcggaggtggcaatgttcatgttgtcacaagcaaagaggactgggaccaaagaattgccgaggcaaacaaggatgggaaaaccgtggttgcaaacttcagcgcttcctggtgtgggccgtgccgtgtcatcgcacctgtctacgccgaaatgtcgcagacgtaccctcagctcatgttcctgacgatcgatgttgatgacttgatggagttcagctcgtcgtgggacatccgcgcgaccccgaccttcttcttcctcaagaacgagcagcaggtggacaagctggtcggcgccaacaagcctgagctggagaagaaagtggccgccgtcgccgacgcggccggcagcaagacagtgtagtgtaggcaaagacccgcctagcttgttgacctggccctgtacatcgttatatcctattgttgctgtgtgtttctttcttggcaccgtgcgcatgcgtcgatctgtcggcggtaatgtcttccgccatgtgctgattgtaagagttgcccggtaatggtaatggtaatggtaatggtgtcttacggtttct

SEQ ID NO: 110372 - DNA, 1856 bp, Zea Mays
taccgtgctcttgctgagcgctatgataacgtgactggggaattgcgcaagggtcttgcgctgcagtctcagggctctggtatatccgaaactgattccgagacacaatcaacttcatcgtgtccagagcctaacatggaacagaacacagcaaaaccgaagcgtgatgtgctccttggttctggtgggagctcagacatttccaagaaggagagtgatggatcatcttcttcttcttcagattctgattcagaggttgacgaggcaagtgaagaaaatggcaatgggatttcttatataagtgatgaacggattgctgagctggaagatgagcttcaggaagcaaggcaacaaattgaggcgcttgaggtaaagaacatgcactgccagtgtgagaaacttgaagagagtctcaaacaagttagcaatgaaaaggaagatctggtagctgcaattctggcaagcaagaatgaggtcgaggatctaaaaggagacatggtctcggcagctaaacattttgaagcccaactagtgcaccgtgaccatgagattgagaagtgcaagcaggaggctgagcaagtttctgaaaagtatttccatgagaaatccactctcgaatctgaaatccaaaggctccaggaagttgttaagagttttgaagagaacctaacaaaagttgctgatgagaaattgcagcttgaggcccagctaaaggaacttgaacagacttctaatgatttagatgactcttctgctgagattataaagctacaagaaataatcaaggatctgcaagaaagattggaaaatgactcaaacgagaagagtgtacttgaggaacgtgctatggagctggagcaagttcgtaggcagttagaggattcaagagctgaggctagtatggagctacaaactacaattaagaacctgaatcaagttcttcaagagaaagcagaacttgagaatcgtatgaaggatgcggagcaggcaaccagcgacctaaactccctggtcgcttccctcgacggcaagctgaaagccacagaggcgcagctcgaacagcttcacgcggagagagcagaagcaatcctcgagagcgagaaacaggtatccgagctgaaccaagccatcgcccgtctcaagacgcagctggagctgctgtcttcggagaaggccgcagtcgagaacaaggcgtccgctctgctgaccgatgtcgccgttcgcgacgagaagctgaaggagacggaccgccacctgcaccagctgcacctggagcacgtcgagctgatcggagcggcggacgccgcgcgggaagacgcgtcgggcctgcgctcacgcgtgcgcgagctcgaggtggaggtcgagaggcagaggctcatggtggcagacagcgcggaggggaagcgcgaggcgatcaggcagctgtgcttctcgctcgaccactaccgccacgggtaccagcagctccggctgctcctgcagggccacaggcggccccggcccatggtgatgacagcgtgatgagttgaagtggttgttgtcctggatgttgggacttgggaagtatgtcgaaactcttgacttgaagctgctgcttctcggtgtgttgtcctgacgacatgagtgagtttctatctggatgagcggatggtaggaggaagtcgaaactctacatagttcgaggagagcttgtgctctgtagttactttgcactgcggagttactcgtcaatttgtgctgtgtgatgtaaggagctagctatcacggtgttcccttctttattctctcagttcgtgctcattgttggtttgctgaagtgaagtgggaagtgggaacgacgaattcttcgagtgctg

SEQ ID NO: 110373 - DNA, 2844 bp, Zea Mays
ctccaccgcccatctcttcctcctccagtcccgaaggaaggtctcaggtctggctggcctaccaccaagaacacacgctgcggcctgcggctgcggtcacgctactcaagtgtgaacaaaaaggtccatgcttctcctccctttcgctcgcttccttttctctgcccatccacgtgaaaagcagcagcagtggtccctaagtagatcttggattcgtctcatcaatcacactccaccaggagtaacccgcacacgtagcgtagcagcaggagtaggtaggtgggcagcaggctccttgtggtgtgccctgcatgtttcgcagcttgcttcttcgagcattgaccccttccgccccgtccgtcatcttccccacctctctctccgcaccgcaggagcttggcggcggccgtgaccggcgctggagagtggagatcttggacgcgtgcgacatcctggtctccgctctgtgcctctggtcttcgaaggcgccgccaccctatttttttttttaaaaaaaatcctaaggtgagatcgagctgctctttgctttgctttgctttgctttgctgcttgcgcggaatctggcctgcttgctttcacagttccacttcgttgcgtgtttcggtttattgattgatagatttcaatcgaagcttgcagattaggtttcttttctagctagatcctgcagcatctacgaggccaggccacggtcgactggttctccttcgatctagtcttccttcctttccttcctttctttctgaatgcgcatggtagtaccaccataacacagctatccttttggtgagacatccagttttctctgtctttgccaaagacaaaaaaaccccccgctattggtaatacaggcagaggtcgtcttgagaagacggatagctatgactgattatatattttttttgctgcacatgtttattaccgagtccattgctctgacgaactgatctcctgtaccattgttacatgtacctttgtttgaattggaaatcattcataccatattactatcaatccaactaacaggactaactaccttcccaaggatcgtacactaacttcttcatccgaagtaccttgaactagcatgcttgctggcatcactgtctgttacacgctgatgccgcactatttctagccttgattacccaacgccgagttcacctcaaatgcttccgttataggaaaacatgattctatatgccatactcatttttcgctgtattttaaccattttaactctcatatttgtgactgctatagtcactgtctctctctggtgctgctgcgcatttctgaatttttcagatagtttcttcagtccgacaccgcttctagcttcccctcggcgatctgtgaagctatgaagccacctctcgagaggaacccgactaagaagcgccactcgtggtggtgggacagtcacattagccctaagaactcgaaatggctcgccgaaaatctcgaagaaatggacaagcaagtgaaggaaatgctccagctgatcgaggaggacggcgactccttcgctaagaaagcgcaaatgtattaccagaggcgtccgatgctcgtcacccacgtcgagaacttctaccgtatgtatcgtgctctagccgagcgctatgacaatgtaaccggcgagctgcgcaagaacatccctacaaggctgcagacaaccggatttttaaccagttcagagtacggttctgagctgcagaggtcgccctcaccgtctcctgagccgttacagaggtcgtggacaagggagcagagccctagggccgctggcttcgacttcttcctgagcaataggagcaatgactcgccacctgtctacaggaaggaacccgaggacgcggcatcgcagtcggagtctgacgcgaagtctgcagacggtgaggatgatggcatcgcctacacgctgcaccagagagttcttgagctagaggacgagctcaatgcgacaaaccagaaactacaagatgcaaacgagaagcttgaggttctggaggaaaagagcttgaggtgccattgcgattataaagagaatggaaacggtgctcagcgaactacagaagtttcaggcaaagagggggagctggaagccgaaatcgtcaatctccaggagcaagcggactcggcaagaaggcgattcgaagaggcattgtctgaacgagatggagaaatcagcaagctaaagcaagagcttgctggtgcttctgagaagctgcagcgagagaagtacgccaatggcgtgcaggtatctgagctgcagcgatcggttgaacacatcaggtccgaactagagagagtttctgaagagaaactactgtccgagaacaagattaaggagctggaggcagcaaacgctgaagccgataagtacggccacgagctcacgcgagctgccgagaagatttccgaggagaagttcgcgctcgaagctgagatcctcacgatgcggcagaacattgaagatctgaaatccaggatcgagagcctcgctcgagagaagtccctgctcaaatcatggtttgaggacttggagcaagtcgtggggcgaggaaggggcatcttcgccgattaaccgagtttttctatccagaacatcatcggtagctagaatttagcaagctagtaacattttgttttgttttctggtacccataccatcttgcgaaattgagatacgtcagtgtacttcctttttgtttgctgaatcttaaacttagacgtgatggatggtggtgatgtactggtaatatatgaaatattatactgaaccgcgctcgacgtcaataataagattcctatagtgcatct

SEQ ID NO: 110374 - DNA, 1625 bp, Zea Mays
ctcttcctcctccagtcccgaaggaaggtctcaggtctggctggcctaccaccaagaacacacgctgcggcctgcggctgcggtcacgctactcaagtgtgaacaaaaagatagtttcttcagtccgacaccgcttctagcttcccctcggcgatctgtgaagctatgaagccacctctcgagaggaacccgactaagaagcgccactcgtggtggtgggacagtcacattagccctaagaactcgaaatggctcgccgaaaatctcgaagaaatggacaagcaagtgaaggaaatgctccagctgatcgaggaggacggcgactccttcgctaagaaagcgcaaatgtattaccagaggcgtccgatgctcgtcacccacgtcgagaacttctaccgtatgtatcgtgctctagccgagcgctatgacaatgtaaccggcgagctgcgcaagaacatccctacaaggctgcagacaaccggatttttaaccagttcagagtacggttctgagctgcagaggtcgccctcaccgtctcctgagccgttacagaggtcgtggacaagggagcagagccctagggccgctggcttcgacttcttcctgagcaataggagcaatgactcgccacctgtctacaggaaggaacccgaggacgcggcatcgcagtcggagtctgacgcgaagtctgcagacggtgaggatgatggcatcgcctacacgctgcaccagagagttcttgagctagaggacgagctcaatgcgacaaaccagaaactacaagatgcaaacgagaagcttgaggttctggaggaaaagagcttgaggtgccattgcgattataaagagaatggaaacggtgctcagcgaactacagaagtttcaggcaaagagggggagctggaagccgaaatcgtcaatctccaggagcaagcggactcggcaagaaggcgattcgaagaggcattgtctgaacgagatggagaaatcagcaagctaaagcaagagcttgctggtgcttctgagaagctgcagcgagagaagtacgccaatggcgtgcaggtatctgagctgcagcgatcggttgaacacatcaggtccgaactagagagagtttctgaagagaaactactgtccgagaacaagattaaggagctggaggcagcaaacgctgaagccgataagtacggccacgagctcacgcgagctgccgagaagatttccgaggagaagttcgcgctcgaagctgagatcctcacgatgcggcagaacattgaagatctgaaatccaggatcgagagcctcgctcgagagaagtccctgctcaaatcatggtttgaggacttggagcaagtcgtggggcgaggaaggggcatcttcgccgattaaccgagtttttctatccagaacatcatcggtagctagaatttagcaagctagtaacattttgttttgttttctggtacccataccatcttgcgaaattgagatacgtcagtgtacttcctttttgtttgctgaatcttaaacttagacgtgatggatggtggtgatgtactggtaatatatgaaatattatactgaaccgcgctcgacgtcaataataagattcctatagtgcatct

SEQ ID NO: 110375 - DNA, 1910 bp, Zea Mays
ctcttcctcctccagtcccgaaggaaggtctcaggtctggctggcctaccaccaagaacacacgctgcggcctgcggctgcggtcacgctactcaagtgtgaacaaaaaggtccatgcttctcctccctttcgctcgcttccttttctctgcccatccacgtgaaaagcagcagcagtggtccctaagtagatcttggattcgtctcatcaatcacactccaccaggagtaacccgcacacgtagcgtagcagcaggagtaggagcttggcggcggccgtgaccggcgctggagagtggagatcttggacgcgtgcgacatcctggtctccgctctgtgcctctggtcttcgaaggcgccgccaccctatttttttttttaaaaaaaatcctaagatagtttcttcagtccgacaccgcttctagcttcccctcggcgatctgtgaagctatgaagccacctctcgagaggaacccgactaagaagcgccactcgtggtggtgggacagtcacattagccctaagaactcgaaatggctcgccgaaaatctcgaagaaatggacaagcaagtgaaggaaatgctccagctgatcgaggaggacggcgactccttcgctaagaaagcgcaaatgtattaccagaggcgtccgatgctcgtcacccacgtcgagaacttctaccgtatgtatcgtgctctagccgagcgctatgacaatgtaaccggcgagctgcgcaagaacatccctacaaggctgcagacaaccggatttttaaccagttcagagtacggttctgagctgcagaggtcgccctcaccgtctcctgagccgttacagaggtcgtggacaagggagcagagccctagggccgctggcttcgacttcttcctgagcaataggagcaatgactcgccacctgtctacaggaaggaacccgaggacgcggcatcgcagtcggagtctgacgcgaagtctgcagacggtgaggatgatggcatcgcctacacgctgcaccagagagttcttgagctagaggacgagctcaatgcgacaaaccagaaactacaagatgcaaacgagaagcttgaggttctggaggaaaagagcttgaggtgccattgcgattataaagagaatggaaacggtgctcagcgaactacagaagtttcaggcaaagagggggagctggaagccgaaatcgtcaatctccaggagcaagcggactcggcaagaaggcgattcgaagaggcattgtctgaacgagatggagaaatcagcaagctaaagcaagagcttgctggtgcttctgagaagctgcagcgagagaagtacgccaatggcgtgcaggtatctgagctgcagcgatcggttgaacacatcaggtccgaactagagagagtttctgaagagaaactactgtccgagaacaagattaaggagctggaggcagcaaacgctgaagccgataagtacggccacgagctcacgcgagctgccgagaagatttccgaggagaagttcgcgctcgaagctgagatcctcacgatgcggcagaacattgaagatctgaaatccaggatcgagagcctcgctcgagagaagtccctgctcaaatcatggtttgaggacttggagcaagtcgtggggcgaggaaggggcatcttcgccgattaaccgagtttttctatccagaacatcatcggtagctagaatttagcaagctagtaacattttgttttgttttctggtacccataccatcttgcgaaattgagatacgtcagtgtacttcctttttgtttgctgaatcttaaacttagacgtgatggatggtggtgatgtactggtaatatatgaaatattatactgaaccgcgctcgacgtcaataataagattcctatagtgcatct

SEQ ID NO: 110376 - DNA, 2027 bp, Zea Mays
ctcttcctcctccagtcccgaaggaaggtctcaggtctggctggcctaccaccaagaacacacgctgcggcctgcggctgcggtcacgctactcaagtgtgaacaaaaaggtccatgcttctcctccctttcgctcgcttccttttctctgcccatccacgtgaaaagcagcagcagtggtccctaagtagatcttggattcgtctcatcaatcacactccaccaggagtaacccgcacacgtagcgtagcagcaggagtaggtaggtgggcagcaggctccttgtggtgtgccctgcatgtttcgcagcttgcttcttcgagcattgaccccttccgccccgtccgtcatcttccccacctctctctccgcaccgcaggagcttggcggcggccgtgaccggcgctggagagtggagatcttggacgcgtgcgacatcctggtctccgctctgtgcctctggtcttcgaaggcgccgccaccctatttttttttttaaaaaaaatcctaagatagtttcttcagtccgacaccgcttctagcttcccctcggcgatctgtgaagctatgaagccacctctcgagaggaacccgactaagaagcgccactcgtggtggtgggacagtcacattagccctaagaactcgaaatggctcgccgaaaatctcgaagaaatggacaagcaagtgaaggaaatgctccagctgatcgaggaggacggcgactccttcgctaagaaagcgcaaatgtattaccagaggcgtccgatgctcgtcacccacgtcgagaacttctaccgtatgtatcgtgctctagccgagcgctatgacaatgtaaccggcgagctgcgcaagaacatccctacaaggctgcagacaaccggatttttaaccagttcagagtacggttctgagctgcagaggtcgccctcaccgtctcctgagccgttacagaggtcgtggacaagggagcagagccctagggccgctggcttcgacttcttcctgagcaataggagcaatgactcgccacctgtctacaggaaggaacccgaggacgcggcatcgcagtcggagtctgacgcgaagtctgcagacggtgaggatgatggcatcgcctacacgctgcaccagagagttcttgagctagaggacgagctcaatgcgacaaaccagaaactacaagatgcaaacgagaagcttgaggttctggaggaaaagagcttgaggtgccattgcgattataaagagaatggaaacggtgctcagcgaactacagaagtttcaggcaaagagggggagctggaagccgaaatcgtcaatctccaggagcaagcggactcggcaagaaggcgattcgaagaggcattgtctgaacgagatggagaaatcagcaagctaaagcaagagcttgctggtgcttctgagaagctgcagcgagagaagtacgccaatggcgtgcaggtatctgagctgcagcgatcggttgaacacatcaggtccgaactagagagagtttctgaagagaaactactgtccgagaacaagattaaggagctggaggcagcaaacgctgaagccgataagtacggccacgagctcacgcgagctgccgagaagatttccgaggagaagttcgcgctcgaagctgagatcctcacgatgcggcagaacattgaagatctgaaatccaggatcgagagcctcgctcgagagaagtccctgctcaaatcatggtttgaggacttggagcaagtcgtggggcgaggaaggggcatcttcgccgattaaccgagtttttctatccagaacatcatcggtagctagaatttagcaagctagtaacattttgttttgttttctggtacccataccatcttgcgaaattgagatacgtcagtgtacttcctttttgtttgctgaatcttaaacttagacgtgatggatggtggtgatgtactggtaatatatgaaatattatactgaaccgcgctcgacgtcaataataagattcctatagtgcatct

SEQ ID NO: 110377 - DNA, 1153 bp, Zea Mays
aacacgcacagacacagtcacacagcgttgcgcgccaaggagagagcttattgcaaattactctgtggaccgaaccggtcggtcggaataataagcagcagagagagagagatggggaagctgacgctggggcaccgcggcgaggcgtcagagccggacttcttcaggggcgtcctcggcgagctcgtcctcaccttcctcttcgtcttcatcggcgtcggagccgccatgaccgacggagcgacgacgaagggtagcaccgctggaggcgatctgacggcggtggcgctggggcaggcgctggtggtggcggtgatcgcgacggcggggttccacatctccggcggccacgtcaacccggccgtgacgctgtcgctggccgtcggcgggcacgtcacgctgttccgctcctccctgtacatcgccgcccagatgctcggctcctccgcggcctgcttcctgctcaggtggctcacgggcgggctagccacgccggtgcacgcgctggcggagggcgtgggcgcgctgcagggcgtggtggcggaggccgtcttcaccttcagcctgctcttcgtcatctacgccaccatcctggacccgcggaagctgctcccgggcgccggcccgctgctcactggcctcctcgtcggggccaactccgtcgccggcgcagccctgtccggcgcctccatgaacccggccaggtccttcgggcccgccgtcgcctcgggcatctggacgcaccactgggtgtactgggtcggcccgctcgccggaggcccgctcgccgtgctcgtctacgagtgctgcttcatagcggccgctcccacgcacgcccttctgccccagcaggacccatgatcagcgtgtgcatcgtgcgttggatcgatcggagtgtgatttggtttgagctggcgacgcattgtgtttgagattgatcgaggaccgaatacgtgtatgcatgctgtctcggccggtccggtctttcgtgtgtgtgcacagtagcacacgcggtatatagtgtcctcctacgtatgggctgttttttcctcatgttttcctttgtttgagaaggtttcttttcaagaacaaaactgcagaatttctcgtgggtctacgtgtatttttgcataaaaaactaagcttggaaata

SEQ ID NO: 110378 - DNA, 2269 bp, Zea Mays
atgcccccgccggcggcgcccgccactaaccgcgttgccctctacctccgccgcgcgcgcctcatcgactccctgcgcgtccgtctgcgttcctcctccccttcctcacctcctgcgctcccacccgacgaccccgtggtcgcgctccacgccatccgcgcggcgcccacggcgtcctgcgcgctctccctttttcgcgcgatcccctcccaaccaccgccgccgctcccactctaccaagctctcgccgcccgcctctcctccctcgccgcgctctccgacctccgcgcccacctcgcttctttcccgctgcctgctccgccgctcgcgcggctccgcctcctcgccgccgcgggggaccgcgcctccgcgctcgaagccttcggttccctcccggccaccccgcgccgccctgcggaggcgcacaacgtcgtcatcgaactccacgcgcggggcggcgatcatgacgccgccgtcgaggcgttccgccgcatggtccgcgagggcgcgctcccgaatgcacgcacgtacaccgtcgtcatcgcccacctcgcctccgcggggtttgtggaccaggcgctcgaggtgttccgcatcctgccgtcgctgcgcgtgcggcggaccacccgacagtacaacgtgctcgccgaggcgcttgcgtcgggaggtaggtttgaccagcttcggtggctcgtccgcgagatggcggctgtggacggcgtcatgcccgggccgcagatgcgcgctgccatcgctgccctgcgggaggctggtcacgttgatggcacaaaggatttcgtcgaggagctttcacccaacgcaaggatcgggtacgccgtggacgacgtcgagggtgagggagacggcgaggaggaggacgacgacgacgaggacgaaggcgaggtcaaggacagaggcaacggagagaagcaaacactgaagccatggctggacccgcgtgagctcgccagggcgttggacggctgggactcgcgggaggtggccgagctagagggtgccgggctcgtctggacgccgcggctggtatgcaagctcctgcgagcattcaagaaagccgagacagcgtgggagttcttctgctgggtggcgtgccgccccggtgggttcgcgcacgaccgccacaccgtggcgaggatgatggcgatcctcgcccgcaccggccacgtcgagctggtggagcgcctgctcgctaaggtgcgtgccgacggcatcctcctcccgcttgccacggtgcggctcgtcatcgacttctacggcctctccaagaaggccgacgcggcggtcagggtgttccaggaggctgagtcaatctgcggccccatctcggggcccaaccttgcgctgctctactcgtctcttctgcggacgatgacgaagtgccggagagggcccgacgccatggacctcctcgaggagatgatggcgcgaggcgtgctcccggacctgcagaccttctccggcctgatggagcaccttgctggcgccggcgacctcaagggcgtgcaccggctgctcggtctggtccggcagtgcgagctgcagcccgacggatacatgtacagcgtgctggtccgggcatactgcaagcgggagcgtgcggcgctcgcgctgagggtgtttgacgaaatgcgcgccgcaggggtcacccccgacgcacccaccaaggcactgctggtgaagagcctgtggcgggaggggaagctccgagaggcggcgctggtggaggaaaggtgcaatgatgtagtggatggccttccagatgtgtcaccggggcatgtgtggacggccagcgccgcggacttgaagaaggtgctcgacatttactccggctgcctggatcaacctgctgctcagacttcaacggggtgatgcactgatgtcattgcccattggcgtttgatcacagaacagaagtcggattccagaatggtaacctcatcgtggcaatatttggattggattggttgcttgttgcaatgtggttgtagaagaatggaacaagcatggcagagaggaggccgagcctgtggcagaaatgaagaaccgaagaagcattgcccaagggtcatggctcgagtgccaaagtgagggattgatgctaccttcagtgcttcagtagaatatgttcagcacttaattatggtaaacatgatgattttgactgttttgtgcttcaattttgtaactggcagttgatggttggcattcaaactctataatgttcactacgtgtagctgtgtttttgac

SEQ ID NO: 110379 - DNA, 597 bp, Zea Mays
tatcttactctccttcccaaacaggttgaggctgtgcatcctggggattttagaccaatcagtttggttcacagttttgctaaacttctcactaaaattctggccaacagattagcacctgagctacataaaatggtcagcataaatcaaagtgtcttcatccgagatcgatgtattcatgataactttcttatggtcaaccaaactgtcaagatgctgcacaaaaagggcatccctgctctcttcttgaaattggacattaaaaaggcatttgattctatgagctgggcctttctactagaaattcttcgtcatctgggttttggacagatttggtgcaacctgattctgaacctgctcatgacatcctctacccaagttcttgtgaatggagttcctggccagcctatatgtcacaaaagagggttgaggcaaggaaatcccttatcccctcttttgttcatccttgtcatggacgttcttaacagccttttcatcaaagctaatgagtgtgggctattgcaagcccttgctggtagaaatatcaaccaaagggtctcaatgtttgcggatgatgtagctgtctttatcctgcct

SEQ ID NO: 110380 - DNA, 946 bp, Zea Mays
tatccggcgtattcgagagaaaaagaggcgataaagatcacttctttgtgcaatatcaacatgaaggatgcaggtgaggctgccatttctgcataaacagtcaaataaactaattaagaataaactactttcttgtgctatggtatttcaatttttcaacataggcacattggcaacaacatatgttgtgatttttaacagactaggtactcccttggtccctccagtctcttctacatgttgaataggaatttgttgtggtttttagagttttttttaacaaagtggcatgagctctgcctttcaattaataaaagagtatatgtacaaggtagttattaataattttccctatctctgtatttggcatggtagcaaaaggtactaaaaatgttggtgaattgtttttcttttttcgaaaatagttcatagcctaagttttaaaaggttggctggacaatctacaggatgccatctaatttggactggaagtagttgtagatatatgtcttcctctgttgatttatctaaacaaagaatgaacttttaaggtaatattactttgtgaagtgtgtaaagagccctttcgttacattaaggtttatcatgaacttctattatgcaggctctcagccaaggtcagtatatccacgctgttggtaagaatgttcctgaatttgatctgttttatgaaatgtcagtagtgtggattggcagattgtcttcaccctttggtcatccagatgttgcagaagctgttgattatcgtgaggatcctcttggttgtaaagtgtccccatctataaactatggcaccaggcagaaaaattaagatctggaactccaaagcggtgatgtttccttcactattagaaatcatatgtaatatgtattgttcctactgattgaattaaagctcaattctatccaactatttgaaaaaaaa

SEQ ID NO: 110381 - DNA, 665 bp, Zea Mays
atccacgtgggaggagcgggctgacctggcgcccctccagctcatcctatctacatatctgtgccgctctccccggggcgccgggccccggccagccgctcctgccagtgccatcacacgtcccgagagcagcgcctgagcggagcccaggacccatggccgtcaccgccgtcgcggcgtctctgtccgtggcgcagggtctcgggaagcctctctgcgccggcaggaacgcgacgtcgcgccgggccgtcgcgctcgcgccccgtcgttcggcgacccggatggccgtcgtccgggcgtcgtccgcgcatcagaagcagcacccggccaaggagtgggcggccgcggcggccgtggcggcggcgctggtgctgccggaggtcgcggaggccgcgcccgggatctcgccgtcgctcaagaacttcctcctcagcatcgtctccggaggcgtcgtgctcgtcgccatcgtcggcgccgtcgtcgctgtctctaacttcgatcccgtcaagcggcgctgagctcaatcaactacacgtgcacacatgcatgcagcgttgtatgttgcattgcatgctgtacgccgcctgtacctatgtactacttcccaatgtaaacagcgtttaatctgtgaatcttttgccgtgtaaatgcgattttcacataca

SEQ ID NO: 110382 - DNA, 374 bp, Zea Mays
ggttttcactgtgaaggaattccttcctcgcatgatctcttttctgatcattggttgatggatgatgagggcactgaacttttcaagtgggaaaggtcattttgtcggtcgggcacccaccaagcaagaaaaaaaatcccattcaaataacacttttggtccttctgcttggtcttttgacatggtcgatggttcagagaaaaaggaggagcctgataaagtatcggagggtctacttgtaactgtgtatggatgggctgtatgtattccttattgttctttacgtcgtgcaaaattattacgaatccgttgctgatccttttcaaaattgttctttttttactgaagaatcatgcgtatctgctgcgataatg

SEQ ID NO: 110383 - DNA, 1747 bp, Zea Mays
tgtaaaaatataaaagacccgtctccgtctcgggggagcaggagagggggagaggccaagaacccagccgcgaagccaagcccatctgatccggcccctgctgccctgccccagctcgtctctcaggtcgccttgccgttgccggttccgcgcccgggcccggctcagagtcgcgagctcgtctcgcagatccggcttcgcttgcttgaattctgttctttgggagcaaagaggtgctggccggtggcgtggcttggtgctctggggccggcgagtttttttttttgcgtccgctcgctctgcctgtagtcttcttgctgcggcggcggggtggagatgggggtggcgggggagaagttccagctggggacggtgggggcactcagcctctcggtggtgtcctccgtctccatcgtcatctgcaacaaggctctcatgagctcccttggcttcaacttcgccactactttgacaagctggcatctcctggttacattctgttctctccatgtggcattatgtatgaagctgtttgagcacaaacctttcgatgcaaggactgtcatgggattcggagtgctcaatggcatatctattggacttcttaacttgagtctgggtttcaattctgttggtttctatcagatgacaaagctggccataattccctgtactgttatactggagacccttttcttccggaagaaatttagccggaatatcaagctttcccttagtgtgctccttcttggtgttggtgttgcaactgtaactgatctgcaactcaacgttatgggatctgtactgtccctactggcaatcatcacaacctgcatcgctcagatcatgacaaatacaatacagaagaagttcaaggtatcttcaacacagctcctgtaccagtcatgcccataccaggcattgacgttgttccttgtcggtccattcctcgatggatttttgaccaaccaaaatgtctttgctttcgactacacaactcaagttctgtttttcatcgtgctgtcgtgcctgatttcagtctcggtgaacttcagcacttttctcgtgatcgggaagacgtctcctgtaacctaccaagtccttggccatctgaaaacatgcttggtcctcacctttggctatgtcctgcttcacgacccgtttagctggagaaacatacttgggatcctaatcgcggtaatcgggatggttctgtactcgtacttctgcactagagagactcagcaaaaaccagcagaagcctccccgcaagccgttcaggcaaaggagggtgaatcgaacccgctgatctcggactccctgagcgctgccgaaaatggaggcagtgccaccgacgatgaacctctgaaggtaccaatgtggagctcgaagtactcgaaggcgtgaagtggctgttctggtattagtgcacacggtgctatacagaattcagcgtggtaggcagatactagggttggaaggcaaccctgttcctgttccatttttggccttctattttttcttcttcctggcacaaatactataaatatgtgctgtcagtaaatggatctcactcttgagaggaatacctcagctcgagaccgagtgttctgttctgcctgaaagctagtatttgtttgtgctccactccacgtgtaaagtggtagatggacatgatctcaacagtagtagtttgcattcttttgtactagtgatatacaatatttatgtattcctcgtgttccct

SEQ ID NO: 110384 - DNA, 534 bp, Zea Mays
cacagcttggagcctctcgcccttacaaaagatgttcacagagaatcacggagcaagggaggtattagcaactcacacacgacacaaagatcacagcgaacaagtatattagtacacaaaaccaatgtactaaggcttagaaacatacctttactttttgtaatcgctgcaggtcaaacaggactgaatataagactcatgaatcaacctccaaactcacctgacatgaattgttttgatttaggcttcttcgcttccttgcagttccttacactaaatacagtctcaaggaatctagatgagttaatttacaatgttagcaaggaattcgaagagtatgaccctacacttctaaatagagtgtacctgacattgcaaggctgcttgattaaagtaatgaagggaggtggaggtaataggtataagatcccccatatgaacaaagagaggctggaggctttaggcattcttccaaacagacttgattgtgaccgacaattatatgagactactcttcactccttgtccagtgag

SEQ ID NO: 110385 - DNA, 2113 bp, Zea Mays
ctcgcctgcccacctccctcgccatcgctagtctcaaaccacaaccctagagaagaagaagagagagagaaagggagatggtggggctgcagtacgatctcgtcgggaacccattgggcgcggtgcgcgccaccttcgagaggacggccgccgccgctgcagcgcagtctggaggagctgaccctgtggcggcgttccgtggcaaagactggggcgccggtgacctcttccgctccttcctcttcgagcaagacggtcttggcaaggttccggtgttggattcgtcaaatcttggattgatcaaaccgaacaccctggtccggtatcggggaatggttcaggatatgcttgggaatgagtactacattggtgctttcaaggatgggtcaacttggaggacaaacaagtacactgacttctcaccgtactcaatgccgcatccttgtgattcacatctttgggagcgccatctcttccactgtgtgcctgcacctggacaaaattcttggacactggagtcttcaccaggacctgatgtctgcaggatgtcgaactgtttggcacctgaactaagagagaaaaggaagagagatggagatgacgatgccatggatgtttcagaaaatggccatggcaattcttcattctgcaagaagccggaaggtgatgttcatgtctcttccagttcaactgaagtggcaggaaccattccagagatgaatggaggcgatcatcatatacctggaagctccttttcatgtctagtgaagatctatgacatgcctgatagtcaagtgaaattaaatgatgttattgagtttattggcgtatatacatttgacccagaacttgctgctcctagtgacaacccagatgatataatgttagacctcatcgaagatgtaacagttcagttgcctccgagcaaggtgccacgtcttcactgtttggtatggagaaaattatcattccatgattttatttcaaggcctgttgttgagccttcacccagcctgttaagaggcattcggcaatctttgctctcacacctcacccttgtattaggcaatgacgagcttgcagcccagtgcttgctgttgcatcttctatccagacttcgtaatagggtggatgtggtcaccgttggcagactctccttgaatttcactggcttcaacagggaaagtgcttccatatttgggaatcagctgtattctttgatccagaaattggtgccgtattcacaagccatacctctgtcaattgagtatctcaacacagctacacttcaacctagaaaggacaacaagtcaggaaggttggtcacaggagttctgcagctacctcaaggcactcatctgatctttgatgagactcttctgcagacaggatcattgacatccaaaggtgtggagaataccatgctgctcaagaacctgatggagtcgcagaaggttgactacgattttgagtactacaagctggaaatggcagctgatgtgcagctactcactctctctgaggggaaatcaaacatccttccttcagatttggtagtgcctttccggccatcctctgttcccacagttaatgcaggtgctgaggaaactgagagctggaggtggtttttgaccacagtaaggtctcttcctcagtccactgaacctgaaacttaccagatgattcaggatgaaatggtcagtgccatgcgtgatgataggagcttgggttgttctgaacttagcagatggctaacaatggcacaaataatggcctccagctttggcgagaagagtctttctttggagcactggcagatggtgaaggagcttgagaggcttagaaagcagaggatgcaatgagaatgactcatcattagcatgtgtttttgcactctaattgtttatgttggtatgctgttatgtgtatagtactagacgtttgaatcaagacatggatctaaggcatttctgtaacaactgacaacttttatgatcctatgcatgtcagcatgtgtatctgctgctcattttctttgctcaaatttgagatttactctgggaactatggaatgccaatgtcagacctgtgatttcaggattgtaatgctaaa

SEQ ID NO: 110386 - DNA, 2116 bp, Zea Mays
ctcgcctgcccacctccctcgccatcgctagtctcaaaccacaaccctagagaagaagaagagagagagaaagggagatggtggggctgcagtacgatctcgtcgggaacccattgggcgcggtgcgcgccaccttcgagaggacggccgccgccgctgcagcgcagtctggaggagctgaccctgtggcggcgttccgtggcaaagactggggcgccggtgacctcttccgctccttcctcttcgagcaagacggtcttggcaaggttccggtgttggattcgtcaaatcttggattgatcaaaccgaacaccctggtccggtatcggggaatggttcaggatatgcttgggaatgagtactacattggtgctttcaaggatgggtcaacttggaggacaaacaagtacactgacttctcaccgtactcaatgccgcatccttgtgattcacatctttgggagcgccatctcttccactgtgtgcctgcacctggacaaaattcttggacactggagtcttcaccaggacctgatgtctgcaggatgtcgaactgtttggcacctgaactaagagagaaaaggaagagagatggagatgacgatgccatggatgtttcagaaaatggccatggcaattcttcattctgcaagaagccgaaggaaggtgatgttcatgtctcttccagttcaactgaagtggcaggaaccattccagagatgaatggaggcgatcatcatatacctggaagctccttttcatgtctagtgaagatctatgacatgcctgatagtcaagtgaaattaaatgatgttattgagtttattggcgtatatacatttgacccagaacttgctgctcctagtgacaacccagatgatataatgttagacctcatcgaagatgtaacagttcagttgcctccgagcaaggtgccacgtcttcactgtttggtatggagaaaattatcattccatgattttatttcaaggcctgttgttgagccttcacccagcctgttaagaggcattcggcaatctttgctctcacacctcacccttgtattaggcaatgacgagcttgcagcccagtgcttgctgttgcatcttctatccagacttcgtaatagggtggatgtggtcaccgttggcagactctccttgaatttcactggcttcaacagggaaagtgcttccatatttgggaatcagctgtattctttgatccagaaattggtgccgtattcacaagccatacctctgtcaattgagtatctcaacacagctacacttcaacctagaaaggacaacaagtcaggaaggttggtcacaggagttctgcagctacctcaaggcactcatctgatctttgatgagactcttctgcagacaggatcattgacatccaaaggtgtggagaataccatgctgctcaagaacctgatggagtcgcagaaggttgactacgattttgagtactacaagctggaaatggcagctgatgtgcagctactcactctctctgaggggaaatcaaacatccttccttcagatttggtagtgcctttccggccatcctctgttcccacagttaatgcaggtgctgaggaaactgagagctggaggtggtttttgaccacagtaaggtctcttcctcagtccactgaacctgaaacttaccagatgattcaggatgaaatggtcagtgccatgcgtgatgataggagcttgggttgttctgaacttagcagatggctaacaatggcacaaataatggcctccagctttggcgagaagagtctttctttggagcactggcagatggtgaaggagcttgagaggcttagaaagcagaggatgcaatgagaatgactcatcattagcatgtgtttttgcactctaattgtttatgttggtatgctgttatgtgtatagtactagacgtttgaatcaagacatggatctaaggcatttctgtaacaactgacaacttttatgatcctatgcatgtcagcatgtgtatctgctgctcattttctttgctcaaatttgagatttactctgggaactatggaatgccaatgtcagacctgtgatttcaggattgtaatgctaaa

SEQ ID NO: 110387 - DNA, 963 bp, Zea Mays
atgggagagaaattattgaagactttccaggacgtcactgtaagtcttgaacaagccttagctggtatcttgtttgatgaacttaatatatctaatgaagtaagagagcaggttgacttggtgcatactcagttcaaaagagctaagcaacgatcggattcatgtgacgatgatctttttaatgacctgatgtctctctataattcaagcagcagtgctagcgttgacgtagatattcttcgatggttatatgagaagttgcagcttgtcacaatatatgacctcaatcatgaatctctgaccttgcatgagatggctagtggcggtgatcctagtggcattgttgaaaagatgtcaacgctcctaaaagagattaaggattttgtgcaggcagaagaccctgagatgggcggaaaaagttttccaaaaggcaactcagcatgtcctgttattcctgatgattttcgttgcccaatatcactggatttaatgaaagacccagttattgttgccactgggcagacttatgagcgaggtaaaagggatgcagcaacagcactgtttaacttgtgtatttaccagggcaacaaggggaagactgttagagctggatactaccagaactactcatggagactgaaagtgggatgttgtcagaaatggatctccaaggaacaaggaaaatgctgctgctgttacggtgcatctatgaaatggggtgagcagcaacaacaacatcttgctgaagcacaggagcagggcatcgtgtctttgctggaggagctagcagacgaaagtggcacggagagaggaaagaggaaagctgtgcagctgctcgaacgaatgaatcggttcctaaagcaacagagtcaagcccaagccaaggccatggcacaggctcatgcgcaagcacaggcacaagatcatgctcaagcacatgcacgagcacaggcacaagcgtag

SEQ ID NO: 110388 - DNA, 417 bp, Zea Mays
gatataaccttagaaacgtttgatgaagggcttcaagctcacgctcttctgggtgaccttcatacagccacacagcaagaggacacacagcctgagctgcttcgtcgcttccaagaccgcgacgttgtagtcactgaccatgcagttcgaaaggccgagctcgatgagctggctgcagctctcacagatggcgaacaggcttgcatcagtgatcttgctgcatccctcgagactgaggtggcaagggaagcgtcatgggccttaaccaaggcagaaacagccgcgttcgtgaccgtgagattctcgcagctgttcaaatcaatgtcgaccagcccactgtccgagctcttcattagtggaaggaagccattgtcggtgattgcactaaggccactcaaattgatgttctccagctga

SEQ ID NO: 110389 - DNA, 321 bp, Zea Mays
atggtgaaatttgatcgctcccacccgttcgcctgcacgtcccacaacagtcggtgcgccattcccctcctcttctccgccgccgagaagccggatggcaagaagcaaaggggctacgggcaagcgagacgataccccaagcccgagtgtcgactcccgaccgaattgtcgacgtgctaccaccacctcgctctccctcagttgagcagattaggccgcgggcatgaggcaggtgtgctcgaggtggaggcgtcgaccactggagggcaagggcgtcgtggaggaggaatacttcgtgaagaggtgccatggcagagttga

SEQ ID NO: 110390 - DNA, 1277 bp, Zea Mays
gtctgagtctgactgacctgacctcgccgttttcttctcttctcttctcgcctctgccgatccctcctcccctgcttgcttgcttgcattgcaacctctgtctctccatggcagccgtgagcagccaggacaaggagggggctctccagctgaagcaagcaggagagagcaaggtgttctccaagctgttcaccagggagagctcggcagcggcgccgtccttccgggtgtactacggcgtcgcctcggcgggctccgtgcccttcctgtgggagtcgcagccgggcacgcccaagaacgacgccgtctccacggccaccctgccgccgctcacgccgcccccgtcctactacaccgccaggcggcagcagcacgccgcggccgcgcgcagccaccaccgcaggaccatgtcgtcctcctcctcctcctcctccgccgccggcggcaccggcaggaacaagaagaagctgctgtcggccaagcattacaccagaatcttcagcgccatcctgcccaagatgatcctgcacaggtggtcgtcggccacgtcgtcgccctccgcctcctcctcctcctccagcagctcctcgtcctcgcggtcggccttctcctcctcggcgtcggcgtcgttccgcagcgcgcggtcgcccgccgcgtgctcgtcgatgaccatgcggagccgggtgttcgcgttctcggccgcggacgaggacggcggcgaggaggaggaggagcaggcggcggcgccgatgtgcttcagcgtcgtccgccacgagagcttccgggcgttcaggggctgccgcgtcgccatgacggtgaagagcgcgctggcgtccgtcggcgccggcggcggccacgggcacggtgctgggcccgccgctgcacagaaggtgtagtggtaccctttagcctcactgcatgcatgcatgcatgcatgcgtgttgccgctgttgcttggattggattggattgatcgagagctgcgtgttttaacggcgtgccttgttgtgtgtctctttcacggagtaatgttggaatgtgtctcaagaaaaggagttcatcaaagtattttatatactatattatatgatatggtgaattaagtctgatgtaataacagtgtgtaaattaatgtataacgagcgaataacacgcagcatctgtatgtgatgttaattagatccgctcgcaaatcatgtgtactactagtgtgtggactgctttggtttatgcaaatgattcagttcagacatgatacagagaaacaaaaaaaaaaa

SEQ ID NO: 110391 - DNA, 343 bp, Zea Mays
ctcgtacattattcttggtattcacctccacctacacctacatctcaacctacagaacatcagctaccttgctgatgcaggaacaagaagacagggttagactttgtcgaagccctcttcactagtggaggtatcgaccatcactcgttactgtaccccgatggcgatcggcgatcgtgagcttccatgttatgtgttgtgatacttaagactttttattatgactatgtatgagatattgtctcttattatgactggatgagatgtgtcttatgagtatggatgagacttttgtgatgtaattgattagactatgtatttaaatattgttatgtgattgtgt

SEQ ID NO: 110392 - DNA, 780 bp, Zea Mays
atgagtactgaggagactgcgaagaagacagaaattgatggtagtggttcaggagggattacaaagagtgagatgatgaatgaaatgagaagtatgatccaggagctcatgggattagggttgattggtgctaaggccaatacaggtacatctgagttgaagttggaacttgtgcctaatgatgtgaagttagaaggtagtaagaattatctaagctggtctcaaagagtgtgtgtactcctaggaggcaagggagtggagcattatttggaggagacatgtgttgagccgattgataagctcggcgcagaatggagaatctggcatgcggcaaactctgtgatagttgcatggttattggcatccatgtctcctactgttagcaagagggtggaagccatgcgtactgcatcacaaatctggaagaccttgagtaatatatactctcgaaaggggaatgtgatggtgatgatggaaattcagagcaaggcagatgcagtaaagcagatggggagaccagtggaacaatatgctagtgagctccagcacttatggggagagctggatcattatgctcctctccaaatggtttgcccacatgatgcacaaatggctcataagtgggtagaggataggagggtgactcactttctaaagaatctggattctgagtttgaaagcaggagagcggccttttgtcaccaggagagtcttcctaccatggatgaggttgtgtctgccatgatagatgaagagagcagactttcgagtgatgagtag

SEQ ID NO: 110393 - DNA, 846 bp, Zea Mays
atgggcgtggatgcgagtgggatggcgcgaaagcgggagggcgtgggagcgggagcgcaggagagcgtgctggcgggagaatggcgagttggagctgctcggcaaagatggccagcgacgggaacgcgatgccgagtgagatggagaagcgagctcgatggcgagactgttggatctagtttttcacggtcttttctcttttttggcgaggaaataatgtttaacgagtctgttgcagttgctcttagccggagtgggctatccagcatggtgttcgcacgaaccaccgtcgtcaacggctgggtgccaaactgccaaggaacgctcgccggccgcatggacccgcacagcggagaggcgagcgtcaattactgtggtggcctccacctcgtactcgtactcgtcatcggcggcctgatcgggcgcagcagtcctggggacgaggcaaggtcccggagggcgacgcaggcgagcaccgcggggatcccgccctgtaggcaattgctagagaggtcgagcatgcggaggcggcgcagcgtccagattattcgtgggcgggaacggtctgggaggaggagggcgagcacgtggaggctgcagtttgcaggaccagatcgctggcacgtgggacaggagggcgagcagccgggcacgcggtgctcgtgctcccgcggcgccgtggcggccggggctagcgcggccggacgagttggtgcgtggggaagagatggggaagcgccgagcgcggaacgtgcgggtcgtgcaagcggacgaaagagaaacaagtcgaaggccaaagaaaaccgtcgttggcagaggaagcagtcactgtgcttcgtacagtag

SEQ ID NO: 110394 - DNA, 786 bp, Zea Mays
atggcgacatgtgagggggacctccacgggaagtgggacttccacacgcgctgtgaggtctccaaggaagtggagctggacagcgacatctacatcacagggaacgacagcctcatgctcctctctggcacctccctgacatgcgagaagtacgggtgcattatatccgccaatttctcaggcgaggtgtgcctcagccacgacatccatgtcacagccgacagggtctcactagttgccaccaacatcacggtcgctgacacggtcattgtgaataccaccgcgctcgctggtgatccgcctgaccggaccagtggcgttcccacagggacgcacagcgacggtggcgggcactgtggccgtggcgccagctgcttcgtcaagcaagggcagacacagcaggattcatggggcggcgatgcctatgcatggtctgacctcgaacacccctggagctacgggagcaaagggggctcgaccagcgttgagaagcactatggtggtgtcggtggtggcatcgtgtggctgtttgctaaggacctggtcatgaatggcacagttcttgccaacggtggggatagcaatgagaagggtggaggtggttctggagagagcatctttataagggctgcatcgatgtgagtgtttgtggaatgattttttgttctgctttctttatgctaagtgaattgagatatgggaatgcaagcttagttaatcaagtagtgtttgtggaatgattttctgttctgctttcttatgctaagtgatttgagatgtgggaat

SEQ ID NO: 110395 - DNA, 1264 bp, Zea Mays
aaaagaaaaatggcaacaattgctgttcctcgagttgtcccttctcctgctgaagatgccgcggctctcttgaaggcgttccagggatggggcaccgacgagcaggcggtgataggcatcctagcccaccgcgacgcgacgcagagggagcagatcgcgctggaatacgagcacaagtacggcgagagcctagtccagcgcctccagtccgagctcaccggcgattttgagagagcagtgtaccactggatgctgggccccgccgagaggcaggcggtgatggcgaacgccgcgacggagtgcctccaggaggagtgcgcggtgatcgtggagatcgcgtgcgccaactcgtccgccgagctcgtggccgtcaagaaggcctaccatgccctgtacaggcgctccctggaggaagacgtcgccgctcgtgccacggccggcaaccttcgcagcctcctgctcgccctggtgagcacgtacaggtacgacggcgccgacagcgtggacatggagctagcgcggtcggaggcgaaggccgtgcacgaggccgtgagggacggcggcggcgcggggggccacgaggagctcatccgggtcgtgggcacccggagcaaggcgcagctcagggccacgttcggctgcttcaaggacgagcaccgccgcagcgtcgccaaggcgctgccgcgcggcaccgaccccacggggtacctgcgcgcgctgcgggcggcggtgaggtgcgtcgcagatcccagcaagtacttcgccaaggtgctgaggagcgcgacgcgcgagtccgcagggaccgacgaggatagcctggccagggtggtgctgctgcacgcggagaaggacgacatgggggccatctgcgccgcgttcctcaagagggcctcctgcaccttggaacaggccgtcgccaaggaaacctcgggcgactacaggagcttcctgctggctcttcttgggagctaaacaaacaatacacacacgtacacacatattactcctactatataataagctagctcttgtcatttcatcttgcaccgactgcatgtaataagctcttgtcgggatctagcctacagtgacttttttaataatgggaaaagacatgtcattgttgagtgtaaaccatgctgcattggtacatcaaagaaagtcaccgtctgcttttggtcgtcattccgctgcaacagaacccaaagtccaaaccaataacgcgtctctctgaatagtacaggtaaacaagattttttttttg

SEQ ID NO: 110396 - DNA, 1847 bp, Zea Mays
attgcagatcttcaaggacaagggtctgtcgtggtgtttagaggcggaggcggtgcccggccagcatacactctggtttcacagaatgaggcacactttgctggtgactggttcgaaatttgatttctactagccaggatgtacccaatgaactcatggatctagctatgaagggttctttaaatgatgttggaagtgtagatgtcttctcttggataagatgtttggatcttcgcactctcgctgtgctgacaaattccaccctgtccagctcaagtgatccacataatatatctttccattacttaatacctgaaggaggcaacgataagttgtcctacttcaagctaaaagtcttgctacctgattcagatctcactgttactagtcaaaagcaaatcaaggacaagctaaatgttgccactccaaaaggaaattttctttggttattccacatagaactgtcaccctttcttatcgcaaaatctcagttgtcgaaaaagagatttgtttatatcgctgcagattccatcataaagggcaaagtcgaagatcttggtcgcatggaactaggcggttacgccattggcgctgtagaagattgcagcaagcgtctcagcgattatatcagtatggatgttcttagtgccatacaaagagcgggagctacattcagttgggtgcctaaagaaccttataacgaggatgcatgcctacttgattttgacgtgctattgatggagcctcgcaagctggagaaaaccctgattacttccatcatgtggtgggctactggatgtttgcagcaatagtaatgggaagctacaaggaaatttgctccagaaatttcacaaaatcaagatcggtcagaaacttcaagccttgaacgtggtcttcagcttcctggtcggcgagtgggaacttgatctcactgttgtgtaactgcttgttgttgtccctcttgcacagcttggtacatggagacatggcatatctttatctactttatatagaaggagcatgctttgccctggtttctcactcttgaacttgcatataagcccattgatgtaaggagagcgcaacttgcatataaactctttgatgaggttcttgatgatgttctaatctacaaatgtgttagaggatggccggatcctgtgtggctggcaagatttacaatttaaaaactatgccctcggagaatgaggagaattctatccgacttattacacgttctgatgccacatttaagaagagcaagaactgagcacctacaacccttttaagttaagcaacacaagttgaattcatgggagcatgtggtttgttaccaagatctgttgtatatacatatgacttatcaatgattttcaggttgttgtaactatccagtatcgtacaactgacttgttacctagggagaaacactgcatgagtgttgttggtatccttgtctaatatgaggcggagggggtgattcttgcagattctcctagaggtggaggaggatgaagtggtgatagacttcaagcaaactccaagtgtcgtgtcgacctctgcctccgctccctgcacacatccctcccagtcgtcttcaaggtccagacctcctccccgctcaagttcctcatcagcacgttgcacagtgtcgtgtcgtcgctttcctcggtgtccatacgcgtcgtgcgaggcgtcccgcttcatctctaatcacctttatgtgcacatcgtccatatgtgacccccttctccatataatttcaacaaattttactcttttgggctccgtgtaatttcattagtaaaatctctactaattattaatgcttcaaagttaacctgtc

SEQ ID NO: 110397 - DNA, 467 bp, Zea Mays
tgctgatgtggcatgtctgcctccacccctccgccaccaccacagccgttgcctttgccgcgagcgaccgtagcgaggtgattgcaatggtggcctccactgcttcccgcctctcgcccccgcgcttcagcaccccttccccgtctcttcatcctccaaaccgccgctcgcgcttctcccctgttcgcgcagccaagttggaagctgtgctgtctattggtgctcatctaatcccacacccaagaaaggctgcaagtggcggagaagatgctttctttgccaatagcgatgctggcggagtatttgccattgcagatggtgtctcgggatgggcagaaaagaatgtcaatccagctctattctctcgagagctcatgagaaacagctctaatttcctcaatgatgaggcggtatctcttgctaaacctcaacactatttataggcatcattttctttactctatgtg

SEQ ID NO: 110398 - DNA, 755 bp, Zea Mays
tgctgatgtggcatgtctgcctccacccctccgccaccaccacagccgttgcctttgccgcgagcgaccgtagcgaggtgattgcaatggtggcctccactgcttcccgcctctcgcccccgcgcttcagcaccccttccccgtctcttcatcctccaaaccgccgctcgcgcttctcccctgttcgcgcagccaagttggaagctgtgctgtctattggtgctcatctaatcccacacccaagaaaggctgcaagtggcggagaagatgctttctttgccaatagcgatgctggcggagtatttgccattgcagatggtgtctcggggtattcccatctttgttgcaataaactgtttttccacacaaaagaagttctgcagtgaactgcagtcaatgttttttttacttctgagtgtttctagcacttccaataaacatatgttgttttcagtaatatgcattaacacatggtttttatcctgctagtcattctcttatctactgacagatgggcagaaaagaatgtcaatccagctctattctctcgagagctcatgagaaacagctctaatttcctcaatgatgaggcggtatctcttgctaaacctcaacactatttataggcatcattttctttactctatgtgcttgtaacaaattcatgtcacatggaagttgcaggtcagtcatgatcctcagattcttctcatgaaagctcatgctgcaacttcttctattggatctgcaacagt

SEQ ID NO: 110399 - DNA, 1199 bp, Zea Mays
tgctgatgtggcatgtctgcctccacccctccgccaccaccacagccgttgcctttgccgcgagcgaccgtagcgaggtgattgcaatggtggcctccactgcttcccgcctctcgcccccgcgcttcagcaccccttccccgtctcttcatcctccaaaccgccgctcgcgcttctcccctgttcgcgcagccaagttggaagctgtgctgtctattggtgctcatctaatcccacacccaagaaaggctgcaagtggcggagaagatgctttctttgccaatagcgatgctggcggagtatttgccattgcagatggtgtctcgggatgggcagaaaagaatgtcaatccagctctattctctcgagagctcatgagaaacagctctaatttcctcaatgatgaggcggtcagtcatgatcctcagattcttctcatgaaagctcatgctgcaacttcttctattggatctgcaacagtaatcatcgccatgcttgagaagaccgggactctaaaaattgcaagtgtgggagattgtgggttgaaagttattcgtaaagggcaagtaatgttctctatatcccctcaagaacattattttgactgcccataccagataagctcagaggcagagggtcaaacatataaggatgcattggtttgcagtgtaaatcttatggagggtgatataattgtgagtggttcagatggactttttgacaatatctttgaccaagagattgtttccataatttctgagtcgccaagtgtagatgaagctgcaaaagcattggcggagcttgcaagaaaacactcggtggatgtcagattcgattcaccctactcaatggaggcccggagtagggggttcgatgtcccctggtggaagaagctacttggaggcaaactaataggcggtaagatggatgacatcacagttgttgtcgcacaagtgaagacagtagtggtcccagaggacgaggttcagggtggcgacacagaagaacaaaaggggaatgagcagggcgctgcagctgtggttgcatacaaaatgaatgatgaagaagtagcttgagttctgggaccatcctcattttcattctcttcattttacttttctgtgatgactgtattatactgcacataaaggaattgaagcaaaataaatttgtgtgattgtgtctagctgtgcgtatat

SEQ ID NO: 110400 - DNA, 1312 bp, Zea Mays
tgctgatgtggcatgtctgcctccacccctccgccaccaccacagccgttgcctttgccgcgagcgaccgtagcgaggtgattgcaatggtggcctccactgcttcccgcctctcgcccccgcgcttcagcaccccttccccgtctcttcatcctccaaaccgccgctcgcgcttctcccctgttcgcgcagccaagttggaagctgtgctgtctattggtgctcatctaatcccacacccaagaaaggctgcaagtggcggagaagatgctttctttgccaatagcgatgctggcggagtatttgccattgcagatggtgtctcgggtcattctcttatctactgacagatgggcagaaaagaatgtcaatccagctctattctctcgagagctcatgagaaacagctctaatttcctcaatgatgaggcggtatctcttgctaaacctcaacactatttataggcatcattttctttactctatgtgcttgtaacaaattcatgtcacatggaagttgcaggtcagtcatgatcctcagattcttctcatgaaagctcatgctgcaacttcttctattggatctgcaacagtaatcatcgccatgcttgagaagaccgggactctaaaaattgcaagtgtgggagattgtgggttgaaagttattcgtaaagggcaagtaatgttctctatatcccctcaagaacattattttgactgcccataccagataagctcagaggcagagggtcaaacatataaggatgcattggtttgcagtgtaaatcttatggagggtgatataattgtgagtggttcagatggactttttgacaatatctttgaccaagagattgtttccataatttctgagtcgccaagtgtagatgaagctgcaaaagcattggcggagcttgcaagaaaacactcggtggatgtcagattcgattcaccctactcaatggaggcccggagtagggggttcgatgtcccctggtggaagaagctacttggaggcaaactaataggcggtaagatggatgacatcacagttgttgtcgcacaagtgaagacagtagtggtcccagaggacgaggttcagggtggcgacacagaagaacaaaaggggaatgagcagggcgctgcagctgtggttgcatacaaaatgaatgatgaagaagtagcttgagttctgggaccatcctcattttcattctcttcattttacttttctgtgatgactgtattatactgcacataaaggaattgaagcaaaataaatttgtgtgattgtgtctagctgtgcgtatat

SEQ ID NO: 110401 - DNA, 816 bp, Zea Mays
attgtttctaaagtgctatgttttatatggccttacaagtaactctttgtttttaatgatacttaaaaagatgtacaattcatttcatggtaatatagaatcatcgccatgcttgagaagaccgggactctaaaaattgcaagtgtgggagattgtgggttgaaagttattcgtaaagggcaagtaatgttctctatatcccctcaagaacattattttgactgcccataccagataagctcagaggcagagggtcaaacatataaggatgcattggtttgcagtgtaaatcttatggagggtgatataattgtgagtggttcagatggactttttgacaatatctttgaccaagagattgtttccataatttctgagtcgccaagtgtagatgaagctgcaaaagcattggcggagcttgcaagaaaacactcggtggatgtcagattcgattcaccctactcaatggaggcccggagtagggggttcgatgtcccctggtggaagaagctacttggaggcaaactaataggcggtaagatggatgacatcacagttgttgtcgcacaagtgaagacagtagtggtcccagaggacgaggttcagggtggcgacacagaagaacaaaaggggaatgagcagggcgctgcagctgtggttgcatacaaaatgaatgatgaagaagtagcttgagttctgggaccatcctcattttcattctcttcattttacttttctgtgatgactgtattatactgcacataaaggaattgaagcaaaataaatttgtgtgattgtgtctagctgtgcgtatat

SEQ ID NO: 110402 - DNA, 886 bp, Zea Mays
atggcagcatccacggcggcggcggccgcgcggaagggagcgctgacggatcagaggttctcggagctttcccccgcgctatccccggaggtggtggaggcactggaccgcggcggcttccagcggtgcacgcccgtgcaggcggcggccatcccgcacctgctgtcgcacaaggacgtcgccgtcgacgccgccacaggctccgggaagacccttgccttcatcgtccccgtcgttgagatcctccgccgccgctcctccccgcccaagtcacacgaggtccttgctctgattatctctcccacgagagaattgtcctcgcaaatattcaatgtggcccagcccttcttcgcgaccctgaatggcgtgtcgtccatgctcctggtgggtgggctggatatcaaagcagagctcaagaaggtagaggaagagggcgcaaacatattggtgggcactcccgggaagctgtttgatataatgcacactgatgctctagagtacaagaatcttgagattttgatcctagatgaggctgataggctcttggatatgggattccagaaacatattaacttcatactttcaatgttgccaaagctgaggaggactgggcttttctcagctacccagacgaaagctgttgcggacctatccaaagcagggttgagaaatcctataagggttgaggttaagacagaggcaaagtccacaagcaaagatgctggacagcaagagcttggtccatccataacaccattagggcttcggttggaggttcaatcaatatacttcttgttttattatgattgtgatctgattttcttgaattctagctgttccctacaaaatcataaccttgttttggtgcagtatatgatatgtgaag

SEQ ID NO: 110403 - DNA, 2011 bp, Zea Mays
atggcagcatccacggcggcggcggccgcgcggaagggagcgctgacggatcagaggttctcggagctttcccccgcgctatccccggaggtggtggaggcactggaccgcggcggcttccagcggtgcacgcccgtgcaggcggcggccatcccgcacctgctgtcgcacaaggacgtcgccgtcgacgccgccacaggctccgggaagacccttgccttcatcgtccccgtcgttgagatcctccgccgccgctcctccccgcccaagtcacacgaggtccttgctctgattatctctcccacgagagaattgtcctcgcaaatattcaatgtggcccagcccttcttcgcgaccctgaatggcgtgtcgtccatgctcctggtgggtgggctggatatcaaagcagagctcaagaaggtagaggaagagggcgcaaacatattggtgggcactcccgggaagctgtttgatataatgcacactgatgctctagagtacaagaatcttgagattttgatcctagatgaggctgataggctcttggatatgggattccagaaacatattaacttcatactttcaatgttgccaaagctgaggaggactgggcttttctcagctacccagacgaaagctgttgcggacctatccaaagcagggttgagaaatcctataagggttgaggttaagacagaggcaaagtccacaagcaaagatgctggacagcaagagcttggtccatccataacaccattagggcttcggttggagtatatgatatgtgaagcatcaaagaagtcatctcagcttgttgatttccttgtgcagaatagtgggaagaaaataatggtattattgggctgttgttcttccactaattaagtcgcttaaaggttctccaataattgcttaccatgggaagatgaaacagagccttcgagagaaagctttggcatcattttctgctctttcaagtggcgttctagtctgcactgatgttgcagcaaggggtcttgacataccaagtgttgatctgattgtgcagtatgatccacctcaagatcccaacgttttcatacatagagctggccgtacagcacgctatgatcaagaaggggatgctattgtttttctcttaccaaaggaggatacttatgttgagttcttgaagcttcgaggtgttcctctcacagaaagggaatgcctcgcaaacactgatgatgtcataccgcagattagaagtgctgcgctcgaagatcgtaatgtcatggagaaaggacttagagcgtttgtttcgtttgttcgagcatacaaggagcaccactgctcttacatttttaggtggaaagatctcgagattggaaaactagctatggagtatggtttactccagatcccatccatgccagaagtgaagcatcattctctttcactagagggatttatttctgttgatgatgttgatattacacaaatcaagtacaaggataaagctcgagaaaaacaacgcaagaaggcgctgaaaaggaaagcagaagaggaggctcaaaatccaaagccggagaggaagagacctccagagaagccggagaagccaaagcggaagaagacgggcaagcagcgtcagtcaatccaaaccaaggaggacctggatgagctggcgcacgagtaccggcttctgaagaagctcaaacgtggagacatcgatgaagaggagtacgagaagctcactgggttcggagattctgatggcgaagcttccgatggggatgggagcaacttggacgagaggaagaagggcaacaaggcgcagaagaaaaccaagcagagaggaaaatgcaaaagtgggtctaagaagttcgaagggaggagtaaattgaggagcaaaagaagataggaaaccataaaaatgttttttttttgaaatgctgatccaattttacagcaattggaattttgcacagaagctgtgcatgccccacggctaagtagtgcctttttctttggt

SEQ ID NO: 110404 - DNA, 2037 bp, Zea Mays
atggcagcatccacggcggcggcggccgcgcggaagggagcgctgacggatcagaggttctcggagctttcccccgcgctatccccggaggtggtggaggcactggaccgcggcggcttccagcggtgcacgcccgtgcaggcggcggccatcccgcacctgctgtcgcacaaggacgtcgccgtcgacgccgccacaggctccgggaagacccttgccttcatcgtccccgtcgttgagatcctccgccgccgctcctccccgcccaagtcacacgaggtccttgctctgattatctctcccacgagagaattgtcctcgcaaatattcaatgtggcccagcccttcttcgcgaccctgaatggcgtgtcgtccatgctcctggtgggtgggctggatatcaaagcagagctcaagaaggtagaggaagagggcgcaaacatattggtgggcactcccgggaagctgtttgatataatgcacactgatgctctagagtacaagaatcttgagattttgatcctagatgaggctgataggctcttggatatgggattccagaaacatattaacttcatactttcaatgttgccaaagctgaggaggactgggcttttctcagctacccagacgaaagctgttgcggacctatccaaagcagggttgagaaatcctataagggttgaggttaagacagaggcaaagtccacaagcaaagatgctggacagcaagagcttggtccatccataacaccattagggcttcggttggagtatatgatatgtgaagcatcaaagaagtcatctcagcttgttgatttccttgtgcagaatagtgggaagaaaataatggtatattttgcaacatgtgcttgtgtagattattgggctgttgttcttccactaattaagtcgcttaaaggttctccaataattgcttaccatgggaagatgaaacagagccttcgagagaaagctttggcatcattttctgctctttcaagtggcgttctagtctgcactgatgttgcagcaaggggtcttgacataccaagtgttgatctgattgtgcagtatgatccacctcaagatcccaacgttttcatacatagagctggccgtacagcacgctatgatcaagaaggggatgctattgtttttctcttaccaaaggaggatacttatgttgagttcttgaagcttcgaggtgttcctctcacagaaagggaatgcctcgcaaacactgatgatgtcataccgcagattagaagtgctgcgctcgaagatcgtaatgtcatggagaaaggacttagagcgtttgtttcgtttgttcgagcatacaaggagcaccactgctcttacatttttaggtggaaagatctcgagattggaaaactagctatggagtatggtttactccagatcccatccatgccagaagtgaagcatcattctctttcactagagggatttatttctgttgatgatgttgatattacacaaatcaagtacaaggataaagctcgagaaaaacaacgcaagaaggcgctgaaaaggaaagcagaagaggaggctcaaaatccaaagccggagaggaagagacctccagagaagccggagaagccaaagcggaagaagacgggcaagcagcgtcagtcaatccaaaccaaggaggacctggatgagctggcgcacgagtaccggcttctgaagaagctcaaacgtggagacatcgatgaagaggagtacgagaagctcactgggttcggagattctgatggcgaagcttccgatggggatgggagcaacttggacgagaggaagaagggcaacaaggcgcagaagaaaaccaagcagagaggaaaatgcaaaagtgggtctaagaagttcgaagggaggagtaaattgaggagcaaaagaagataggaaaccataaaaatgttttttttttgaaatgctgatccaattttacagcaattggaattttgcacagaagctgtgcatgccccacggctaagtagtgcctttttctttggt

SEQ ID NO: 110405 - DNA, 196 bp, Zea Mays
tttgagttcatgtgacttgttttagaaacttgagctcacaaactttctcttatttggtctctgtatggtgaaattatgtcatttataatctatgttcgttcagtcaatcgttgtgaactctcttctaatcgctcacttcattggccatgttgtaccaagacatattggatgaagtaaataataacatcagttagcc

SEQ ID NO: 110406 - DNA, 633 bp, Zea Mays
atggcggcattattcgtcgccatctccgtcctcctgtccctcctcgtcaccggcgccacggccggcggctacggccagagccctagctctagcccctcagccgcaccggccacgccaccaccgacgccgacgcccgcgccctactccccgcagcccgccacgcctaagccggccgcgcacggcggccacgacgagaagaagctggtggtggtgcgcgtggagggcctggtgctgtgccagagctgcgcggcgcggggctcgcagagcctcgacggcgcggcgccgctgccgggggcgcaggtcctggtcacctgccgcgacaggaagaaccacgtcatggcgtaccggaggggcgtcgccgaccacaacggctacttccacgcggagttcggcgtggagcgcgccgacgacttctgggccaaggacccccgcggggcctgcttcgcgcgcctgctctcgtcgcccgacgccaggtgcaacggcgtcaccaacgtccacggcggcatggagggcgcgccgctccgcgacgagggcaagcagtggaccgacgcccgcggcttccggaacgtcgtctacgccgccggcccgctcgcgttcaggccggggaagtgcgcgcccacgtaccactactga

SEQ ID NO: 110407 - DNA, 3385 bp, Zea Mays
actctggagctctcaatatggtctcccgtaccagcaaccagcagctcctgctgagcctgttcgttgtccttggaatccaccaactctcctgctccctcgccaccagcagcaaccaaactaccaagccaccggcagccgctccgtgccggccggaccagtcctcggcgctgctccggctccggcgttccatctccaccaccaccgactccacgtgcaccctcgcgtcgtggcggaacggcacggactgctgccgctgggagggcgtcgcctgcgccgccgccgccgacggccgcgtcaccaccctcgacctcggcgaatgcgggctgcagagcgacggcctccacccggcgcttttcgacctcacctccctgaggtacctggacttgtccacgaacaccttcaacgagtcagagctcccggccgccgggttcgagcggcttaccgagctcacccacctcaacctctcctacaccgacttcgtaggcaagataccgcacgggatgcggcggctcagcaagctggtgtctctggacttcaccaactggatctacctcgttgagggcgacaacgactacttcctgccgctcggggatgggaggtggcctatcgtagagccagacatcggagcgctcgtcgccaacctcagcaacctcaaggagcttcacctcggcaacgtcgacttgtctggcaacggggcagcgtggtgcagtgccttcgctaactccactccccagctccaggttctcagcctacagaacacccacatcgacgctccgatttgtgagtcgctgtcagccattcgctcgctgaccaagatcaacctgaactacaacaaagtgtacggccggattccagagtccttcgctgacatgccttccctcagtgttcttcgtcttgcctataatcgcctcgaaggacggttccccatgaggatcttccagaacagaaacttgacggttgttgatgtcagttataattctaaagtatccggtctactgcccaacttctcatctgccagtattatgacggaactgctttgtagcaacactaacttctctggtcccattcctagttcaataagtaatctcaaagccctcaagaaattaggtattgcagcagctgacgacctacaccaggagcacctccccacttcgatcggtgagctcagatcgttgacatcattacaggtttctggggctggtgtggtaggagaaataccatcttgggtcgcaaatttaacttctctggagactctacagttctcgagctgtggcttatctggccaaataccttcattcataggtaacctcaagaacctgagtacattgaaattgtatgcatgcaacttttctggccaggttcctccacatctatttaatctgactcaactacagatcataaatttgcattccaacagtttcagtggtaccatcgagctcagctcgttcttcaaaatgcccaacatagccagattgaatctttcaaacaacaagctttctgtagtagacggagaatacaatgcttcatgggcatccatcgcagattttgatactctatgtctagcatcttgtaacatatccaagctccctgaagccttgaggcacatggattcctttgcagttcttgacctttcaaacaaccacatccatggcactctacctcagtgggcatgggataattggatcaactctctcatcttgatgaacatatcacacaaccaattcagcggtggtattggatatggctctgtcatttctgccaatatgtttgtttttgatattagttataacctatttgaagggcctatacctataccaggaccacagaaccaactgtttgattgctcgaacaaccaattctcatccatgccattcaattttggttctcacttaactggtatttcccttctcatggcttccggaaacaatttgtccggagaaattccacaatcaatctgtgaagcaacaagccttatgctccttgatctctccaataataatctgcttggctccatcccttcttgtttaatggaggatatgagtaacctcaatgtattaaatttgaaaggaaatcaacttcatggaagattaccaaatagcctaaagcaagattgtgcattcgaggcattagacttcagcgataatcagattgaagggcagttacctagatctctagttgcttgcaaagatttagaggtttttgatatcgggaagaatcttattaatgatgcatttccatgttggatgagtatgcttcctaaacttcaagtccttgttctaaagtccaacatgttcactggggatgtggggccatctatttcagaagatcaaaatagttgtgaacttggaaaacttcgaattattgatttggcttcaaacaatttctctggattattgcgaaacgaatggtttacgacgatggaatccatgatgactaaagatgtcaatgagacgttggtcatggaaaatcaatatgatctacttggtaaaacgtaccagttcaccactgcgatcacatataaaggatctgatataagtttttctaagatattgcggaccattgtccttattgatgtttcgaataatgcattttgtggccctattcctgagtcaattggggaccttgttctactcagtggactaaatatgtcacataataccctcattggaccgatcccgtcccagcttggcatgctacatcaacttgaggcactagacttatcttcaaataaactttctggggagattccattggagttggcatcattggacttcctttcagtattggatctatcctacaacctgctacagggaagaatacctgagtcttcccacttcttgacattctctgctctctcatttttgggaaacattggcctatgtggatttcaagtgtccaaagcatgcaacaacatgacaccagatgtggttctacatcagtcaaataaggtatcaatagacattgtactattcctttttactggtttaggatttggtgttggattcgcaattgcaattgtcttgacatggggaatctcaaggagcccattcttaccttttcaatgcaccattgccaaggataatgttccatctccaatctgtctaactcctttacctaatcaaccatgtcatctcaaggaggaccatccccatcttcccattgttgaagaactagaggctcctaagctccgttgtatgagctcctcttcagaacatattttctccagttaggggtatacacattttggccttcatttaaaaaactagaggcctgtaagcttcgttgtatgtaattatttttatcttatctttatcttatagttacaacatgttataggtgacttaaggttgaggcttggtatgaagatttcacttaagatttcata

SEQ ID NO: 110408 - DNA, 107 bp, Zea Mays
aagctttttgttgctctgatgagcttttggcttctactagtggtgttgagccctgcttttgcctcttattgagggctagccttttcttacttggtcgtgttgatccg

SEQ ID NO: 110409 - DNA, 2548 bp, Zea Mays
gtttttctcctcatcaagggagtcgcggccaccgccaacgagacaagctgtcggcgatgtcgtctatcgcatcgcagctgaaggccatcaagtcggcgctcggcgctgcgccggagccggctcggcggcccgtcacccggccgtctgtgctcttcgacgccaaagaggccgccgacatcgacctccgggccatcctgcccattgccctctctgggttggagcaccttaccagcgtagacgagagatttgcaaaatacagcaacactctgttcagggagactagccttgaggtgaaccgcgaacagttgactcccaaggagaacgacaaactcaacaagtctatctccacctaccttcgccttctagctggctatttgcatcttccctctgccctcaagacccttgaataccttatccgcagatacctggtgcatgtatacaattcggatgagttgctgctgagcgcactgccataccatgatacacatgcgtttgttcggatcgtgcagttggtcaacttagggaatagtaactgggcatttcttggcggtgtcaagtcctcaggtgcaccgccacccaggagtgttctagtgcaacagtgcatccgtgataaggctgtgctggagaccctatgcaactatgctacaccaacaaaggaattcagtcactcgaagacagtcgtctgcttttgcactgctgtgattgttgagtgtttgggtgctgtccctaagcttgacacagatgtagtgcagagggtgttgggatttgtgtttgactctcttaatcctgcagtgacgcgagaccaggaatataaggctggcgctcttatgattgttggagtacttggaacccgtgcgactctagcgcctaaacttgttcaaaatttgattcttttcgttgcaaggactgcacaacatgatgcattcgagtcagttgacttgccatggcttcgtgtttcagtgatggctcttataagtcttgttcagtcccaatctgtccatgttttccctaagaagccactgatggttttgaaagacatcagggatttttctggtatactttctgtattatccagtgaatacaacatcgagaaattcattaggctttatgttgaatcattaattgactacagtattgtcgatggtacctgccacacacacctgattgaaactattgagagtctgccaatgaagaatttcattgaaagtgtcgtgtgcaaaattcttggaaactgtatcaaggtatctcgggccacaggaatcccagatattaatcacacagaattatgggctaagaaaatttttaaggcaattgaaagaaaatatcccctggagctacgtgatgctattcataaatttcttgagaactctgaaactaattcaccgggaggggattctttggctgaggtttttgggatattgtttgatgaaaacaagaatttgccaactgaaatatctgactcaaacatttggttcagtctcgatcatccaaaggctacggttcgtcaatctgctctctcaaaagttgctacatctggcatcttcaataacagaactctaaatcctcagaagtttatcaatatgcaagatgctatattacgtagtctgtatgatgatgatctaagtgttgtccaagctgctttatccatagaaggactagctgctgttgccaatcctgatagcctgttaaaagcatatgattgcgtgctcaccaaatgcatcaaaatcatcaacaaaggtggttcaaaggcattaaaagcttctgatgttgctgtttcttgcttggaaaagctggtaacggaataccaatcgcatcatatggaacatgccaaggatatagctacattagtgtttcgtctccttattgttcacccaaagacccttagggtgaacataaaggccttggagctagctaagaaaatacggtgggagttctacgcaagtagttctcttgtatatgatggggtcgattttgataaaatgaagaacatgagtgcagactccattgcttctattaacatgaacaacatcaaagcttttgctgaaactttcctagcagacccaaataagcatgtggagtggttagctaactctggaagtggaagtagattttctaaaactctgtttctgctcatagtattgcaaacacttgtttccacagaagctttggatgagcaggtgaatctttgtcatgcttgtttgccagtcctgaaggatgaatgtcatcacatacagcccaaagatagcgatgttggtgatgagatcagcattactaaccttgagatgtgcagtttagaattggtgaagcattttttcaacagagacacagaggcattgaatgttagaatccttgtatgtatattttggggtatagtaagggtgcagtcctcctgtattaagcagaatcccgtggttggcagtggtggaaacacaatgctggatgatttgtttctcttcttccttgtttcacctgccaaaaatatcttccagaagcacctacagtatcttgttaattgcattggagcaccttttcaatttatttcaaagta

SEQ ID NO: 110410 - DNA, 1764 bp, Zea Mays
atgtagatttatcagaaagagtccaagtggagagtcttcttgtgtttgcatctatttgttccaagtgcgcttcctctgacaataatagcttggatgaaagcatctgtgtgcagcttctactaggttttccttccattattctaccacttgctcatgtcaacaaggatataagggcatctgcaattaagtgtattgaggggttatctttggtgtggcagcgcttgagcacttctgtaccaagaaatggaaacaacaccaaattacctcaatgtttgtcatctccaacttttggtagtttccttgaattgttggttaaccaaaagaccatgatctgctcggacgcaaaatttcttcctgcatatatttcatctatgctgagcccatgtaaagatattctggttcccgagaatctccatgaaagatttgatccgcatacaaaggatactattcttactttcatcttgcgctctgctttgaggctccctccttacggaaagttcatggttctgtcagtcctgaaaggagtaggaagcatcttatttcatgcagaagatgtgaagtctctgttttttgatcttctggaccgtcgtgatcagtaccagaatcgacataattgcaagcagatcctatccacccatgaaatgcataccttgtgcttgcttttggaggttttattctcaacgccagatcatgtgaatattggttttaacatgtttgaacctttgatgaaagctttaaaggtgagaaaaatcttctgtttagtatgtatattaaaattatcttcaggactcaactaactgtatagaacttcaggttgatgcttcgtctccaggtgattctgttgttgtgatgccatgtcttactgtcctgcagaatcttcaaccagggttctttgataatttgaagactgatactaaggaaaaagttgttggacgccttatttccttggttcgaactgagagtttcgtagttcgaaatgctgcacgggatgctttactgcgtattaatgttcattcttccactttagtaaaatttattgaattaatttcaacacttggtgatgcaagaggacattcaaaaaggataaagagaaatgaagatcgggaccttaatgtgttctgcaattttgcggagatatttggagaaaattctgtagcttctattcttgtttctcttctagatatcttgtttcttaagaaagatgtgaagcaaaggtcgcgtttattacaacctcttttccagattctatcgaagctcctttctgatcaatgggtctcagttattgttagtcagtataacgaccaacaagatacctcatctgaaatccctgatttatctagttttgtaaaagaagttcaacacttggtactgctggccctcaaagatattacagatacactacaatcgggtcaccatgatgcaatggtcagcagttccgatgtaggtcttcttattgattgtgtacggtccatccaggacataggaactcggaatcatggcttttccttgatagcttctttgggaaaggcttgcccgcaactggtctcagagagtattgttgatttgtttgtcgctattggggatgctattaaacaggacgatagccactcgcaacgtgttttggaggatttattatctgtcttagtcccatgttggttatcaaggaccacaagcatagaaaagcttcttcagatattcattaaagctttagcagatgtgcctgaacataggcgattgacgcttatggtttacctcttaaggtag

SEQ ID NO: 110411 - DNA, 828 bp, Zea Mays
gtcccagaattaattatgctcgtatttaatgtttactgttatataccctttttacatttttgcttgtggcaggttcattcttccactttagtaaaatttattgaattaatttcaacacttggtgatgcaagaggacattcaaaaaggataaagagaaatgaagatcgggaccttaatgtgttctgcaattttgcggagatatttggagaaaattctgtagcttctattcttgtttctcttctagatatcttgtttcttaagaaagatgtgaagcaaaggtcgcgtttattacaacctcttttccagattctatcgaagctcctttctgatcaatgggtctcagttattgttagtcagtataacgaccaacaagatacctcatctgaaatccctgatttatctagttttgtaaaagaagttcaacacttggtactgctggccctcaaagatattacagatacactacaatcgggtcaccatgatgcaatggtcagcagttccgatgtaggtcttcttattgattgtgtacggtccatccaggacataggaactcggaatcatggcttttccttgatagcttctttgggaaaggcttgcccgcaactggtctcagagagtattgttgatttgtttgtcgctattggggatgctattaaacaggacgatagccactcgcaacgtgttttggaggatttattatctgtcttagtcccatgttggttatcaaggaccacaagcatagaaaagcttcttcagatattcattaaagctttagcagatgtgcctgaacataggcgattgacgcttatggtttacctcttaaggtag

SEQ ID NO: 110412 - DNA, 2782 bp, Zea Mays
ttctgagttaaattatcttaggtttgactgcatatcactaactagctaaatttattatactgttttcaggaccatgggaaaagaaaataatttgagtactgtgatcatgcatctgttacactcggtggttgagcggatttcacactcgttttctgtacatcatggggacgattatagattggctatgtcacaggagtgggagtatggattggcagtaaatgtgcttgaccagttttcgtataaattgtggtttccttgtttgagtaagcttctaaaaaacatcagggtgcatgagaagcaagatctgcatcttatgctacatttggcaatgaggcttattctatttaagttgcaagatacagaacttaattttgaacttgaatctgaggaagctgctaattctatccagggttctcttggggcacttatggaggaagttatcttgtgtggtgtgtatgccagagataaaaaaagagatatttgtactgacattactaaagaagtcagagattttgcaaatacaatactcaaaactattacaggctggatgcgtgcttcgacatacttgatgggaattactctgctgttggatcattcagataatcatgtgaaaagaaagacacttcggattttgtctgaaacggccagaggaaacagtttggttcagaagaatcaaaggaaagcacgaaaactgaagcatatatctggtactactattaaagtagacaagagctctggtccttatttcagcaaattgtgcttaaagattctggagttgattgacagagttggtgattcggacactaaagtgaaagtagctgctatttcttcgcttgaaacactagcaaaagaatatccctctgataatcctgtttatagcaactgccttgcaacaatcattgatcaaattggctctgatgaggcagctgtgtcttctgcattaattcatactgtgggctctctggtaaatgtgatcggatcaaaagcattaccacaactcccattaatcatgaaaaacataatgctaatgtcacatcaaatttcatgttgccctagcggaaattatgctcatggttccactagaactgccgctgaactttctaaccaagacataactgtgttgctatctgcactgacaacaattgaggtgattgtggaaaagctgggtgaatttgttaatccatatttgaaagaaatacttgatctggtagtactgcatcctgaatgcagcactcaaatgcatgccaaattagatgcaaaagcagcacgtgttcgagagctattgactgtaaaagttccagtccggcttatcctctcacctttactgaatctgtactctcttactgcaaattgtggagatgcaagtcttacgttggcattcagcatgcttgctagtctagttggtacaatggaccggctggctgtaggaacttaccattcaaaaatatatgaacattgtttagcagctcttgatctccgtcgtcaacaccctgactctttgaagaatataaatatggtggaacaaagtattattcatgccataatctctcttaccatgaaacttacggagggcacttttaggccactttttcttcgtactttggaatgggctgaggctgaagttgatgaatcctcatcaaagaaaagtttggaccgtgcaattgttttctacaaattggttaacaaacttgctgaaaaacacaggtccttgttcacaccttacttcaaatatctactcgagggatctatacaatatctctctgaagacgatgctttgggtggttcgaagcataagaagaagaagaccaaacttgtagatgttcaagttgaacagaaggataaattattggggttaaaattgtggaatttaagagctctagttttgaaatccttacaccaatgtttcctctatgataatgaccagaagatccttgattcctctaatttccaggttcttttgaaacctattgtctcccagttcgttgtggaaccaccaaaatctgttgaatcagttcttgacgctccatcaattgaagaagtagatgaaactataattctgtgcttgggccaaatggcagtaactgcacggacagatgttctttggaagcctcttaaccatgaggtgctgatgcagactaggagtgatgaagttcgccccaaaatgctgggcctgaaggttatcaggtacatggtccaacatctgaaggaggagtatgtcgttctcgtaccagagaccataccgttcctaggcgaattgctcgaggatgtggagcttcctgtcaagaccctgtcgcaggagatcttgaaagagatggaaaccctcagtggcgaaagcctccagcagtacctatgaggcatcatctcctcgcggtagtaccgtttggctgatgaactgtagaacatctactcatttcctgtggattaccagttcaacagatcggcatacttgtcggatgtctggaaactgaaattacatgctgtccaattcatggaaggcaagtgcaattaacttaaccttcaaggaggcaaatgcagtttaaggaaaacttacacgttgaaagcacccatattatgttttcggatgagttcctatgtagctacgttgaaagagtacttttctacacaattgattgaggtgttctcgatttgatctctttttgagcttttggtgtcgttgggattttgcgctaaatattggaaattagaccaaggggctgtttgttcgttgtgaaggaattataatttacttaatatagtaggttatttggtttggaatttaata

SEQ ID NO: 110413 - DNA, 1366 bp, Zea Mays
atgagggagcacttgcaatactgcaacaagctggtcggcacgcggcggcactatcgccgctgtgcgccggcaacgccccacatcgccgtggccatcctcctcatcgcgctcggcgtgctctacctcgccttcagcccgaccaactccgacctcaacctcgttctcagcatgccgcgcgtccacgtcgtgttcaacgacgaaccggtccgcaaggtcgcgcccgttgccgccgcgcctgccccaggcaacgcgaccgacgacgacgaggacagcggcctcccgccgcctcggcagctgacggacccgccctactcgctgggccgagccatcctggactacgacgcgcgccggtccgcgtggctcgcggcgcacccggagctccccgcgcgcgtggggcggcggccgcgggtgctggtcgtgacggggtcggcgcccgcccggtgccccgacgcggacggcgaccacctgctgctgcgggcgttcaagaataaggcggactactgccgcgtgcacggcctcgacgtgttctacaacgcggcgttcctggacgccgagatgtccgggttctgggcgaagctgccgctgctgcgggcgctgatgctggcgcacccggaggtggagctcctctggtgggtggactccgacgcggtgttcacggacatggcgttcgagccgccgtgggagaggtacgcgcgccacaacctcgtgctccacggctgggccgccaaggtgttcgaggagaggagttgggtcggcatcaacaccggcagcttcctcatccgcaactgccagtggtcgctcgacctcctcgacgcctgggcgcccatgggggtcgcgcggccccgtccgcgacaggtacggcgagctctttgcccgggagctctccgggcgcccgccgttcgaggcggacgaccagtccgcgctcgtctacctgctcgtcacgcagcggggcaggtggggggacaagacgttcatcgagagcacctacgagctcaacggcttctgggaagggatagtggacaggtacgaggagatgcggcggaaggggcggcccaccgggggtctcggcgacgaccggtggccgttcgtgacgcacttcgtcgggtgcaaaccgtgccggcggtacgcggacagctacccggcggaccggtgccggcgcggcatggaacgcgcgttcaacttcgccgatgatcagatactgaggctgtacgggttcgagcacgagtcgttcaataccactgccgtgcagcgcgtcggaaacgagaccggcggcccgctggacgctgacgatgatgagctcggccggctattgcatcccacgttccgggctgccacgcccacacagacgtagtcgtctccacgttca

SEQ ID NO: 110414 - DNA, 2164 bp, Zea Mays
cttccgtgtaatgccttccaaagaatttgtttcctccaattttctgacgccgtaatcctgccaaccaaagagcactgcagtgccgatttctataggaacaaaattcctattctttccctacaaacttcctacattcagggtcctcctcgtgtgcccatcccatattcaagattacgtccgctgactcctcaggcctcccactgcgtgtggggccgagccagcttgctccatcaagccgagagcagtctcccactcttctttctcacctcgcatcgcactgcctcaatctctcgtctctattgcttctctgccggagctcctacaacctcgcctcgcgcagcactccgctcaccctccctgactccctccctgccgctgggatggccggcaaacgagttacgggccgcgatgggcaagacgagggcggcgccaaggccgggctcccggcgatggacatctccctcgcgttcccgcaggccacgcctgcctccattttcccgccgtccgcttcggattattaccagtctgatgatttgctgaccagtgaagagcgctctatcaggatgaaggtcaggggtattatggaaaaagaaattgctcccattatgtcagcgtactgggaaaaggcagagtttccatttaatgccattcctaaacttgcaagccttggtgttgctggtggtacaataaagggttatgggtgcccaggactttccattactgccagtgctgttactatgtcagaaattgcacgggtagatgcaagctgttccacatttatactgctctttgtggatccgaggctcagaagcagaagtacttgccatcccttgctcaacttactactgttggctgttgggctttgacagagccaaactatggaagtgatgcgagctccttgagaactatagcgaccaaggcacctggtgggtggcacatagatggtcaaaaacgctggatcggtaacagtactttcgccgatgtgctcgtcgtgttagccaggaatgcagacacacaacagctaaatgggttcattgtgcggaaaggagctcctggcctgaaagctacaaagatcgagaacaaaattggcctcaggatggttcagaacggtgacatagttttgaacaaggtgttcgtccctgacgaagaccggttgccaggcatcaactcgtttcaggacatcagcaaggtgctcgccatttcacgcattatggtggcatggcaaccggttggcatatcaatgggggtcttcgacatgtgccaccggtacgtggcgccatacgttctgacacttctttcatcacaggcaatcctttcaccccccccttttcttttgtcatgtaaaaaacaaaaaaacaaaaaccgatcgaaacaggtatctgaaagaaaggaagcagttcggagtccctctggcggcgtttcagctgaaccaagagaagctcgcccggatgctcggtaacgtccagtcgatggtcctcgtcggctggcgtctctgcaagctctacgagtcggggaaaatgacgccgggccacgctagcctagggaaggcttggaactccaggacggcccgcgaggtggtctcccttggccgagagctgctgggtgggaacgggattttggccgacttccttgtagccaaggcgttctgcgacctggagcccatctactcgtacgagggcacgtacgacatcaacagcctggtgaccggcagggaggtcaccgggatcgcgagcttcaggcccgccgcgccagcgaaagcccggctgtgacgtgataacctgtgtccccgtgttgcagggaactggaggcgaataaatcatgatcaggtcgtcgtcgtcgtcgccatcgaacaaactgagcacgttcctggaacccgcccggtcaacgttggctgctcacatggtgtaccgtagccgagtgcggatgggaacggattcctagatatatgtagtactatacgaagatatctgttgcgggtggattactgtaaaccgggtctaatctctgttgcggtgtttgccgtctttggtcagaaggtaaggggggaacgccaggcagatctggtgggtttggttgttgttgttgtcgtgttgggtgggtagcatgcgagtgtggaggcctcgaccaatgaataaaacatggtgccgtttgggcggtagtacgt

SEQ ID NO: 110415 - DNA, 2086 bp, Zea Mays
cttccgtgtaatgccttccaaagaatttgtttcctccaattttctgacgccgtaatcctgccaaccaaagagcactgcagtgccgatttctataggaacaaaattcctattctttccctacaaacttcctacattcagggtcctcctcgtgtgcccatcccatattcaagattacgtccgctgactcctcaggcctcccactgcgtgtggggccgagccagcttgctccatcaagccgagagcagtctcccactcttctttctcacctcgcatcgcactgcctcaatctctcgtctctattgcttctctgccggagctcctacaacctcgcctcgcgcagcactccgctcaccctccctgactccctccctgccgctgggatggccggcaaacgagttacgggccgcgatgggcaagacgagggcggcgccaaggccgggctcccggcgatggacatctccctcgcgttcccgcaggccacgcctgcctccattttcccgccgtccgcttcggattattaccagtctgatgatttgctgaccagtgaagagcgctctatcaggatgaaggtcaggggtattatggaaaaagaaattgctcccattatgtcagcgtactgggaaaaggcagagtttccatttaatgccattcctaaacttgcaagccttggtgttgctggtggtacaataaagggttatgggtgcccaggactttccattactgccagtgctgttactatgtcagaaattgcacgggtagatgcaagctgttccacatttatactggtgcactcctctcttgcgatggtgacaatagctctttgtggatccgaggctcagaagcagaagtacttgccatcccttgctcaacttactactgttggctgttgggctttgacagagccaaactatggaagtgatgcgagctccttgagaactatagcgaccaaggcacctggtgggtggcacatagatggtcaaaaacgctggatcggtaacagtactttcgccgatgtgctcgtcgtgttagccaggaatgcagacacacaacagctaaatgggttcattgtgcggaaaggagctcctggcctgaaagctacaaagatcgagaacaaaattggcctcaggatggttcagaacggtgacatagttttgaacaaggtgttcgtccctgacgaagaccggttgccaggcatcaactcgtttcaggacatcagcaaggtgctcgccatttcacgcattatggtggcatggcaaccggttggcatatcaatgggggtcttcgacatgtgccaccggtatctgaaagaaaggaagcagttcggagtccctctggcggcgtttcagctgaaccaagagaagctcgcccggatgctcggtaacgtccagtcgatggtcctcgtcggctggcgtctctgcaagctctacgagtcggggaaaatgacgccgggccacgctagcctagggaaggcttggaactccaggacggcccgcgaggtggtctcccttggccgagagctgctgggtgggaacgggattttggccgacttccttgtagccaaggcgttctgcgacctggagcccatctactcgtacgagggcacgtacgacatcaacagcctggtgaccggcagggaggtcaccgggatcgcgagcttcaggcccgccgcgccagcgaaagcccggctgtgacgtgataacctgtgtccccgtgttgcagggaactggaggcgaataaatcatgatcaggtcgtcgtcgtcgtcgccatcgaacaaactgagcacgttcctggaacccgcccggtcaacgttggctgctcacatggtgtaccgtagccgagtgcggatgggaacggattcctagatatatgtagtactatacgaagatatctgttgcgggtggattactgtaaaccgggtctaatctctgttgcggtgtttgccgtctttggtcagaaggtaaggggggaacgccaggcagatctggtgggtttggttgttgttgttgtcgtgttgggtgggtagcatgcgagtgtggaggcctcgaccaatgaataaaacatggtgccgtttgggcggtagtacgt

SEQ ID NO: 110416 - DNA, 910 bp, Zea Mays
cggtgatgtaaatctgcttgcctattctcactgtgtgcaagcaggtgctcgccatttcacgcattatggtggcatggcaaccggttggcatatcaatgggggtcttcgacatgtgccaccggtatctgaaagaaaggaagcagttcggagtccctctggcggcgtttcagctgaaccaagagaagctcgcccggatgctcggtaacgtccagtcgatggtcctcgtcggctggcgtctctgcaagctctacgagtcggggaaaatgacgccgggccacgctagcctagggaaggcttggaactccaggacggcccgcgaggtggtctcccttggccgagagctgctgggtgggaacgggattttggccgacttccttgtagccaaggcgttctgcgacctggagcccatctactcgtacgagggcacgtacgacatcaacagcctggtgaccggcagggaggtcaccgggatcgcgagcttcaggcccgccgcgccagcgaaagcccggctgtgacgtgataacctgtgtccccgtgttgcagggaactggaggcgaataaatcatgatcaggtcgtcgtcgtcgtcgccatcgaacaaactgagcacgttcctggaacccgcccggtcaacgttggctgctcacatggtgtaccgtagccgagtgcggatgggaacggattcctagatatatgtagtactatacgaagatatctgttgcgggtggattactgtaaaccgggtctaatctctgttgcggtgtttgccgtctttggtcagaaggtaaggggggaacgccaggcagatctggtgggtttggttgttgttgttgtcgtgttgggtgggtagcatgcgagtgtggaggcctcgaccaatgaataaaacatggtgccgtttgggcggtagtacgt

SEQ ID NO: 110417 - DNA, 1987 bp, Zea Mays
aggatgcggagatgctaagtaggaattcttctcggacctccaccaagcacctgttatctgtgtatgcggagaagttagattattaagtgcagttgggcctgacttgttttatggctcgaaataatgagggccatctcgagctgccagagatggatcaaattcaacccaagaacatcccacacaatgaatcactgcctctaggccagaagcttctcctgcatcatggaagtgatgcgccccttagaattggtcattcaagtcatggaaatatgggacttagaataaatgatcttccatcttcaagtcgcactgtgcagactctaggttatagagttgggaacccaggaacctcgcatgctccctttgttcattttcatgctggaagttctggtagccatttaccagaccctgctgtgaattatccacataggtctgaggaaggcttcgctccagtgggttcccatatggacaacagaagggctgcaatgaagcgaaaaggtcccagtgtacaccctgcagggatcagtgctactggttattatgttggaagttcttccagtactcagccatctaactctgtgcagccaaatgcagctccacttgctgagccctttctccgtcaaatacctttaagcattgaccaaagtggttgggatatccaacacttgattcaccaagaagggtttcagaggaatgtgagagcacgccacagtagtattccattagtacccagatcagcttcaacatacccattaaacataaacagtgttcatgtgccgtcattcggttcaaccgcaagtgcttcctcaagtgcaccagtggaaatgaaccaagtgcctgtttctttgccaacaagaactctaccatcaggtgcaccaggtatgactagcagggtcccaacagggagggcttactatcctgtggttggaagcagcagcagcagctcaagtgttggtgctgtcccaactatccacggatcatctggcgctgcaatgtttgctaacggtggctatgttcctagtagtgttcatgctggaactgttccgatcttccctaacccagcgcctgctacttcatctggctccagagccatgccccaccagatggtcattcagagtcatccagctgctacttccgcagcaacatctacatccatgcggaccgcccaaccatcattacctgccagaaccgcagcggcttccagacatgcaaggcatgtgtcagcagggcttgccaacaacggaaggtacagaagggccaggagctcttactacaggcttcatccattgatggtagaggcagagcggttcatgatggaccacttggtcttctacgaatcgagagcagcagctgctgacccccacagggacatgagactggacattgacaacatgagctacgaggacctgttggctctgggagaagctatgggcaatgtcaacacaggcctggccgatgaaaaagtttccgagtgcgtgaaagaagtggtctgctgcagttctgaccacacgcagatggaccaagacgacggaagctgcgccatttgcctggaggactacagagacaaggaggcgctgggaatactcaagtgcaggcacgacttccacgccggctgcatcaagaagtggctgcagacgaagaactcgtgcccggtgtgcaaagcggccgcggcctagtagggagggacacgccagatgaggaggaggaggagcaagcgactgttgcgctcgatccgattcatttttaggctcaggtcaagatgtatgccgtctcattcttttttttcccatcctcctagccagggcagccgtgtaaatagatgctcttatgggattaactattttctcttgggttacattggcccagattcttttgttgtatttaacaataacaacccagttgtggaagactggaaggtattgatcgtcaagtggttatacattagtctcatgtcggggttttcggatccgccgacacttgaaattag

SEQ ID NO: 110418 - DNA, 1437 bp, Zea Mays
gttcattccgttagactggcaagggaaccttttctttcaggtaatcagccacgccaaaaaaaaaacagcctatcactgaccctctcacaagacagcaaatcagcatcattaccaccttgtgatcgtcagaaaaaaagatgagggaactcggaccctctcgtgtctgcacttgctgctgcttgaagcaagcatggctgttaggctgttccacctgggcaggggcagctcacctcacctcaccgtttggtgccctgtaactgtaagactcacccccaccaccttctcttacagctcactcctctccacccacctcgctataagtgccagctagcgtcacgagcccctgccacaccgatcctcccagctgcatctgcattgcattgcatgcacaggtcgcgcccaccatcagtagcggtcgccgccatgcagagactcgtgcgcgtcctcgtggtgctgggcgtggccgccgcggcgtcggcgcagggcccgacggcggcgccaacgacgcccacgccggcaacccccgcggcgcccgcgcccgcgacggcgtccagcaacatcacgggcgtgctggccaaggccgggcagttcaacaccttcatccggctgctcaagtccacgggcgtggcgtcgcagatcgacaaccaggtcgccaacggcgggaacggggtcacggtgttcgcgcccacggacaacgcgttccagtcgctgccctcgggcacgctcaactcgctgtcggaccaggacaagaacgcgctggtgcagtaccacgtggtgtccaccgccatccccatgtcgcagttcgacaccgtcagcaacccgctccgcacgcaggccggcagcgcctcgccgggggagttcccactcaacgtcacctcctccgagggccagcaggtcaacgtcaccacgggcgtcgtcaccgccaccgtcgacaactccctctactcgggcgacagcctcgtcgtctaccaggtcaacaaggtgctgctccccatgaagctcttcggcgccgcggaggcgcccgcgcccgcgccgctcgcgccggccaagaagaagggcaagacgccggcggccgtcgccgactcgcccgacgcggcggaggcgtccccggacgccacgaccacgtcgctcgcgcccgcgaggctgacgcggggtggcctcgccacggctcttgcgctcgccggcgtttggtgggggctgtagtcacggcgaggagtgtctcgtcaggtctctccggtggccgtgacatctatactttttttttcgttcgcgggtcttgtttgtcttttcgtttttactttattgcccatttttggatgaattgttcttccctgtcattcaaattgctaggagtatgtcatgtcatgtaacgtccttgtcccatttttatgtaatgttaactaaataaatatgagttgtgtatatttcagtaccccg

SEQ ID NO: 110419 - DNA, 1313 bp, Zea Mays
accatccaagccatagcgagcgcccaccgccaacccaccaccactacgccacaccgatcgccatggccgccaccacgccggcgcctccctcccacggcggcgggcgcaacggcaccctccctccgccgctgccttccaacgagtccttctccaagttcttcgagtcctggatctcggagcagtcccgcgacctcgaggagctgcgcgccgcggcgtccgcggacccccccgcgcccgagtccgagctccggcgcctcgtgggccaggtgctcggccactacgcgcagtactaccgcgccaaggcggcggccgcggccgacgacgtgctctgcatgttcaccccgtcctggacctccaccaccgagaacctctacctctggtgcggcggctggcgccccaccgccgcgatccagctgctgtacaccaagtccgggatgcagctgcagcaccagctccccgccttcctcgacggcgggggcctcaaggacgacctcggcgacctcggcgccgcgcagctccaggccgccgaccagctgcagcgccgcaccatccggagggagcgcgagatcgaggacgccgccgcgagcgcacaggaagcgctgacgacggcgacgatggtggagctcgcgggcggcggcgggagggacgcgggggccatggaccgggagatgcaggcgaaggcggaggggatgaggcgggtgctggagatggcggacgcgctgcgcctcgagacgatgcgcgaggtggtggcgctgctccgccccgcgcaggccgtgcacttcctcctcgccgccgccgagctccacctcgccgtgcacgacttcgggcgccgcaaggacggccgcgccggcaacgtcgccgccgccgcgccgccggagtgacggacgctggcgcgcgtgaaacgataacgggcttgcctgcctgcctggctgctctgcttttgcttgtgtcgtgtagctggggggctccctgttccaagcggcgcatggctgcgcctgctcgcgcgcgcgcgttcgttgcccctgacgtcgcgctcgtcgcctagctacccatccataaaggctgcggctggtttggtcagcacgagctgtcgcgataagcttctgaccatttgttcctcttgctgtgcctgtgcactgtgcagtcgtgagtcgtgaccatgcctgtctttggagtaaagcgagatcttgtttgggagtagtagagatgttatgcttcagcagtgaaatgaaaataataatttggatttggtttcagcgcgacaatgaaatagatgttggactgacttttgggatcatgtttacagcaatcaa

SEQ ID NO: 110420 - DNA, 1293 bp, Zea Mays
tatttttcactcccacccctagccgccacttccatttctccctggctgcttcctcccacgcgcagcagcaagcgcccttcttcctccctgccttcttcctcgctgctcacggcagcagcagccagcgcagggaacttcctccctcctccacgcaggatggccgagcctctgctctagccgagctcccacccagggcgcccctctcccttcttccccctacttggagcttcccatggcgccccctgctctctccttttccatggcagccgagtccagccatggccgagttccctgggagcacgccgacgccctactctcctccatggccggcgctcgagctccactcctccccatggcgccacccccctgcagtttcccctctgcctcggcgccctccctgctccatttcttttttttcccctgctgttcccctgcgtgcagggagcactagggccggcgcccagcaacagcaaccgggtcttcttcctcccctgctgtccacggcgcgcagcaaacagggagctcagctccatctcccctcacggcaggacacagcagcagctcgccccgcctctcctcgcaggcgcagccctctcccatggcgcgctgcagtagatgccgtggagcattccctccatgccttgcgactcggtttccttcctgcgtgtgtgctgctgcgcctgcgccgttgatgcttgctaggcgctcgacaaaatgtgcagcagccccaacgtctccgcgcggctcgctgctttttgctgcgcagtgaacagcacgccgtcgacgctcgtcgggtgtttgctgtttttgcgcagtgaagagcacgccgtcgacgctcgtcgagtgtttgctgtttttgcgcagccccaacatcatcgtcgttcaccccggtgagaccgcgacgctccttgttcgattccgcattgaacgttattttcctatgattaattatgtatgtgtgctgctttggttttatttttgtggaggagagaaaaccccgtgtttgcgtggaggaggcaagtcgttcaacgctcgtcgatgtgcgaagctatgcacaaatcggaatcacccgtcgttcttgcaaacgccgtttgggtttgtttatggatgctcgtgatgggtgtgtgattgaggagtgatgtgatggcaacaacaacatgctatcttaggtgactgatgtgttaactaaattaagttgagaaaaggttaagaaacgttaattaacctgctcccaccccatgttttgagttgcaatgtctaaatgggttgctaagtcttatgatgtgattagcc

SEQ ID NO: 110421 - DNA, 863 bp, Zea Mays
aaggcaagcggatttcattctagttctagcgctttgtcttgctggcggtcgtgctcgtgcacctagctaatggaccctgtgccattagccggttgggtctttgtggtagaggacttccgctttggcaggaggcccagcccgactagggttctgtccaccttccagagccctagctccggcgtctctagcgatccccaaaacccactccgccgcatttctgccgacttggccggattggtcgcttattgagatggctacgccacttatagcgggacttgcaattgcagcaactgcccttgctggccgatatggcgtccaagcttggcaagcttataaggcaaggcctatagttccaaggatgcggaaattctatgaaggtggctttcaacctacaatgaaccgaagggaagctgcattaatccttggtgtcagggaaactgccaacgcagagaaggtaaaagaggcgcacaagagggttatggtcgccaaccatccagatgctggtggaagtcattaccttgcgtcaaagattaatgaggcgaaggatgtgttgtcagggaaaacaaaaggaggtgggtcggccttctgattgtagaattaagaatgcactctctgctagaaggataattttgtgcctctaaatttagcattagaagatactgtagaccgcagtttagtcttggtattgcgaaaatttctgggcaaagcatattgggccttctgtgaagtagttatccagtgcttattatttattaatactctcagctgtgcctgcttctataaagatatacatgatgaaggttacatcacaacatgtttcttcacaactaagtctcatgtcgtgggatcttcattgctcttcg

SEQ ID NO: 110422 - DNA, 913 bp, Zea Mays
caaggcggtgcgtggctgcgtgctgcggctatttaaaccgctacccgctgccgagagggacggaccttccattccagaaacgagcgccgagagcaaaagatggaaatggaaatggagtccacttggaagaccctgttccagcggagggtggtgttggcggccaagcactgctacaacgtccacgagcgactcctcaaggtgctcgtgcccttgaacgccgacttgcaggacaggcgccgctacccggggcccttcgcggaggcgacgcggcgcgagctcgagggcgcctcgatggagctcggcctcgccgtcgccagcatgggcgcggcccgccacctggcgctccggggcggcgcgccgtgcccgagcgcgccgttcgactccgtggacgacctcgccggggaccccggcgtgtggtgcgcgctggagaagctcgcgaacgccgcggcgctcgccacccgcgtacacgacgccctggagcttgcctgcggccacctgcgcgctggcgaggtcctgctggctctggacgaggccggcgacggcgacgagcagagccccagcagcgagcagcttatcggcgttatggtgctctcggaagcgatgttgaaggcggcggacctcgccacggagaccgccgaagcgcgcgaggcggcgttcggcttcatcggccgccgcgtcaagtgaggtcctccggtgtcaggaatccgcaggactcggtggttcgattcgtcacccgatcgcctgtttgagtttagtaattcttggaatggtggaataacgaacgtgcctgtttagtaattcttggaataacgaatcgaacgtgactttttttttgttgtgatttggtaaaatcttggaatgatgaatggtccatccaccatgtgccttgcggctaatgtgggtatttttccca

SEQ ID NO: 110423 - DNA, 1482 bp, Zea Mays
atggtcgagagcttcctattgcggcgccttcccatcgcctcctacgcccagccgcaaccgcagccggcggcagcgcccggcttcgacttcctcagtgaggtctacggcgccgcctcgttcgccgggcccaatgctggtgactatggcggcgagatggggttccttgacatcgtcgagcccaaggcagcatcagcgacactggtggacggcgccacgggcctcggtgcctgcaaggtggagcccggcctggcgaagagcggcggcgcgttcggcactggcgctggtgccgcgccgccggcggccctggcgtccaagaagaagagggtcgaggggatgttgtccaagaacctgatggtcgagcatcgccgccgcaagcgcctcaacgaccgcctccatgctacgcctggcccaagggatgcccctctcaaatgtttcatcaggagggaccgggctgctcagtcgtattctctgtgccttggagtcactgatgctgatgatgggaaatttctacttgctgcacgcaaatgtcgtaggcctgcatgcactaggcccgcatgcactgaatacctaatctcgcttgatgcgaagaacacatcggctggttcctacattggcaagctaagatcaaacttcttgagaacaaagtttaccgtctatgatgctcatccaccttgtgccagagctgcggtttcaaagggttatattccaggacctgccggagaggatcaagctgctgcaggaagagatcgggcagtagcaggaggaggcgccgggcatgctcagcgttttccgggacctcaaccccgacgagatggtggccaggaacaccccaagaagaaatcaccggctccgcttcgcggcagttgcaacgaccagggccagcagcgagcaggcgccgtccgcctcggagcggcgcggcgtgcggtcagcagggctgtccgggctagcagcagcaggcatctgggccccgtgtgggcgctcgtctccgaggaggccgcctccggcgagcgggcggcggagggcgagggagaggacgtcgaggtgaggctgttcgtgggcctccccgcggacgcggtggtcttcgacggccgaggcgtgggccggcgcagggccgtctcggcggcgctgcgcgcgctcaagctgctcggcgtcgacggcgtggagctgccggtgtcctgggccgtcgcgacgctcgaactccgcgtctcgctccacaccgacggcgacgcgctccccggatgggtggccgacgcggcggccgccgaccccgacgtcctcttcaccgaccgctccggccaccgccgcgggctgcctcttctttgccgtcggcgagctccccgtgctcctcggcaagtcgccgctccaggcctacgaggcccttcttccgcagcttcgatgacttgttcggatcaacgatttttaataatgcgtagtggagatagtggagatcaacttgaaatgatttttaataatttgttataa

SEQ ID NO: 110424 - DNA, 1080 bp, Zea Mays
atcagctcgcctaaacatctcatatatgtttatcaatacaaccacacgtgacatctacatataaccatgcacgctccgcataatcgacaacctcaacctaacatatatatcaaataattaatgttgatttgtcgatcgtgtttgcgaccaaatcgatactgacaattacgatatctactcactatgttcgtcagtccaactaataggaataataatttaacttaccaagatcaaatcgatttgaaatcacaagaacgacggcggttgatggcacatattagcaaaagagccggagacgatgacgttgtaggcagcaaggcgaggctgagtccgccgcgaaggaacagcccgcagccagagcgctcgcgcgacgatcaggacaataccgatgaatcgacgacgagcaccataatcagcctgactcgaatccgcgagattggtaatgattttccaatacaaacaatttgtcgaacgcttggcaggtgccacacgaacatcatgctgctagctctgtcttcacggcttgggacttggcgtagacgagaacgacgatcgatgatatcaacgtgccagcgcgacgatttccatttgatgacggtgatggcagtacgacttgttcgagttgagacgagcgcgatccaggaaccacagcagtacgtcgataagtccatgacgacacaacgaggtgaacgcgacaacacacggctcaatgggtaaagagggcgcgacggctgaggagctccgtccaaacgagccttcggacagtgatgaaccagaccgcgagaaggtcatggtgcgggcgagtgagaacgacgttgtgccgaagttgcagagaacgacagcagtgatttggtggtgctggacacgaagaacaacggcacgaccgcggcttgagctggggcagggagggctagaggactgcggcgtgcagggctccacgacgttggaatttctggacgcgcgacgagctagagcagagggcaggggatggaagcagcggccaatttaaacggtgcttgagcggtgactgaggataggagcgtgcgggatttttccatgggtcttgagcggcgcacgctg

SEQ ID NO: 110425 - DNA, 2091 bp, Zea Mays
gatatttcatattcttagtgaatgtgcaattaagattttactttggcctcctatgaaggctcatatggttatacatgttaccttcctaagaaaacaaattttcagcccatcattttctaatcattagtttggctgtggctgtttgacatgattctacttgaacttgagtctcagtatttgttttcttcatgagcatcctctccattttaaatgacagttatttgctacagaatatgtcttacagggggcaaagaagttaataatgctatagtgagcagtatacaggacctggcaaagtcattctcaaattaccatgatgaggtcctggtgaaacgtgaagagttacttcagttcacacaaagtgccatttcaggtctaaagaggaatgctgacattgtgaggtgaccactattctactgatttgctcatgaagtctaatttttcatgcgtgtgtgagcaaggatggaccagcctgatacaatattctgaagctctagatttgtggaagaaactacatgagaaggaggcatcacgagctcaatcaattggcgatcctgataaagttacagaaaagacttcaactattgagtctttcaaagaagcactcaacgaagtccgattttgctctagaatggaggaacttctattgaagaagaaaacaattaatactggggattccttagagatccactcccaaaaggttgagaaattaaaggtattggcgacttcccttgctaattcatcctccaaggcagagaagcgtattttggatcacagacgccagaaagaagaggctcttaactttcgtgctaaaaaggagaacgaagtgattgctgttgaaaaggatttgactgctgagatttctgaattggagaagcaaaaggatgaacttgaggctcagttaaagaaggtcaacatttcactgaatgctgctatttgtcgactaaagcagacaagagaagagagggaccagtttcatgaagcaaacaatcagatgatatttactttacaagcaaagaatgacctgtcaaaatctattgactcatgtaacatggaggccagtgtagtcaagacttgggtaaatttcctcgaggatacatggcaacttcagttgtcatacaatgaacagaaggaaactaaaacgaatgacgagctggagagatgcacaagcagttttctgaagttgaccaagcatcatctttcctatttcaaggaagttcttagcccgtcaattgagcggatacgcacatacgtggataatttggcagtcttaaactctagggaggagtcaatagaacatgaaggggatgatgagatttctgtgcagacaagtccacaaaagtcccttgaggaggaatatttggaaactgaaaagaagatcgtgattgccttcagcattgtagatcgcatgaagaagatgttttattctgagcaagcggctaattctaggcaagatgatgcagaggtcaggaccttattttctgagattgagaaactgaaggaagtgtttgagtcggtagaaaggccgacactagacattgaagtccgcaaggcaaaggatccaatgaaggacaagtctggatcgaatcgttcagccaaagacaaatctgaatcgagccattcacctgttcaggtgccctcttcacctaaagatgtgcccgtggagtctccgaaatctccagtgaaacctgagcagacgatggacccagattcagagtttgcaaagttagagctagaattcggaaaagttaacagagaccatgaggagataggcggttgggatttcgacgagcttgaagaggagctgcgagctgacctatctaaatcaaccaatccaaaataaccacgctcaacccgacatctctgaacgcgcattccacctaactttccttgtgctggcttcttctgaaaatttgtagactttgaattgttgaatgtacatagtattgttgtttcattgtgtccatggacgttctatagattatactcactacatgggaggtggagattgttacactgtagactgacatttcattagcttatttgtttggtcttgtcatgtgcattcatacatgaatgaatgaatgataa

SEQ ID NO: 110426 - DNA, 2071 bp, Zea Mays
gatatttcatattcttagtgaatgtgcaattaagattttactttggcctcctatgaaggctcatatggttatacatgttaccttcctaagaaaacaaattttcagcccatcattttctaatcattagtttggctgtggctgtttgacatgattctacttgaacttgagtctcagtatttgttttcttcatgagcatcctctccattttaaatgacagttatttgctacagaatatgtcttacagggggcaaagaagttaataatgctatagtgagcagtatacaggacctggcaaagtcattctcaaattaccatgatgaggtcctggtgaaacgtgaagagttacttcagttcacacaaagtgccatttcaggtctaaagaggaatgctgacattgtgaggatagattctgaagctctagatttgtggaagaaactacatgagaaggaggcatcacgagctcaatcaattggcgatcctgataaagttacagaaaagacttcaactattgagtctttcaaagaagcactcaacgaagtccgattttgctctagaatggaggaacttctattgaagaagaaaacaattaatactggggattccttagagatccactcccaaaaggttgagaaattaaaggtattggcgacttcccttgctaattcatcctccaaggcagagaagcgtattttggatcacagacgccagaaagaagaggctcttaactttcgtgctaaaaaggagaacgaagtgattgctgttgaaaaggatttgactgctgagatttctgaattggagaagcaaaaggatgaacttgaggctcagttaaagaaggtcaacatttcactgaatgctgctatttgtcgactaaagcagacaagagaagagagggaccagtttcatgaagcaaacaatcagatgatatttactttacaagcaaaggagaatgacctgtcaaaatctattgactcatgtaacatggaggccagtgtagtcaagacttgggtaaatttcctcgaggatacatggcaacttcagttgtcatacaatgaacagaaggaaactaaaacgaatgacgagctggagagatgcacaagcagttttctgaagttgaccaagcatcatctttcctatttcaaggaagttcttagcccgtcaattgagcggatacgcacatacgtggataatttggcagtcttaaactctagggaggagtcaatagaacatgaaggggatgatgagatttctgtgcagacaagtccacaaaagtcccttgaggaggaatatttggaaactgaaaagaagatcgtgattgccttcagcattgtagatcgcatgaagaagatgttttattctgagcaagcggctaattctaggcaagatgatgcagaggtcaggaccttattttctgagattgagaaactgaaggaagtgtttgagtcggtagaaaggccgacactagacattgaagtccgcaaggcaaaggatccaatgaaggacaagtctggatcgaatcgttcagccaaagacaaatctgaatcgagccattcacctgttcaggtgccctcttcacctaaagatgtgcccgtggagtctccgaaatctccagtgaaacctgagcagacgatggacccagattcagagtttgcaaagttagagctagaattcggaaaagttaacagagaccatgaggagataggcggttgggatttcgacgagcttgaagaggagctgcgagctgacctatctaaatcaaccaatccaaaataaccacgctcaacccgacatctctgaacgcgcattccacctaactttccttgtgctggcttcttctgaaaatttgtagactttgaattgttgaatgtacatagtattgttgtttcattgtgtccatggacgttctatagattatactcactacatgggaggtggagattgttacactgtagactgacatttcattagcttatttgtttggtcttgtcatgtgcattcatacatgaatgaatgaatgataaacattatgtagcattccacattttggacattggaacatatattaactataacg

SEQ ID NO: 110427 - DNA, 1419 bp, Zea Mays
agcataaacttagacattttatattttagaacaggagtacgatttctgaaaacacgtatccttattatgtaacaagtagtagtagcaacagcagctagtaatacatcaacttttgcatgcaactcattgctgcatcacacaacacaacacatcaacctcagttgcacgcacttgccgctccttgaacagcatcacctgcagtcttcgtcgtacatgcgcgcacacacacaggctcatacattacacgaggaacacggtgaactggagtacggactcgacgccgtcggtctcgagcagcgcgccggacgccgccacccctccgggcctcaccacggccaccttggcgaagcccttcgcaccgacgtacttccccgtgccgccgacgacggcgaggtgcgactccgagtccgcggtgcggtgcacgccgaagaagctgatggtgtcgtcgaacccgccttccttgaacatggcggtcacagccacggtctggctgacgccctcctccgagctggcgatgtagaagccctgcgcgcggcccaccgcggcggaccccagctccggtgcctccgtcagctcgtcgtccaccacggtcatggtcccgaagaggagcttctgcagcgtggtgccctgcgggaggctgcctccggcgaagaccggcacgccgttcccgttcccgttcccgttgccgttgctgccgacggacttggcggcgttggtggcgccgcccaggcccgtgaggaagggaatgttgttgttgtcgatggcgcccgccgcgccggagttgacgttcacgccgctgttgagcggcagcacggcgccgttgggccgcgcgaagggcagctgcccggtgaccgcggcgttgtccacgatgccggccacgatgcgcgccgacgggttcgtgcccccgaggatgtcgtgcatgaagaagaccatcccgtggccgtcagcgccgctcgctgcacccgctcccgcggccccggccccggcccccacagggatggtgctggctgcgaccggagctgccgcagcagcagcggggatggcattggcagcgaccggtgcgtctgctgccacggcgcctccgggcgccgccaccacaccggcgcctcctaccacaggtggactggcatcggcagtgaccggtgcgtcagcagcagggtgcgctatggccggtgcggcagcgggcgccgcagcaccagtgccgtcgtcgtcgtcgtcggaagtcagctgacgcgtcggtctcgccgcggtagcgctgggcgcgacgaggaggaggacgaggatgaggagaagggaagagagtccgatggccgctttcttgaacgccattcgagcaggcaaggctctctctctgtttctagctcgccccgctggtggtgatgcactgatactgcaactgtttgtgctctgactgagctg

SEQ ID NO: 110428 - DNA, 714 bp, Zea Mays
cctctcgccccggatgcggcgcgcgagctggatgtctttgggcatgatggtgacgcgcttggcgtggatggcgcagaggttggtgtcctcgaagaggcccacgaggtaggcctcggcggcctcctgcagcgcggccacggcggaggactggaaccggaggtccgtcttgaagtcctgcgcgatctcccgcaccagccgctggaacggcagcttccggatcagcagctccgtgctcttctggtacttgcggatctcccgcagcgccacggtgcccgggcggaagcggtgcggcttcttcacgccccccgtggccggcgccgacttgcgcgccgccttggtcgccagctgcttccgcggcgccttgccgcccgtcgacttgcgcgccgtctgcttcgtgcgggccatcgctgccggcggggattagcttgggagtgagcggcgaggggggttcggatggtttgagagatggggcgccttgcaagctgtgtgatgcggtctgccgtcggagggggctttgggtttatactggtggcagagggtgtgcttgcctgcttgggcgggcacgctgggatggcgaaaattttcggaagcgctgggcgctggcgcgggcggcggacaactatgggtcgttggattgggaattgggatggagggcgagggtgtcgctgctgcctgctggcggggtcgatccgcgtgttgagtgatctgcgaggt

SEQ ID NO: 110429 - DNA, 466 bp, Zea Mays
ttttttttctctttttccattttattttctatttcttttcttcaatttcaaatccaatttgaattcaagtttgagttcaaactttgtgaataacttgtcctcagtttgaaaggtataatttattaatataagtgtgaaggatatttattttattttatgtaatatttttcttagttcttcccttctcttttattttttctattttctattccaaattcaaatttatacttctattttagttttcagatttttcaaatgtatcaattgaaatccaagggtgaatataaaccatactattttattattactagtttaagttttattctccttgtttatttatttcatgagatgtataaatggtttcctttaaaagaaaatttctttttctcctcatttttcttatttcccaatgatactttgtttagatttcttctaccaattccaaattcagaatttgggtgttaca

SEQ ID NO: 110430 - DNA, 294 bp, Zea Mays
atgttggcccaatgtattttgtatttggtttcctttctcgcttcatctcatagctggcgcatgcagactcctccttctacactgcttgtccttcttcgttgcagccacgctcacagctctccgtccagtaccacctcgcgcccgagcaccgcctcccccaccatcgaggaggccgccccaagcgtcgtcgccgccgccgagtcgtggctcaccgaattggccaagccactttatccaattagatgtagcaaatttttgtgctgccagttagagcatgatagagacaaagagtga

SEQ ID NO: 110431 - DNA, 1308 bp, Zea Mays
ggtgcggtggccatagcatatggggaaaatatggtataacaaggagcctcagctctgcaaatcgcgaactcaagcccaagctgccagtctgtggcatcctgatcggtaggcgattctcaatccaccgccaacatgtccggcagcacggcgccgccgcacgtcgtggaggacttcttaggcgtcatccagatcttcagcgatggctccatcgtccgcggcgacgagtcgaccatcaggccgtcagggccgtgctcggacgtccccggcgtccagtggaaggacgccgtgtacgaggcgactcgcggcctcaaggtccgcgtgtacaagccgccgccgacccccggcggcggcaaccagggcaagctcccggtgctggtgtacttccacggagggggctactgcggcggcgcctacgaccaccccttgttgcactcctgctgccagcgcttcgccgccgagctccccgccgtcgtgctctcagtccagtaccgcctcgccccggagcaccgcctccccgcggcggtagaagacggcgccgcgttcttctcctggctgcgctcgcaggcgcaggcgcagcctgctgcaccgggcgccgccgccgccgacccgtggctcgccgaatcggccgacttctcccggacgttcgtgtccggcgggtcggccggcgccaacctggcccaccacatcgtggtccggatcgcctctgggcagatcgcgctcggcgccgcggtgcgcgtcgccgggtacgtcctcttctccgcgttctttggcagcgtcgagcgcgtggcgacggagtccgatcccccggccggcgtgtacctgacggtggagacgattgaccagctctggcgcatggcgctgccggtgggggccacccgggaccacccgctggcgaacccgttcggcccgggcagcccgagcctggaaccgctgccgctgccgccggcgctcgtcgtggcgcccgagcgcgacgtgctgcacggccacgtgcggcgctacgccgccaggctcagggagatggggaagcccgtggagctcgccgagttcgcgggggaagggcatgccttctttgtcggaccgtggagcgaagcgagggatgagctgatgcgaatcttgaagcgcttcgtgaaccagagcgctgctctcggctgaggtgaatgtgaatctgtcgctattgccgtagtccaggtcgcagttgacacgtcgcaataagaacctgtacctggaatggacagtgatgttcacatttatcggttttttctccctcatacataatcgatgaaactttcgtttaggaggttgtaaaaa

SEQ ID NO: 110432 - DNA, 1276 bp, Zea Mays
atgctggtggacaacgacaatgacttcgctgagtcagagtgcccgagctgtgcttgcgctgtggcacgccggcgttacctgcaccgagtacaggaacagaaggggggcaggggcatcgaggacatgatgctgcttgagatggctaaggggaagaattggaagcggtgccccaagtgtgagttcttcgtggagaagcgtgatggctgtctgcacgtcacttgcagtaggttgcttttatggcatcttgatccatcaattattaggcttgatctctcagtgatgctcaaggaggtacttgatgctttccttgcgccaggatcagggttgtggatgtttaatgatgtccctgaggttgacagagaaagaaagctaattgatggaggtttggacttcagtcgcctcgataatattactttggtgcatcgtgagggaaatgctgttattcgccatcacttggagagccttcctttagaatcattcgattctatcctgattttggcagatgaatctgtagaagattcagcaatccaagctgagtcgaggtcacttgcaactttgctgctgataagagatattcaggcaaaacgtcttacatgcaaggaatcattgatttcacatgttccccgagggaccttttctgaaggttcttggataggggagatgcaacaagcatctgataaatatgtcataatcagtgaaattttggaccccaggacaaaaaatttgttgtcagtgtcaaaaattagtgactacgttctttcaaatgaattagtgagcatggcattggcaatggtcgcagaagatcggcagataaataatgtcttggaggagctcttcgctgaataaggaaatgaaatgcaaatacgaccttctgatatgtaccttagagaagaagaggaattaaatttctttgaggtcattctgcgagctaggcagaggaaagagattgtcattaggtaccatcttgaggcagctgagcgtgccataatcaatccaatagacaaagtttcaaggcgaaggtggtcacccaaggatgtttttgttgttatatccaagaaagaatgaggtttatcagatcacagttgacacaaaagcaagctcctgaccagtgaccacacctaatgaagaacagatagctgcgccgcagcacacacacaccgaccaacgcagagagctatttgattcagatgcgcatttggcagaaggcaagcgctgagcgcgaaggagtaaaagcatgatcagatatttagatgcgcaaatggtatgccactggcac

SEQ ID NO: 110433 - DNA, 2184 bp, Zea Mays
atggaaattttggagcattggtttgtattttcttggatacatcaaaaacacaattgggcatggaagcttagaggaaagcgaatgagtggacacatccacaagagcttcaggttaactggtcaaaattgtaagttgggcatcgtagcaaacctgttagcatgtaatgcatggatcgatagattgggcaaggatggaagatatagggaggcagaaaagctcttcagagggatggcagacagaggtctagatccaaatgaggtgacctatgctatactgatacattccttgtgcaagaggggtatgatggaagatgcactttgcatgtttgataggatgagggagaagggaatcagaatgactgtttatccatacaactctttaattaatggttactgcaaacacaacaattttcatcaggcaagaggtcttttgaatgagatggttgcgaagggattgacaccaagtccagcatcatattcccctcttatagctggtttatgtaggaaaggggatctggccagtgcaatggagctccacagggagatgaccaggaatgctgtttcagggaatgtatatacatttacagctcttatcagtggtttctgcaaggatggaaatatggatgaagcaactaggttgtttcataaaatgatggagagttccctagtgccaaatgaagtgacttttaatgttatgatagaagggtattgccgtgtaggcaatattaggaaggcattccagttatatgatcagatgctagatagaggcctaacacctgacaattacacttacaggtcactgataagtgtagtttgtttgacgctaggtgccatgaaagctaaggaatttgttgctgatctagaaaacaactgtgctgtgctaaatagttttagccttacagcacttatgcatggattctgcaaagaaggaagcgcagagatcctctgtaaagaaatgttagctggacacttccttcctaatagctatacttataattgctttcttgattatctggcaaatgaaggagagctcgaaaaggctaaagttctacacgcagccatgcttgaaggctgtttagctaacacagtgacatttaacacattgatcaaagggttctgtatggctgggcagatccaaggggcaattgaccttatgcagaagaatactgagagtggtttctttcctgattgcatcagctattctacaataataaatgagctctgtaaggttggtgacaccaataaagcatttgagctttggaatgaaatgttatacaaaggactgaaacctgatattgtggcatacactattttgattcgctggtgcaacattcatggtgaatttgataagggcttaggaatttacagtgatatggtgacagtgttgccagagtacccagaggtttacaacatagtaaacaagctgagggtggagtcagtggttgctgttgaaggtgtgatccagccacgcccggtggatgccatcaatgcagatatgaggaccgggactatagaggttgtggcacatcatgttctagtgctgaactcagtaacccggtcactgccgtttccagttacaatttctgatactgtaaaagagaagtttccagaagaaattagattgaggtttagaatgttgggacttgtgtcgtccacaaatgcagtcaaatttgcggttgcgccataatgttgttaaactcatacgccgctacttggaggatgaacatgaatttgttgaggttacatgttccaaggtagattgagactcctgttttgtccaagtctacacctgaaggtgctcgggagtcgggactatcttgtaccatcgagagttcaggaggcattgcctatggattggatcggttggtgatgcttttggcgggtgagagctcgatccgagatgtgattgctttccccaagaccacgactgctcagtgtgcactcaccgaagcaccatcagctgtagaaccacagcaactgaaggatctcgccttccccaaacctacttcgtgagacgctgttcatgtgttcatgacaaaaattccgtgctctcaaggacagctatagtttgcttcttctagtttttgagtgtattggcctattctatttttgcatagtatagaatgcacagtttttggaccgtgaatccgtgataaatttgtagaagatgcttaacatgccaaag

SEQ ID NO: 110434 - DNA, 1438 bp, Zea Mays
tcagaactgcatgacagggagaaaatactcttgttatttggggaaatgaaagcaaaaggtgtcaagccagacaatgtgtttcatacatgcatgattcatgtgcactcaaaggaagaaaatatagttcaagctttaaactgctgggataagatgatagatgacggatgctctccaaatgttatcacatatacagttttaattaatcatctatgtaagtctggatatttgagcagcgcagagatcctctgtaaagaaatgttagctggacacttccttcctaatagctatacttataattgctttcttgattatctggcaaatgaaggagagctcgaaaaggctaaagttctacacgcagccatgcttgaaggctgtttagctaacacagtgacatttaacacattgatcaaagggttctgtatggctgggcagatccaaggggcaattgaccttatgcagaagaatactgagagtggtttctttcctgattgcatcagctattctacaataataaatgagctctgtaaggttggtgacaccaataaagcatttgagctttggaatgaaatgttatacaaaggactgaaacctgatattgtggcatacactattttgattcgctggtgcaacattcatggtgaatttgataagggcttaggaatttacagtgatatggttaaaaatggtgtgcgaccaaactgggacacatatagagctcttttcttaggagcttctttgatgaccacaaatggaagaactttactattgaccacctgatgttagggcaatatctgttctcatctactggaataggctgaatcaagacggatgcaagatgcaaaaatcaatctgaccctgaactgttgcttcatatgcaagtggctataagcctaaaacatacgcatgcatatctgcatattggcttttttctatgcttgagaagatggattccagtctgaggtaagacgcctgagatcatcacctttttttcaacatggctttttggtaattgttttgctaatcttctattacaattttggtacatgtctaatttaacaattctgtattgtaatagtccttagtccttataatatttgatgtttagagaattgtattttgctgtttcatttcggctagcttttgttgcttgtcttttcttagaaatatatgagtttgtgtgggtgttaaaacacttaaagctgatgagaccaagatgccgtcaaaacctgagaaggctcgggtccctatgaatggttttcacaaaaggggctgataacaaaccacctcaagccaacactctcacggtgcaactggtcagccggacacgccaaagaagcggtctgctgggccagcccgggttcgagttgcggcatcaacttcttaagtgaaaaagtcaggggacgtctctcccatctctcgagaaaaaaaagaaaaaaca

SEQ ID NO: 110435 - DNA, 327 bp, Zea Mays
agcttgtttcatgggaagaaggtggttacaagatttctgattatccgatgccgagaggagaggtagtggttggtggacacagtacaacaaaaggctataggactaattgtaggattccagctcccatcaagtgactccccccctcacgttgactttgcggacagatgtctcaattctagtggtggagctacgaacaacaatccgatgtcctgatcgagagcggcggggctaatgtttgaacttgtgtatttgaacttgtgaactatggatgtgaacttgtgtgaatttgtgaacttatgtatttggacttatgtgaatttgcgaact

SEQ ID NO: 110436 - DNA, 1731 bp, Zea Mays
atggggaagaagttgaagaaacccgggcaagccggggggagatatggttcctcgcacccttctggaaccagctgggctcaagctccagatcatggtgctgctaccagaggcaatcctagaccgccatcacaaacatcgcgccatgttctgactccacctctggcaaatggttggcagtggcaatccaggcctcgcccatctggatctgaagtcaagaaggatgatgctcctccatctagttctgtccctgaggtggagaattttgatggcaacaatacatcagatgatgatgatgatgatttgagtgatgatatcagtgatgactatgattctgatgcaagtgagaaaagttttgagactcgaaaaacaaacaagtggttcaaagagttctttgaagtattgaatacattgagtttggaacaaattaatgaacaaactcggcaatggcattgcccggcatgcaaaaatggacctagggcgattgactggtacaaagggttgcagcctttagtgactcatgctagaacaaagggttctacaagggttaaacttcacagggaattggctgcattgctggaagaggagctttctcgcaggggaacttcagtgttaccagcgggtgaacaatttgggaaatggaagggactgcaagaaagcactgatcgtgagatagtgtggccaccaatggttattgttatgaataccttcttggaaaaagatgaagatgataagattggaaggagcacaaaagagtacactgaggctctaaatgacctcttggaatctgatgacaagtttgggttcattatcatggatggtaatggtactctttttgtcacactaagtggcaatacctgcgaagtgcttcacagattcactgttgacctcccaaagcagcatggtagaggaggacagtctgctctgtgttttgctcgacttcgcatggagaaacaccataactatgtccgcaaaacagctgaactttctacccagtttttcatcaatccagctacaagtcagcctaacgtcgtggggctgattcttgccgattctgctaattttaagactgagctgagccaatctgacatgtttgatcaacggctcgaagccaagatacttaatgcggttgatgtttcttatggtggcgagaatttattcaaccaagctattgagttatctgcttgaattctagcaaatgtgaagttcattcaagtgaagaagttaattggcaagtattttgaagagcagccagtatactgggaaatatgtctttggtgttgatgacactctgaaggctcttgaaatgggtgttgttgagaccctggtagtgtgggaaattttggatatcaacagatatatcctcaagaacagttatactagggaaattactataaaacatatgaacaaagagcaggaaggtaatcagagcaatttccgtgacccaattaccaatactgtcctagaagttcaggaaaaaatgtctctctttgaatggtttaccaatgaatacaagaaatttggtacagatcactggagtttgtaaccaagaagtatcaggagggatcacagttctgtagaggatttggtggcattggtggcattggtggtttgtcaatgatgtgtatgaagattctgattagcaatcagccaacctcatgcctgtgctggcccatggaaggacgcaacagctcgatctcgctatactttcgcaggaacacaggaaaagcaact

SEQ ID NO: 110437 - DNA, 543 bp, Zea Mays
caaaacctgatttgcctttgtgttggtatttactgtgctaaataactgttggcatttgaggttctcattatgttgttttaccttgttttgttaatcatttcatcgagaggaggtgaatatatgcctgaactctgtaggtgcttgacatgttggttgaaccttaggtggcattgcattaggaagaaatacacccaaatcggagtggaagaagattctaagcttgggtggtagttatgttcccacggattcaaaagcttgtattattaaacatctggaaaatgtttgcaatttcagaatacatataatggtgaatcgctaatcgtgattaaaatgacgacttaaaaacttgaaactgaaactaagtattggttaacatgtcctcctgcttcctgaaagaagtcatattatgtgactgcgatctctttggcatgtcacaggtgctctttcctaatgaatcagtaccaatcattcttgctcgtatgattgggacaattggtccaattgaatatggaaatgcttgctcaggacagaaaacccagaagt

SEQ ID NO: 110438 - DNA, 1297 bp, Zea Mays
ctgcttaccttttgttattacgggcatatatgattcatggaatgcttggcttatggtgacagtgttgccagagtacccagaggtttacaacatagtaaacaagctgagggtggagtcagtggttgctgttgaaggcgtgatccggccacgcccggtggatgccatcaatgcagatatgaggactgggactatagaggttgtggcacatcatgttctagtgctgaactcagtaactcggtcactgccgtttccagttacaacttctgatactgtaaaagagaagtttccagaagaaattagattgaggtttagagtgttggacttgcgtcgtccacaaatgcagtcaaacttgcggttgcgccataatgttgttaaactcatacgccgctacttggaggatgaacatgaatttgttgagattgagactcctgttttgtccaagtctacacctgaaggtgctcgggactatcttgtaccatcgagagttcagccaggaacattctacgctctccctcaaagccctcagctgttcaagcaaatgttgatggtttctggttttgaaaaatattatcagattgcaaggtgcttccgagatgaagatctgcgtgcggacaggcaaccagagtttacacaacttgatatggaggttgcttttacatctatggaggatatgttgaagttgaatgaagatttaatgagacatgtttttcaagcggtaggagatatcaagctgccaaacccttttccaaggttaacatatgcagaggcaatggatcgctatgggacagataggcctgatctccggttcgattgggagctgaaagatgttagtgatgtatttttggggagtagcttcaaggtttttgctgatacattggaaagtggaggcgtaataaaggcactgtgtgttcctggtggtgccactgttttttcaaacactgacctgaagaaaggaactgtttacactgaagcttccaaagctggagccaagggcttgcctttcctcaaagttatggagaatggggagcttgaaggaatcggtccactgttatcgagtctgaaacctgaaaagaaagaccagctcatggaacttctggacacaaagacgggtgaccttatcctgtttgcactgggtgaacaatcatcagctaatcagattcttggacggttaagattatttattgctcataagctagaggtgatagacacgtctgcacattcagttctttgggtgacagattttccaatgtttcaatggaacagtgatgagcaaagatacgagctttttcaccaccct

SEQ ID NO: 110439 - DNA, 864 bp, Zea Mays
agattggagggggaagtttgagaatctacaaaagtgatgtacaacaaagaatttttgagatcattggtatctcgcctgaacaggcagaggagaaatttggctaccttttagaatgcttcgatatgggtgctcctccacatggaggcattgcctatggattggatcggttggtgatgcttttggcgggtgagagctcgatccgagatgtgattgctttccccaagaccacgactgctcagtgtgcactcaccaaagcaccatcagctgtagaaccacagcaactgaaggatctcgccttccccaaacctacttcgtgagacgctgttcaagtgttcatgacaaaaattccgtgctctcaaggacagctatagtttgcttctagttttcgagtgtattggcctattctatttttgcatagtatagaatgcgcagtttttggaccgtaataaatttatagaagatgtttaacacgccaaagttctggaagagcattgttttaattttgccgtagcgaaaatcataagtagtgctcagaagattgggaaggagtaggcccggtttatcttgttcattcatgattccccttgtggagtgaagtggaatgctaaagatagaaaagtgttccgtaggatctcgtcttagcccattgacaaaactagtccaagaaacccagattgctaagtctcgagtatgtcaatcaagccctaatgtttccattccgtcggaccaactagcctaactgcctaacctttcatagaatttatcatttatgcccaagggacaagaggttttgaactctctagtagttccaagaagtatgctcatttccttggatgtgtattcactaatgttgtgactggaagg

SEQ ID NO: 110440 - DNA, 780 bp, Zea Mays
ttcaagaaagtagcgaagcccgacgcctacgacgagatggcaaccaccacagccgccgccgcgttgagcatgaagctcctcatcaacaagaaggcgcagcgggtgctgttcgcggaggcgagcaaggaggtggtggacttcctcttctccctcctcgcgctgcccgtcgccaaggccgtgaagctggtcgggaaggatgccatggtcggctgcgtcggcaacctctatgccagcgtcgacaagcttgactccacctacctgcaggccggcgccgccaaggacgcgctcctctgccccacagttgtctcgccggcggcgaacacccgcagctccctcctccgtctgccggagccgtcgtcggtgcagccagagaatctgtatagatgcaccggcaatagctacatcacggacgagtatgacaaggagtgcccgcaatgtggctactccatgtccatggagaccgtagtgcacaactaccggccgtcggcgagggccgctagaggccaaacggtggcgcagagcgcggtgggagggttcgtgcagggcatcgtgacgtacacggtgctggacgacctgacggtgacgcccatgtccgccatctccagcatcaccctgctgaacaccttcgccgtggcggacctcggcgacctggaggagaagaaggtgaagctgggctacaacgagggcttggcggtcctcaaggcctccctgcagtccaagacggtgctcacggatgtcttcatccacggcaaggctgcgtcgtctagtgctcgcgcttga

SEQ ID NO: 110441 - DNA, 300 bp, Zea Mays
atggatcaacttgctgcgacgacgtcgtccggccgttttagccttttggtttgggtttgtactgaactgatatcatctggtagcttttggttggcggatcgcatggggtcttatttggttgcgatgtcggtgccggcgtgccgcaaagggactgaactttgtacacacatgccctgttcaacgtccatggattgcttgctgtgtcatctctgcgttcgcacgccgcaatgtgtgacagctagtacgtacgtgtagcatctaatgacatgcgattacgctgtcaatgcgtgtggttatgct

SEQ ID NO: 110442 - DNA, 912 bp, Zea Mays
acacatcacttctatccacgtcagcgatccgtggcactagcccttccaccaatcagcccaagttgcccctttcctttaaattcgccgcacccattgctcttctcacggccatagaaatcgaccgagcgaatccctcgcatcgcattcgcagcctttgctgcatcacaccaccgcgaaaccccagcagccgcatcgatggcgcccaaggcggagaagaagccggctgcgaagaagccagcggaggaggagcccgctgccgcgaaggccccggcggggaagaagcccaaggccgagaagcgcctcccggcggccaagtcgtccggcaaagaaggcggcgacaagaagggtaagaagaaggcgaagaagtcggtggagacctacaagatctacatcttcaaggtgctgaagcaggtccaccccgacatcggcatctcttccaaggccatgtccatcatgaactccttcatcaacgacatcttcgagaagctcgccggcgaggctgccaagcttgcgcgctacaacaagaagcccaccatcacctctcgggagattcaaacctctgtccgccttgtccttcccggcgagctcgccaagcacgcggtctccgagggcaccaaggccgtcactaagttcacatcatcttagatttgaggtagtagctattgggtggcgttggtagttgtgtctcaatttgtctgctactaatagtggtaggagtatccatgtgtagttgggttgtggtaagaattgtgttaaactggtaatacgtttgaaattgctttttatggatgtggaatagttgtgtgttgcttgttctacgtttgatttctatctggatgcgattctcttatcttggaactgtcattgttgacaatgaactgacaattataaatgaccactatataccaaacc

SEQ ID NO: 110443 - DNA, 837 bp, Zea Mays
acacatcacttctatccacgtcagcgatccgtggcactagcccttccaccaatcagcccaagttgcccctttcctttaaattcgccgcacccattgctcttctcacggccatagaaatcgaccgagcgaatccctcgcatcgcattcgcagcctttgctgcatcacaccaccgcgaaaccccagcagccgcatcgatggcgcccaaggcggagaagaagccggctgcgaagaagccagcggaggaggagcccgctgccgcgaaggccccggcggggaagaagcccaaggccgagaagcgcctcccggcggccaagtcgtccggcaaagaaggcggcgacaagaagggtaagaagaaggcgaagaagtcggtggagacctacaagatctacatcttcaaggtgctgaagcaggtccaccccgacatcggcatctcttccaaggccatgtccatcatgaactccttcatcaacgacatcttcgagaagctcgccggcgaggctgccaagcttgcgcgctacaacaagaagcccaccatcacctctcgggagattcaaacctctgtccgccttgtccttcccggcgagctcgccaagcacgcggtctccgagggcaccaaggccgtcactaagttcacatcatcttagatttgaggtagtagctattgggtggcgttggtagttgtgtctcaatttgtctgctactaatagtggtaggagtatccatgtgtagttgggttgtggtaagaattgtgttaaactggtaatacgtttgaaattgctttttatggatgtggaatagttgtgtgttgcttgttctacaataaagggaaaaaaaca

SEQ ID NO: 110444 - DNA, 727 bp, Zea Mays
ccacgtcagcgatccgtggcactagcccttccaccaatcagcccaagttgcccctttcctttaaattcgccgcacccattgctcttctcacggccatagaaatcgaccgagcgaatccctcgcatcgcattcgcagcctttgctgcatcacaccaccgcgaaaccccagcagccgcatcgatggcgcccaaggcggagaagaagccggctgcgaagaagccagcggaggaggagcccgctgccgcgaaggccccggcggggaagaagcccaaggccgagaagcgcctcccggcggccaagtcgtccggcaaagaaggcggcgacaagaagggtaagaagaaggcgaagaagtcggtggagacctacaagatctacatcttcaaggtgctgaagcaggtccaccccgacatcggcatctcttccaaggccatgtccatcatgaactccttcatcaacgacatcttcgagaagctcgccggcgaggctgccaagcttgcgcgctacaacaagaagcccaccatcacctctcgggagattcaaacctctgtccgccttgtccttcccggcgagctcgccaagcacgcggtctccgagggcaccaaggccgtcactaagttcacatcatcttagatttgaggtagtagctattggtgggtggtcgtgccttttgaactgtgtattctctattttactttgttcctgattgcattgtggcttcactgccttg

SEQ ID NO: 110445 - DNA, 495 bp, Zea Mays
atgtggaaattccgtggaagaaagaaaggaaccatgtggcgctttcttctcgtagatgccacagaactcgcgcacaaagcaaacacgcgtttccagttttacgtctcctacgtcaaagacttcgggaagcaagtgacggaggtcgccaagttggtcccacagcaggaagcccaccaaatccagcgagatccaggccgtcttggcctcgccctctcggcggacatcaccaagcacaccggttgtctcctcgggcaccaccaagccacctggccttcaccaagttcacctcatcttaggttagcctctaggactggaaatagtagcagtggtattggtagtcgtgcctcagttcatctcattacctgctattccctactgacaaacatagtttcaaggaaggtatgcggacaatcacctatggtgttgattgttcaagaatcacatcagtaccactcattctttgttattctgaatgtttgctacatttataactag

SEQ ID NO: 110446 - DNA, 610 bp, Zea Mays
gccacgtacgtacgcatcttctggctcacgacgatagccgaggaattcgaaggaccgaacgagaagctcctgcgtggtgtcaacgtctaccctaccgtaccagctagccaccacacgcgtagcgcgggaaatgccggcggcggcggccatgacgacgaggcgggtggtgctggaggtgctacggtcggcctcccgcgacgccttccaggtggccttctccttcgcggcgaggccgcccgtgtccaccatgctcaagccggccatcaccaagcccctctaccaccaccaccacgacaacgactaatctggcgcagatctacagcacggccgtcggcatgccttcacagcccggtgggtgtgacgactattgatgacgtactaccacatttcgtcgctcctattctagtaagcaacgcaaaagaaaatgttgtaagattgagcctgagagcttgagtcaccaatgtaaattgtatacgactgactatatatagagcatgctctgtaaccatatatattgcccgggccccccttgccctcgcaatctatgctctacagcaatggatctttattccttgtgttagaacataatataagtgaattgtccacctcc

SEQ ID NO: 110447 - DNA, 1222 bp, Zea Mays
ccctgatgagccttgtccaaggcacaagtgggatggcgatcgaaaaggtccaaagcagcgctcacctcatgtgatcgcgacccgcccccacaccagacgccatcttctccttccctcgtcgtcgtcgtcgtcgtcgtcgtcgacacactcaattccttccaactccctcatcccaccaggccaccacgcacctagctactcagtacctcctcctgacttcactaccctcccactcccaacctccgccctccacacccaccaacgatcgacccacctcgcgatctccgccccccgcctcctccgccccgacgatgatgcggggcgatgacgagtaccggtaccagcagcagcacggccccggcggcggcgcgccgcacggcctgatcatggcggtggtggtggggctggtggtggcgggcccgctgttcctgggcgacggcggcgaggcggtcacgtccgccgtggcggacctgctcggccccacgggcctgctcctgctccccgtcggcctcgtcctcgtcatccgcgtcctctcctccgaccgcggcgccgccgcgctcgccggcgccctctccctcggcggctccccggactccgtgcaccgcgtcggcggctcgcccgtcggggtcgcgctcgcgctcgcgctcatcgccgccctcctctactacaggtcggcgctattcggcggcggcggcggcgacgacgagtagacagcggctgcctggcttggcttctgtgctgtgctgtgctacctcctgcgctacctacctaccttccttgctggaatgtttcagtagtttaggcaagattttctatttaattttgttaattaatgccaacaccgctgaacaagacactcgcatgtttgtgaaactggcttcgaacccctggaagaacaccagagcttacttaatttgtgctctccgttgtctccatagaccgacccatatgttacattctgcaaacggctgcctcgatgcgattttaaaatctgagctggatgctctgctcccgtttggaaacgcgaagcttctgcggttggtggctccgtcggcgaccggtggccatattcgatttgttcctttttttaaaaaaaaaaactgttgctctataataagcgctacataggaggcggtatgcagatccaccgtgcataattcaggcagtttcttggccagcacttcatggtaacttcaaagacacgaagggcctgggcctgggc

SEQ ID NO: 110448 - DNA, 831 bp, Zea Mays
ccctccctccctccctccctccgtcgctcgcaccggcaggatgagctccacggcggccgacgtgctccgggcgctgccgccgatcaggacgaataagccacgggcgccggagccggcctgctcgtcggcggcctcgtcgtcgccgtcgccggtgccggcgccggacgcggagtcggtggcggccccgccgccggcggaggagcagaagcagggggagacccgcgggccggaggccccgcaggaggcggagcccgcgacgccgacgtccgaggggagcctgctgcggcggccggccgagtgcccgccggcgccgcggaagccggcgtgggcgcctccgccgccgccgacgcccgccagcaagcgcagcaggccgtccccgccctcctccgcggcgccggcgccggcgccggcgcgccgggccttcttccccgtcgcgcgcgacctcaccaccgtgttccgcgccctggcgccgcccaagaagcggatccgcgcgggctgacgacgggggcggtggcgttctccctggcgcgcagcacgggacgggaccggcgtggcgtggatctggtgcccggtccgccgtcggccgtcgcgacgccgtcagtcagtcagtaggtgcgccgcgcggtcatggcatggtacagggctctcgtacaaataagttctgttttttttttggagggggggagtgtagaattgggaaagaggctgttgtttatgcatgggggaggatgaatgggggaattgaaagcttgtaaagagaattcctacagatttgttcgttgtatttgttaaactatacttgctgacagttgaagaaaaacgatgagcttt

SEQ ID NO: 110449 - DNA, 98 bp, Zea Mays
gtccatcgtcacttcacccacttggaattcgaggacaatctggctgcgccggaggagctggagagaagcagaagctgagcccaaaaaaaaaaaaaaaa

SEQ ID NO: 110450 - DNA, 95 bp, Zea Mays
attcttttctgttctttctgcgacgcccacgaaggttccagactgtagaagcccccaaccccgcttggagctccatttgccccaccacggtgcca

SEQ ID NO: 110451 - DNA, 1508 bp, Zea Mays
gaagcccccaaccccgcttggagctccatttgccccaccacggtgccagcaactccaccccctgcccccccgccggcagatcccccaccccgccaggagctctgcccaggcctaccacggtgccagcaactccaccaccccctccctcgccattggcggttcccccaccccgctaggagcaccgcccaggcggatgacttcaccttcgaagcccctgccacgcagccagtgtcaagattacccccacctacacccctcgccagaggaccgtccccttgatgtcggacggccaacggattcacctcccacgccctccacgagcctgataaatcaagaatttactagaatttctacacgcccatgaatgattttattgttgctactgaatgatgtaatagattgagtatactgttgtgtttgcagggatgctaaaggtcgcggcaagtggctctactgccactccactctgaggcggtgccagcgttgatgaccacctctcggcctactacttcttctccagcatgggtctagtccaagtcgcgatacggggtttggacattttgggctaggttgttcagcatgggtctagtgaatgaaggcatcgacatggaggagggaaacctggagataggcatagcaattcttttgcatgattattagttttattttattaatctatgctagatctcaaatacacgcaatccaatcttgaagatctggttaaaaaagtatgctgcttgtaccataaactgtgtgcgacgcaaatttcagtaagtgcaatttgttgatgtattgtgatggtagaccgaccttccttctgcagagtggaaccaaaggtatttgttgagttctttggcattgccatatagtagatttgaccgggaagcttgcaggtctactatatgtcctggttttcgtatctgcatgtcttcatgttcaaaatggtgattcggtttatatgagagtattgtcttagtgctagtgtggataacatcaagatggtgtaccatgtacggtgatgactttgctgaacttagtactttcaaatgtgtgacaaggaaggaaagtagcaagctgaaaaggaagaaccaagataaaatgtttgatgcatatatcctgcatgggtctgcaatacaatctacaacacactagattatatgtgaagtgatttgctgaaataatgacgcataactatgcttatatcgagaaggggagaaaggatcaaccgtcatcgtctccgtcggcaacatcggccctgttgacagcccgcgctctgtgtgccctcctccccacgtgtttgatggcctctgttttctcttctccctcgcactgcagagcttagtggcgtggtccaacaacttactacataatggcgatcagcaccggcaaagcttaagtgtgaagtgagacataacatgcaacatctgattagaattttcatatttagatatactcacgaatcactaagacagattatatgcttgtggtccctttttcagaaacataaa

SEQ ID NO: 110452 - DNA, 99 bp, Zea Mays
aaacataaaatataactagttatgtgcccgtgctttgcaacgacacacaaaatattcagcaaaatattagtgcacaacgattacatagaaacgaagaac

SEQ ID NO: 110453 - DNA, 1377 bp, Zea Mays
atggaatccatagatttgaaggtgcaggtggtagagtcatcatttatagcgccgagcgagccgacgccaagcaagggcctctggctctcttccttggacatcctgctggtcaacataggccacaccccaacgatctacttgtacagctccaacgatgtagccgcggctgattttttcgacgtgggcagactcaaaaaggctatggccaaggctttggtgcccttctaccccctcgccggccgcctcggcaacaacagcgacaatggtaggacggagatcagctgcaacggcgaaggtgcactctttgttgtcgctcacgcggatggtgatctcactatcgatgacatcaagaaattgaagccatcgccagagttgaggaggctgtttattccactcatcgagccatcgtctatcataatggccatacagtctgctaaagtagatatattgggtcctcctgttaatggcgtgcttatgatggctggctggcaggtgacttccttgaagtgtggaggggtggtgttaggaacagctatccaccacgccgccgcagacgcttcaagtgcgttccacttttttcagacatggtcggcattctgcaagcatggtgaccgtgctgccgtggcggtggagctcccgtgccacgaccgcaccctactccgcgcacggtccccacccacagtccaccccgacgcgctcttgacattgctgcctcggctcaccctctctgaccccgagggatcccttgccaccgaagtcttcaccatttccagcgatcagctcgcctccctgaagcacctctgcggtggcgcgagcaccttttgcgcggtgagcgctctcctctggcagtgcgcgtgcgttgcgcgccgccttccaccggattctcaagtgcgcatgctgttccctgccgacctccggcgccggatgaggccgcccctcccgagccactacttcggcaacgcagtgttcaggctatgcgcaactggccgggcgggggatattggcacggtggcgttgggatccgtcgctgcccggatcaagggcgccatcgaccggatggatgacgagctggtgcgttccgccattgactactacgagtacgagacggccgaggtgaacaagagacggactccgacaggcaccctgccacagacggacctcaatattaccagctggttgggtaggtcacagtacgacgcggattttgggtggggaacgccgcaattcatgtcccgggcggactccgaccgcggcggattcgtgcacttgatcaacgatgagggtggtggcaccgccaccggcgacgtccgcgtgctcgtgaccgtgggggctgaaaatataaaggagctagggcggcttctttatgcgaaactctag

SEQ ID NO: 110454 - DNA, 507 bp, Zea Mays
atggctgccttgccattggccaccgcagaagcatgtgatgctaatgctgctttaattatgaatggtgatcttcgttctctccaacctatcttccgaatctatggaggccggcagatttttgctggccctgttgtgacactgaagatctttgaggataacgttctgctccgcgagttccttgaggagaaaggtcacggcagggtcctggtggttgatgccggtgggagcatgcgttgtgcagttttgggtggcaaccttgcccagctgatgcagaataatgggtgggctggaatcgttgtcaatggctgcatcagggacgtcgacgagataaatggctgcgacgttggtgtccgggctctgaactcacaccctatgaagtcaaacaagaagggcgtcggtgagaagcatgtccctgtgacctttgcagggacaagaatctgcgatggagaatggctctatgccgattccgatggcattctcatctcaagatcagaattgagtgtgtag

SEQ ID NO: 110455 - DNA, 528 bp, Zea Mays
atggcgcttgcccacctccccttcgtcctcctcttggtgtcgtccgtcgccgccttcgccgcaggcgaccacggcctcacgcacatccacctgtacgtgcacgagacgtacaccggggcgaacgccacggccgccgccgtgctgcagtccccgctgggcgccaactcgtcgttcgggagcatgggcgtggtggacgacgagatacgcgtgggcccggaccggtcgtcgcagctcgtcggccggtaccagggcgtcttcttcggcacgagcgtgcagctgggcgccggctacctgtcgtccatcacgctggtgttcaccgccggcgagtacaacgggagcaccctgtccgtgcaggggcccctgctcgggttcactggcaccatcgagcgcgccgtggtcggcggcaccggcaagttcaggctggcgcgcgggtacatgcttttcaagatgataagcaagccgacgccggagacggacgtcaacgagatcaacctgttcgtgctcatgcaccccgctggcaagtactag

SEQ ID NO: 110456 - DNA, 1417 bp, Zea Mays
ctagcagttcctcagacgcaaagaagatcgagtctgcagcccacaccatagtgcgagcagattgcgtccaataggcgcaaagggagatgggggtggccgctggacgagcggcggccatggtggctgcggcggcggcggcggcggcggtgctgctgctgctcgcgggcggcgcgcacgcggactgctacgacgactgcttcaaggactgcatggccaggttcaagtccatgagagactactgcagctacgcgtgcgagaaggtctgcgatccggacgccacgctccagcgccccctcgccgttgtggggccagcagcagcgttggccgaccaccacccgttggacaagaagcatggtgctgtctggccggcggcgttgcccgaccatcctttccacgagacgcacggcgacgtcgagccggcaggggagccggacccagctaggcacgtcgtccgtccggcacgtgtccccgtcctcccctgaacgccgccggagcgagagcgcgcgatgctagccgctcggcctggcgcccgtatgttaagcactagacgaagtgtgtgatgtgtcaaacgtataagcatgccttaactatctcacgtttatgcaaggggtagcggtgtcaatttgacgagtgattgccacgttcgaacagaccaggaatgcacggtctggattctggaagtgcaccaaggccaagggtgccggtaggcggtgtggcgatacaaactcctctccaaattcggagcaagaaaatagagacaaatgatcatcgatacgtaattacatgctcactaaattttcagggttttcatgttcaataaatttcatacgaattctctgtgaacaaaggaagacatttgctccggcttaaaagatatggcaaacttgtctactgattagtacgtaatagacagttgttgcacgctgcccgcgcggcgccgtggcctgctccagtctgtgcaaaagcgacgcagcaactccgggaactcccgcggccgccatctccgccggcacccgtgcctctgtcctccgcctcccctggctggagactcgactgtgttcaagtggccctcgccgcggtagcgcggttactgctgtagcacgatgcctcggccgcgggttgagagtgtcggcagtggttttcactaatggagtgtttagtttgaagaatgatatagttcatcattttctcacttcttttttttgtttgtttgcaaaatggagtgagttaatccatcaccaccttattcttcatagttaattgtttagtactaatatgtggaatggagtcatcccaccaaatttgaggaatagactcatgatgcaccacttcattttggatagagtgattcaacaaaccaaacacctcataaatttcttcacctatattacttttttgcgtcacgttatcaacattt

SEQ ID NO: 110457 - DNA, 1213 bp, Zea Mays
attgaggtgcagcctctaattgataagattggttctagactagctggttggaagggcaagctcctatcaaaagctggtagagaaacactagttaagacgtgctatcatctcaacctatctaccacttaacagtgttcccacctcaaaaatgggtcatttagaggattgatcgtatccggcgaagttttctttggaagggtgatggcccagataattcgagtggtggtcattgtctaatcaattggcaagtcacagctagacccaagtctttgggaggcctcgggatcttagatctggaacgcttcgcacggacactacgtctgcgttggatgtggtacagctgaaaaaatgaggacagagcctgggtgggtctggacattccctgtgataaaactgatcaggacttatttcacgcctctacggtggtcacagtgggcaatggcaataaggcattgttttggaaatccagttggatctctgggatggcacctcgtcacattgcaccatctcttttcagaaaaacgagacataagaatatcacggtcaataggggactagaggataatagatggatatccaatatctggccgattcaggaaggtactgaaattcaagaattgatggcactgtggggagccatcagtgacgttgtaagggacgttgcaaatgaagatcaaatattatggcgctggactgccaatggcgaatactctaccgtagcgcctaccaagctcagttcaatggaagcatgtctagaatcaaaattgaagcaatatggaaggcaaaagcggagcctaaatgccgttttttcgcgtggacgctcctacatgaaaagatcctcacagctaacaatttgcagaagaggggatgggatcacaaccctatttgtcctctttgacacatagatccgaaaaccccgagtcacctgtgcaaagattgtagttactcaaaaagcatttggcggactttgttacattggaccaatctcaactctttagcaaacctaaaccatgatggccagttacatacttggtggagaaaatgtagactcagaattgataagccaagacgaaggttatttgacgggctagtagtctatttttggtggaatatttggaaagaaagaaataggcgaatttttcaaaatttcgggaatgatcaacttgtcgtcgcccatcaaatcaaggaggatgtcttacaatacagtgcggct

SEQ ID NO: 110458 - DNA, 964 bp, Zea Mays
catgtttcaggcaaacacgactctgcatttttcaagtcagaactgagctgcacgtatattgaacagatattgacagcactacaaattgatgtttgccacaccggactaattaatgtacgaaagcaagcagattttattcctgaacaccatgaggtccagccatcgcccaggttcctcctccgtgctatatactaatcagtcatcacttgtaccactagatgccaagcaggaccacaacattttctctgatccagctctttcggctctcacttcgcagacttgatcagctcctcgctgaagtcccagagctgcttcgccaactcctcgctcctcgccagtttgctcgtcttctccacgttgcagtcagcaaagtactttcctgtcactcccttgagttgagggctcagtcctacgtagcaagtagtcgcagctccctgaagaaatgcatacacgaaatttcagaacacgagttgcgagataataacgtcgctatgaacaagatgcctcatcaaattggtcatgatcaatccaggatggacactgttaactgtgatgtttgctccttcttcctgtttacgaacatagagctccttcgcatgcagcaagttcgccagcttagactgtccataagccattttgtcgttgtatctgccaattaataaaagatcattacttgcagttcaaaccaacagtcaattcctacaaagaagaaccataaatgcacatacattttctcatcgttgaggttatcgaagtcaattcccttcggatacgtatggtggtgggcgactgatgacaggttcacaatgcggccctcaatgcccgtagacttggcagtggccttcatggtatcaaggaggagattggtaagcagaaaaatacctagatgatttgtcgcgaactgcatctcgaccccgtctttagacagttgaaaagggcagaacatgacgcctgcattatttct

SEQ ID NO: 110459 - DNA, 768 bp, Zea Mays
cctgctctgtcaccacctactgggctcctgccccttctcgcctggtgcgccaatcagggctcaccacatccacgggagggacacgggttcctcacagcctcgcctcataaaagtggcaactttccagtttccaccaccgacagatccggattcgcgatgagtaatccttccttggagataaaaactgagatctttcagcacaatccaacagccgcagccctgaaaacggatggaattcaaagttatttatttattataaacgctcgtcagaattcacaccgagcaactagtaggagtattacacaggaacaaaaacctaaaccgcggggaccaaatgaaaaggcactcttctttatcagtagtagcaagaaggagatgatttctcccacgacaactcgatcttctcttcgagaaattgaaacgacggaagaaaacctcctccgaccaaagcagataagacctcgacaaatccattacgcacccagaactttttcacaggaatgctaaaaaatgaatagataataaatggaaaaaacaaaaaacaggagatggatggagaagggaaagggagtggctttcctctgatctaacctcgtggaaggaagagccctccggaggtctccttgtttcccggggagaaaagctctcctgcgggtgctgcggcgtctccgcccgagctctcgccggcgacaggggagaagaggcaagggcagggagaaatgagggggaggggagggcccaggcgcccagcgaagaaggaaaagcggg

SEQ ID NO: 110460 - DNA, 2585 bp, Zea Mays
ccggaatttaacggaaacaccctctcctcgcatctgttctccctccctgcgtggatccaccgtttctttccattcccgtttccgttcctcggtcctcaccaacaaaccccttccggaactcccaagcctccgatcctcgcctcagaaacctgccggatttgcgggcctctcaggcgtcgtatggaaccagccaggtgggaaagttgagcgaagctgaaaccgtgtcccttattttgcaagggtggtgctcataaggaaccacccccctcttctttgctggtgggagaacaccaaatggcccagctgttgcaccatcaggattctgcattctacagcaaggaattgcacgggtgccggtggggtattcttcaattctttgggtttcgccgtcgcctacggtccacaaagatgctctctgacaagagacatggtcaggagaaaaacagccgtggaagtagacgccgaagcagctcctatgctccattgaagaacgaagacagtgcaattctggatgatgaggaaaacactgaggtatatcaggttacaaaaaaacagaaggcctcaaaaaggaattctggcaagtctagtttgaggtccttgattctaacgaagttatatggaaaggaaggccagaaagagaagatgcttccggttgcaccaaagctactccgcactatttcgatacactatctggaaagcaatgaatacgttcttgacggcgaatccacttcgagcggcgatggttcttcaaacagtactaagccgccgatgcaaaatgctggcgatatgatgaatctgcaccatgctacatctagcgtcccagatggctgtggtgtcgattcaagctcctcacttctcctaaagatagacgacgtccgtacgaagcgaaagaagagccaccgtagcatttcgatggacgggattcttcacaaggtcccctatgggaagaaggtgtccggagatgtgatcagtgaaggtctcccccgatcagcctctgccacgtacgatagggacggcgcgaaaccttactttggtggtgctgctgcaaagaggcatgcaaaccaagggtttcggcgttcacgttccctcagtgaatcctgggaaaactactcgcgcctacttgattccatctcgagtggtgagtccaaaagaacactggccagctctaagtctaccagggatcattccctagatggccctgtcgcgagtacttcattgcaaagaacttctgaagccttgaggtctcaaggtctgggtaaacgtgatgagaacctcgtgactgcagaagatgcgttggcgccacatgttcaagagaaaactggtgaagttgctaagggtcagagctccagcgatacgatggtcgctggtggctctgaaaatcctgctttacctgacgagcacgttgacgacaaagctgaagaaaacacatgcgctgctccttcaccttcagaagctgtcggtatctcagaagaacaggcagtgagtcgtgacggtaacagtcagactccctcacctgaagttggcataccagaagaacattctgcagaagcttatgatgatggtgatggtcagatccactcgtcaacacaggctgctgatgcatatgctgctctgtcttcagaggagaccaccgtttcagaagaacgtactccagtttctcatggcaaccaaacgcacccgttccatacttcagagccaacagaaggtacgttgttggacttggacccaagagttgtccattcaaatgacgctgacgcttcaaccggcatcgctgccgtagaacaagaaagcggcttcgacggcctccaagtagacccaaggcacgagaccgagttccgctacgtgaaggagatattcagaaagtcgagcttcagcaccgagacgctgttcgacgaatggtgctcacagaacatcagtgtcctccaggaagcggattgccagcactacgaggccgccgcggcgtcgtacgacctgtcggcggacatgtcggccgagcagctgctcctgttcgacctgacgaacgaaggcctgctggacatctacaggaggcactccgtctccaggtctaggctctcctggttctcgtctttcgaccggccgagacctgtggggagccgtgcgctcggggagctgtggtctgggctgagcctccgtctggacggacggcggccacgggccagcgtccacgtcgacgcggttctgtcgagcgacctagcgaagagcgacccctggacggatttcccgcggggcgctgagcgtctggggagcaggctggcggactctgtgtttgacgagcttctgagtgagctcgttcagcagctcgcggagctttgagtgcgggcaacaaggcgtctgtttttttgtgcctatttttcgtgtttaggggggttctatattgtaggtactagttcatttcttttttaggacaagataatctggggattattgttgttgttattaggtcttaggaattcaattcgtgtgctggaaaagttttgcctgatgcactgatgggtgctagtgtaagtgctgactgaaagagcaacatttgtacgtacaccttcgagagagagagagaaaaaaaa

SEQ ID NO: 110461 - DNA, 891 bp, Zea Mays
ggaggcggcggaggcctctctcccgtcggagcagggcaggggttgcgtctcagttcctggttgtgttgttgtaagctcccaggtttcttctcttcgcgtgagctagctagagtgggatcgcgaggaagaaggatgtcgtgctgcggaggcaactgcgggtgcggcagcggatgcaagtgcggcagcggctgcggagggtgcaagatgtacccggacatggttgagcaggtgaccaccaccaccaccacccagactctcatcatgggtgttgcgccatccacgggcgggttcgaggcggccgccggagctgagaacggcgggtgcaagtgcggcgccagctgcacctgcgacccctgcacctgcaagtgaggatgaccgggtgcagcatgcaggccgtgacgatggaggaagtagctagatcggaaggacacccttcagtatctctagctaaggccctgtttcaatctcgcgagataaactttagcagcttttttttagctacttttagccatttgtaatctaaacaggagagctaatggtgataattgaaactaaactttagcacttcaattcatatagctaaagtttagtaggaagctaaagtttatcccgtgagattgaaacggggcctaaatcaagctctgcagtatgttgtagcagtgtcgtctgtgtttgccgccatgcgcgcgtagctagctagtggtggtggtaaacgaataattgtcctgttcttcctcctcctcggcccctgccagtgttgcgtcgtgtgggccggccgggtgcatgcacagcaccaggccatgcccgctgctctgtgcgcacttttttttttccttcgtgctgtgtctccattttccatctatatgcatccgatttgtgacgtcgtcagta

SEQ ID NO: 110462 - DNA, 456 bp, Zea Mays
atggggtcgcggggaagaagggtcatgggtatggccagcgaggagaacgcggcgcacctgctcgatacgctgctgtggcgacatctccggcggcggcgcggcggccgccccctcgccggcgtcgatcccggccatggcgcgcagccagtgggcgcagctccagtggcccgatcgcccgcccccgcgccccagcctcgccgaatcagccgaccgagccgcgaaatccgcctccgcccgccagccaaaacgacctccggaaattcacacgacggcgcagatccagcggcgcgtcagccaaaacggcctccggaaatcacacgacagcgcagatcccgcgacgcaaactcccacgcggaggcctcgggcagttcggcaaccttgactcctatcctctcctcacccggcgatctctcgagggcgagcagaccaggggaagaaatcctcaaccctaagtag

SEQ ID NO: 110463 - DNA, 1674 bp, Zea Mays
cgaaccgagtactagctttgcagcgaaggtggagcacgaaagcggaaccgccgaggcggtggtgcgcatccacgatgcaactatgcaatgcaagcatgcaaacgcgcccgtcagtccgtcacccgtgtcgcgatgcgccggccgctgattcgccgccgccccctgttccccgctccactgctacagctcgtacattcgccgtccgaagctccgcaccccaatctaatcgacacctcaccgagatgggccgcaagttcttcgtcggtggcaactggaaatgcaatggaaccacagatcaggtcgagaagattgtcaaaaccctgaatgaaggacaggttcccccttcagatgttgtggaggtcgttgtcagccctccttatgtcttccttcctgtggtcaagagccagctgcgccaagagttccatgttgctgctcagaactgctgggtgaagaagggaggtgctttcactggtgaagtcagtgctgagatgctcgtcaaccttggtgttccctgggtcattcttggacactctgaaaggagagctctgctgggagaatcaaatgaatttgttggagacaaggttgcgtatgccctgtctcagggactaaaggtcattgcatgtgttggtgagacccttgagcagagggaggctgggtctaccatggatgttgttgctgcacaaacaaaagcaattgctgagaagatcaaggactggagcaacgtagttgttgcctatgaaccagtttgggctattggaactggtaaagttgccaccccagctcaggctcaggaagtgcacgcctccctgagggattggctaaagaccaatgccagccctgaggttgctgaatctactaggatcatctacggaggctctgtaactgctgcgaactgcaaagagctagcagcacagcctgatgtcgatggttttcttgtcggtggagcttctttgaagcctgagttcatcgacatcatcaacgcggccaccgtgaagtccgcttaagatgctacgctgaagacgaacatactttttttttgctcaactgtgctatgtaagctagtagcttttgcgcaggagcagagactgttttgcctgcccccaacttctagcttgagcttgctaataatgtttacctctggacgtatcaataatggtgcttatgtatccccttttttttgtgccgaattacggtggatccgtcatctgaaccatgggtttggtgtatgtaattgcgtcacccgatgcctagggtgtgagactgaagtttttggacatttgggacaaggtagccttgtgcccttgtgccccacattggtcgaatgctgccaaaactgtaccggtcatctgtgctccgtacggattagcctgatctgcgaatgcaacttgtcagctaatcgttgcacggaggcagccagacaattattgtacgatatatattcgatctccccaggcataggggattgaatatctattcttgtttttacaaatgaaatacggatccaaacaatgtccaaaactattgtttacttctttttttttaaaattaaatacacatacgtacaagaatgggcgtggcttaattagtgggatgaaacctgtcgattcaagataagtcggcatgggtggtctcgtattcctagaactagcaaagtatagatataaaccaaaaaga

SEQ ID NO: 110464 - DNA, 974 bp, Zea Mays
ggagcacgaaagcggaaccgccgaggcggtggtgcgcatccacgatgcaactatgcaatgcaagcatgcaaacgcgcccgtcagtccgtcacccgtgtcgcgatgcgccggccgctgattcgccgccgccccctgttccccgctccactgctacagctcgtacattcgccgtccgaagctccgcaccccaatctaatcgacacctcaccgagatgggccgcaagttcttcgtcggtggcaactggaaatgcaatggaaccacagatcaggtcgagaagattgtcaaaaccctgaatgaaggacaggttcccccttcagatgttgtggaggtcgttgtcagccctccttatgtcttccttcctgtggtcaagagccagctgcgccaagagttccatgttgctgctcagaactgctgggtgaagaagggaggtgctttcactggtgaagtcagtgctgagatgctcgtcaaccttggtgttccctgggtcattcttggacactctgaaaggagagctctgctgggagaatcaaatgaatttgttggagacaaggttgcgtatgccctgtctcagggactaaaggtcattgcatgtgttggtgagacccttgagcagagggaggctgggtctaccatggatgttgttgctgcacaaacaaaagcaattgctgagaagatcaaggactggagcaacgtagttgttgcctatgaaccagtttgggctattggaactggtaaagttgccaccccagctcaggctcaggaagtgcacgcctccctgagggattggctaaagaccaatgccagccctgaggttgctgaatctactaggatcatctacggaggctctgtaactgctgcgaactgcaaagagctagcagcacagcctgatgtcgatggttttcttgtcggtggagcttctttgaagcctgagttcatcgacatcatcaacgcggccaccgtgaagtccgcttaa

SEQ ID NO: 110465 - DNA, 1700 bp, Zea Mays
ctacccagttgattcccagctgcgtagaaatacgaaaagttatctataacatagtagttgatttcacgggtttaaatatatataaaaaagaaagtgatgaattgggatcacatgagaggccacaaacctcaccccacctatattatcccgtgccccttgtctttcttcctccacaagcagcgaaatccaatctagaagcacccctctccctctctctctcttcgccgtccgaagctccgcaccccaatctaatcgacacctcaccgagatgggccgcaagttcttcgtcggtggcaactggaaatgcaatggaaccacagatcaggtcgagaagattgtcaaaaccctgaatgaaggacaggttcccccttcagatgttgtggaggtcgttgtcagccctccttatgtcttccttcctgtggtcaagagccagctgcgccaagagttccatgttgctgctcagaactgctgggtgaagaagggaggtgctttcactggtgaagtcagtgctgagatgctcgtcaaccttggtgttccctgggtcattcttggacactctgaaaggagagctctgctgggagaatcaaatgaatttgttggagacaaggttgcgtatgccctgtctcagggactaaaggtcattgcatgtgttggtgagacccttgagcagagggaggctgggtctaccatggatgttgttgctgcacaaacaaaagcaattgctgagaagatcaaggactggagcaacgtagttgttgcctatgaaccagtttgggctattggaactggtaaagttgccaccccagctcaggctcaggaagtgcacgcctccctgagggattggctaaagaccaatgccagccctgaggttgctgaatctactaggatcatctacggaggctctgtaactgctgcgaactgcaaagagctagcagcacagcctgatgtcgatggttttcttgtcggtggagcttctttgaagcctgagttcatcgacatcatcaacgcggccaccgtgaagtccgcttaagatgctacgctgaagacgaacatactttttttttgctcaactgtgctatgtaagctagtagcttttgcgcaggagcagagactgttttgcctgcccccaacttctagcttgagcttgctaataatgtttacctctggacgtatcaataatggtgcttatgtatccccttttttttgtgccgaattacggtggatccgtcatctgaaccatgggtttggtgtatgtaattgcgtcacccgatgcctagggtgtgagactgaagtttttggacatttgggacaaggtagccttgtgcccttgtgccccacattggtcgaatgctgccaaaactgtaccggtcatctgtgctccgtacggattagcctgatctgcgaatgcaacttgtcagctaatcgttgcacggaggcagccagacaattattgtacgatatatattcgatctccccaggcataggggattgaatatctattcttgtttttacaaatgaaatacggatccaaacaatgtccaaaactattgtttacttctttttttttaaaattaaatacacatacgtacaagaatgggcgtggcttaattagtgggatgaaacctgtcgattcaagataagtcggcatgggtggtctcgtattcctagaactagcaaagtatagatataaaccaaaaaga

SEQ ID NO: 110466 - DNA, 1979 bp, Zea Mays
atgaagctgatgtacttcctcatggacagggacgagcagcgcgagaagcggctggagctcgagttcgaggtgtcggagctggagacggtgctcgagaaggagcagcagctgggcagggtcctgcagtgctcgctccaggggcgcgtcgtgtgccattgctgcctctccgcgctggttcctaccaacgttaggggccttttagcggagctagcggtggtggaggacgagatattctacttggagaagaaggtggacgacctgcgcctgaggctgcgccgggagcagaagtggacggaccactgcatcctccaccaccagcagcagcagcagcagcacaaccgccagcaacggcactccgtgtccgtgtccaggagggagctccagctccaacaagcaggcgcccagcagctacccaggctaccgtgtccgggtccgggcagcgacgaggctcccgaacgcgagagcaaggcttccgtcggatccgcctccgccaaaggagatgagacagagcacgtcgtcggcaggaggagcagccactgccactcgtcgtcgtcgtcgtcggagaacccgtaccggccgacgcctcccgagcggaagacgtactgcatggcgagcagccccaacaggctctcggaggagctcgtcaggctgacggtgaccatcttccacaagctcaacaagacggcgacggcgacggcggcggacgcgggggagctggatctggagctggagccgagcggcggcggcgcgtcgtcgtccaagctcaacatctcgtgcatcggccccaggagcctcgtccccagggtctccgcgtccgtgaacggcgccgcggcggcgatgagcccgctcaagagccggagagcggcggccaagggcggcggcgcggagaccgggtctgccgccgggtgccagaggaggttcgtcgagttcaccagaggctccgtcgacgtcagccgcatctcactgtgcctcgtcgacatcaagaacctgagaggcctgatgcagaagctctgcgccgtcgaccccagccttatgacgaacaagcagaagctggcgttttggatcaacgtctacaacttctgcgtgatgcatgcgtttctccagcacggtttgcctccgtctccggagaagcttcttgcgctgctgaatcaggcttcggtgaacgtcggcggaacagtgctgaacgttgtgtcgatcgagcacctcatcctgaggcactctcctgacgccaagcaaggtatgtatgttgatgatgataagggcattatgggcgacgacggacagacggatctgctgcactcgtacgggctagggtatcccgagcccaacgtcgtcttcgcgctgtgcagaggcagccgctcctcgccagcactgcgcgtgtacacggcggaggacgtgtcgaacgagctggagcgggccaaggtggagtacctggagtcttcggtgcgcgtcgccggcaggaagcagcgcgccgtcgtggtgcccaagctgctgcactggcacatgcgcgacttcgccgacgacgccgcgtcgctgctggagtgggtgcacagccagctgcccagggcgtcggggccgctccgccgggccatcagggaggtcctgggcgccaacatgggcagcggcagcagggcgcccacgccggcgccggcggccaagatgctggaggtcgagccgtacgacgccgacttctgctacctgctgcccgtctggtgagcgtcagcgaccgtccgtgtccatgtaagcaaggcattgctagctgcgcgccgcgcgggtcaagttctgctgtgaccattgctgcagtgcgaggtggtgacgatgtcgtgcatgtgaagcgtgaactacttccgccgtatgatagttttactacgtacatttttttgtgcgttgtgttgacgtgcagaagtatcaatcaataaggccttgttcatattctatatggattcgaaaaattgcgaagaattttgacttgctatgaa

SEQ ID NO: 110467 - DNA, 1991 bp, Zea Mays
gttgctgctcgtagttgttatcctttttttttaccgtatcactgctttgccccttgtgtatatcaacagtaaaatctgaatgtgtgtgtgtgtttgtgtgtttactttttctttgtatgcaatggccggtgtaggttaggggccttttagcggagctagcggtggtggaggacgagatattctacttggagaagaaggtggacgacctgcgcctgaggctgcgccgggagcagaagtggacggaccactgcatcctccaccaccagcagcagcagcagcagcacaaccgccagcaacggcactccgtgtccgtgtccaggagggagctccagctccaacaagcaggcgcccagcagctacccaggctaccgtgtccgggtccgggcagcgacgaggctcccgaacgcgagagcaaggcttccgtcggatccgcctccgccaaaggagatgagacagagcacgtcgtcggcaggaggagcagccactgccactcgtcgtcgtcgtcgtcggagaacccgtaccggccgacgcctcccgagcggaagacgtactgcatggcgagcagccccaacaggctctcggaggagctcgtcaggctgacggtgaccatcttccacaagctcaacaagacggcgacggcgacggcggcggacgcgggggagctggatctggagctggagccgagcggcggcggcgcgtcgtcgtccaagctcaacatctcgtgcatcggccccaggagcctcgtccccagggtctccgcgtccgtgaacggcgccgcggcggcgatgagcccgctcaagagccggagagcggcggccaagggcggcggcgcggagaccgggtctgccgccgggtgccagaggaggttcgtcgagttcaccagaggctccgtcgacgtcagccgcatctcactgtgcctcgtcgacatcaagaacctgagaggcctgatgcagaagctctgcgccgtcgaccccagccttatgacgaacaagcagaagctggcgttttggatcaacgtctacaacttctgcgtgatgcatgcgtttctccagcacggtttgcctccgtctccggagaagcttcttgcgctgctgaatcaggcttcggtgaacgtcggcggaacagtgctgaacgttgtgtcgatcgagcacctcatcctgaggcactctcctgacgccaagcaaggcattatgggcgacgacggacagacggatctgctgcactcgtacgggctagggtatcccgagcccaacgtcgtcttcgcgctgtgcagaggcagccgctcctcgccagcagtacgtgtgtcgtcgtctcgtccctgtcgaccctccccactgcccccgagtcccagtctcccagactgagtcgcctcacgtggcgtgccgttgggtttgtctgtcctgcctgcagctgcgcgtgtacacggcggaggacgtgtcgaacgagctggagcgggccaaggtggagtacctggagtcttcggtgcgcgtcgccggcaggaagcagcgcgccgtcgtggtgcccaagctgctgcactggcacatgcgcgacttcgccgacgacgccgcgtcgctgctggagtgggtgcacagccagctgcccagggcgtcggggccgctccgccgggccatcagggaggtcctgggcgccaacatgggcagcggcagcagggcgcccacgccggcgccggcggccaagatgctggaggtcgagccgtacgacgccgacttctgctacctgctgcccgtctggtgagcgtcagcgaccgtccgtgtccatgtaagcaaggcattgctagctgcgcgccgcgcgggtcaagttctgctgtgaccattgctgcagtgcgaggtggtgacgatgtcgtgcatgtgaagcgtgaactacttccgccgtatgatagttttactacgtacatttttttgtgcgttgtgttgacgtgcagaagtatcaatcaataaggccttgttcatattctatatggattcgaaaaa

SEQ ID NO: 110468 - DNA, 972 bp, Zea Mays
gttttggcctccctgtatgcgtctgcgtgcgtgcctactgcctagaggcctgatgcagaagctctgcgccgtcgaccccagccttatgacgaacaagcagaagctggcgttttggatcaacgtctacaacttctgcgtgatgcatgtactgcgtttctccagcacggtttgcctccgtctccggagaagcttcttgcgctgctgaatcaggcttcggtgaacgtcggcggaacagtgctgaacgttgtgtcgatcgagcacctcatcctgaggcactctcctgacgccaagcaaggcattatgggcgacgacggacagacggatctgctgcactcgtacgggctagggtatcccgagcccaacgtcgtcttcgcgctgtgcagaggcagccgctcctcgccagcactgcgcgtgtacacggcggaggacgtgtcgaacgagctggagcgggccaaggtggagtacctggagtcttcggtgcgcgtcgccggcaggaagcagcgcgccgtcgtggtgcccaagctgctgcactggcacatgcgcgacttcgccgacgacgccgcgtcgctgctggagtgggtgcacagccagctgcccagggcgtcggggccgctccgccgggccatcagggaggtcctgggcgccaacatgggcagcggcagcagggcgcccacgccggcgccggcggccaagatgctggaggtcgagccgtacgacgccgacttctgctacctgctgcccgtctggtgagcgtcagcgaccgtccgtgtccatgtaagcaaggcattgctagctgcgcgccgcgcgggtcaagttctgctgtgaccattgctgcagtgcgaggtggtgacgatgtcgtgcatgtgaagcgtgaactacttccgccgtatgatagttttactacgtacatttttttgtgcgttgtgttgacgtgcagaagtatcaatcaataaggccttgttcatattctat

SEQ ID NO: 110469 - DNA, 2574 bp, Zea Mays
ctgatgtggcctgtggcaatgcaggtgtccgtactctgcgcttaaatcctttccgggtggagttcttgcctttctcgccgcttccgactctgccatgccaccatagatccagctagggcgttcaatcctgtgcgagagtacgcgaaatcgccgccggattgatattgaccaggggtttctccgcccaactgaggtttcgctgccatttgcagggaccgtgctccagttcggcctttcgggggaaaaggaatcgtatctgctgaatccccgggctccggggatggatcttgacatggacggctacgtagacccctacgaggaggccgcggccgagggcgactccgacgaccctgacgaggacgactcggatgcggagagcgactacgaggagaagtcgttcggcctcctcaagtccggcaagcaccgggtgcgcaacccggacggcaccttccgctgccccttctgcctcggcaagaagaagcagggttacaagatcaaggacctcctccagcatgccgacggcatcggcgtctccagcaagcaccgacgtcacggccgcgaacgcgcgaaccaccgcgcctttgcacgctttgtccgcaccgatccgtcctttgcggaagacctcgtcggtataactggcattcaaggtgccattacaactacccctgctaatgagaactacagcgccaatggcaacgggaaggccaaggctaatgtagatactgctggttccagttctgtggcggcaaaagtgggtccgccacaggaggttgagaggtttgcttggccgtgggcttgtgttcttgcagctggggcaggctttaatgctgaggactttgttggtagagtagcattgttcagttcggttgaggttgtgcctttgtttgtcgatgagatggaagtcacagaaaccttcgcaattgtgaggtttaccaatgattggagtggattcaatgatgcacttacgatagagaactatttcagcgtcaataagcttggtaagaaggaatttcagatgagagatagtggtcttggttccgtggagggagatggcgaaggcgatgtcaaggtttatgggtgggttgcccgagctgaggactacgatgcaacgactgtggtaggaagattcttgagaaagcacactgtcctgcaaacaatagacgaggtttccaagactgaattagagaaatcaggggagatggtggcgatactggcatcccagatcgaggaaaagaaccgatacttgcaggatttggagacaaagaagaatgcgacagaactctccatctcaaggcttgaggaggacaacaggaaacttcatgaggcatacaatgaagaaatgcgcaatcttcatcgcagggctcgtgaaaatgcgctacggattttccaagagaatgaaaacttgaggattgacttagaaaataagaggagagaactgaacttacgagctaaggagcttgaaaaaatgtcagctgagaatgctaacgacaggaagacactcgatgatcagaagcagaagacaaagtatgataatagtgaacttgagctagctagcatagagcaacagagggctgatgcagatgttctgaagctattggctgaccaagagagggaaaaggaagatgtacttgctagaatgcttcagctggaaaaagagctgcatgagaagcaacagcttgagctcgaagtagaacggttgaatggtacactccaagtgatgaaacatctagagggagacgatgacgggggagatatccatgaaaagatggagaagctgagtgaaagatttgagcgggaaaagaagcgcctggaggatttgagtggtgatctggtgacaaaagagcgtgaaagtaatgatgagctacaacaagcccgaaaagaattgataaagggtttggaggaagagctaaatggacggacagctgttgggatcaaaagaatgggggaactcgatgaaaagcctttcctaaatgcatgtaagagaaaatatgggaacaatgaataccaggtcaaagcagcagagctggtcacaaattggcaggaggaactaaagaatccatcctggtatccttttaagatgattcatgttgacggagaggacaaggaaattctggttgacgatgatacgaaactgaagtttctgtggattgagtttggcgatgacgtgtgtaatgcggtgaagacggcattgatggagataaacgagtataacccaagtgggaggtatgttgtgcccgagctgtggaacttcaggaaaggcaggaaggcgacgatgaaggaggtgctcaagtacctgttcagtcagatggacacgacgaccaagcgcaggaggggctgagtaggtgcccttggccatgccgtgaagcccagtcgtgtgctgctcgatcccgtagtggcagtctgtcttgtactgtgtagtgacatctgacgtaataatgttcaggcttgggtatggtttgagctaacgagccatatagtgtgcttggctaggctcgtttacgagctctttagctcgcgagtcaggtgagaacagaaaaaacaatatgtatataataattaatttctagttaattt

SEQ ID NO: 110470 - DNA, 1486 bp, Zea Mays
atgaggaaacgctcaagcccaacaaatatgaagctacacgagtgctcccggagtaccgcctcgctaggtgaagaggtgaaagccatagccggcaatgaactgccggagctgaaccgtggcgtcggtgctgagaacgagaagctcagggcagagctgggtgagatcagggcagagatccagttgagtgtggaccgaatccaggagttgaagggatgcagaaccgaactcgaatacactcgtatacccgtgcttgttgtcaagatcaattcgttggagacggaagaaagagaggcggaggccaaggcaagggaccatgtccagacgcttcatgaagaacacaaggaagaaatggcagcgataaacgcaaaagcagctcagctcgagaagctataccgtgcttagtagttaatcaaatcccttagctccttaagcatagtagcatacagtgacaagagtactcattaagcatcagctatactataaatatgaagggagcaaaaccatagacacaaatggatagaatttagctgtcgatatcaagtgctgacaaatttcatgccgtgatcaggagaataaaatccaaatgcaagaattacacccccggaaaccagggatgtaaaatggattcggagttagcattcgaaatcacttctgtatttctttgtttttgatttacttgcatcattccgtcagctcctgtagcatttacatcccttgactacccaaagttgcaggggaaaaaaacataaacattctgttaacaaggccaaaagtggaaggaaagaattaagaggaatgctaacctaggaaaaaatagaatcacaggagttagcatgcatgtcttaatgcttagcttgggagccatcttcagtatacttgatgtaataattttacttaatcaagtcatgattcctagtgtacttgcaatgtttgccccatcttcctctctctagctatctggagcaacaattttgacaaacgaggagattcatcatgcctatcttctctctattttatgcttcacgcattttttttatctttcttgacagtaaaaggcaaatgctcagtttgcagtaactagtgcctcaaattgtccatcttttaaaccaccaactcacattcatagtacatagcatgcacaagaagaaaataccatagaagccgcaatagcattaccagagaatcataatgtaagcataggcttctagtcatataatccatagatatgctagcattaatttcctgttagaaaatgcagacattactattaactgcaaagaccgacacaaagatttttaatcgcctccgagttgtttggatcgctgagaacatatgatgcggtctttccagtgctttcacatgtcagatttagttggtttccgagctgtgaagactgcagaagaagcttatattagtaaacttacaacaaggatacaaataaaaaaaatgaaacaacagttaagcactaaggctgtctccagcaacg

SEQ ID NO: 110471 - DNA, 285 bp, Zea Mays
atgaagtacagtaataagatcatccgaagcacaattcaaatcataaatggggatcggaagaagcacgctgcaaattccgcgtggccataccaaatcagggcaaacaacagagcaagcataaagcctgcgaccgcggatgcatcgaatcgagagaagatggaggtcggtgtcagcggatacggcttacccggcggtcctggacacgagggcctgctgcgcctgctcggagaaggcgccggccgagcgcgacgaggacttggcggcgtcctgcgccgctgcctgtag

SEQ ID NO: 110472 - DNA, 1829 bp, Zea Mays
cgtccctacattggagggctccaaggatgcggcacaaaaggctcgcctccctcccgaccaccaaacaatctccaagaatagcgggggggacggctataaatcggaaaatctgcccctcaagtttgccaactttaggataggccgtgcaaatccatttcttgccttgccggcacagctctgcatagctcctcccaagctttaggattaggatttggatttggatttggatttggatcgggtgtgtttcctgcgtaaccatgagcgagatcatgaagctaaagcgtgggatcagcaccaaaccaggagaccacctcgtccaaaatggccaacaacatccatgtcacgaatgggaggagcaacagcgctactggccctcgccgcgggcgccgccggcgagcccgacggagtcgcccaggaccccaggcgggagccagaagaaggcggttctgggcaaggtgaagagcaaggccaagaaatggatgcacatgctgcatcacaagaagaaacccgcgccaccggaggagatgatgtggacccccagggccgggcctggacccagcgcggcacaagacagcatgcccagcagggaggagcgacacgccgccgagcaccgtggcactggcactggcacccccaggaaaccgcagcaacacgcgccttcctgttcctcgagcgatccagagcgggcgtccgaggtgttcctggaagcgtcaccgaggcagaactcgccggtcccgagccccaccgcgcacaggcagcagcagcagccgcagccgtacttcaaggtcagcagcaggttcgagtcggagatgaaggaggccaacgagatgctgatggagtccaagaagctccgcgtcaacacgaccaagcccaagaccaagaccgtgacgttcgcgccgccggccgtggagcgcgagcagccgggcccgggcggcgagaggagcggctggaagaaagactgcaggagggagctgcccggagcagcggcgtcccaggcgctccgcgacgcgttcgctgcggtccgccagacggtgctcgagatggtcgccaggatccaggaggcggtggcgctcgttgacggacggcggcacgtggtagagaggctcgtgtcgctcggcaggtacctggtgatgaagctggagcctgggcaggacgacacgttgctctcggaagcgatcactgacgccgtcctcgacctgttcgacgcgtggagcgagagcgtcgagaggcctttggtgcgacgggcgaaggagatctcttcttggttcctgcaggaaggaagagaagacacacctcctcctgttccgccgtctacgcgtccttgtgcggccgaaggtaagaccatgtgccggccagagctaatcctgtcagcagaacattgttattggattagtgatggcttgtagattaacgcgatgcagatgcagatgtgttttattccttagagaattgacagagcagcttgaagcaagagatcgagacattatgaaactacgtcggtagagttcatttacctaacgatgtcaggaagctgaaggcaaaggtctccacggctttgtacctgagatttgagtgagagaaagcaataggcaatcttgatgaagtttctcttcagtaaagaccatgtattcacgatgcatgtaactaggagccaaacacaatgtgtatatcgtaaaagaatagacctagtgctgaaggctgtggggtggataaaccgaggcaaaagcattttctcccgtaaatatggagaggcggctctcaccactacgtcagacccgttcaatgtgtatatcatagacatgttgaaatagaaatccccaatggcagag

SEQ ID NO: 110473 - DNA, 1594 bp, Zea Mays
cgtccctacattggagggctccaaggatgcggcacaaaaggctcgcctccctcccgaccaccaaacaatctccaagaatagcgggggggacggctataaatcggaaaatctgcccctcaagtttgccaactttaggataggccgtgcaaatccatttcttgccttgccggcacagctctgcatagctcctcccaagctttaggattaggatttggatttggatttggatttggatcgggtgtgtttcctgcgtaaccatgagcgagatcatgaagctaaagcgtgggatcagcaccaaaccaggagaccacctcgtccaaaatggccaacaacatccatgtcacgaatgggaggagcaacagcgctactggccctcgccgcgggcgccgccggcgagcccgacggagtcgcccaggaccccaggcgggagccagaagaaggcggttctgggcaaggtgaagagcaaggccaagaaatggatgcacatgctgcatcacaagaagaaacccgcgccaccggaggagatgatgtggacccccagggccgggcctggacccagcgcggcacaagacagcatgcccagcagggaggagcgacacgccgccgagcaccgtggcactggcactggcacccccaggaaaccgcagcaacacgcgccttcctgttcctcgagcgatccagagcgggcgtccgaggtgttcctggaagcgtcaccgaggcagaactcgccggtcccgagccccaccgcgcacaggcagcagcagcagccgcagccgtacttcaaggtcagcagcaggttcgagtcggagatgaaggaggccaacgagatgctgatggagtccaagaagctccgcgtcaacacgaccaagcccagacggtgctcgagatggtcgccaggatccaggaggcggtggcgctcgttgacggacggcggcacgtggtagagaggctcgtgtcgctcggcaggtacctggtgatgaagctggagcctgggcaggacgacacgttgctctcggaagcgatcactgacgccgtcctcgacctgttcgacgcgtggagcgagagcgtcgagaggcctttggtgcgacgggcgaaggagatctcttcttggttcctgcaggaaggaagagaagacacacctcctcctgttccgccgtctacgcgtccttgtgcggccgaagatgtgttttattccttagagaattgacagagcagcttgaagcaagagatcgagacattatgaaactacgtcggtagagttcatttacctaacgatgtcaggaagctgaaggcaaaggtctccacggctttgtacctgagatttgagtgagagaaagcaataggcaatcttgatgaagtttctcttcagtaaagaccatgtattcacgatgcatgtaactaggagccaaacacaatgtgtatatcgtaaaagaatagacctagtgctgaaggctgtggggtggataaaccgaggcaaaagcattttctcccgtaaatatggagaggcggctctcaccactacgtcagacccgttcaatgtgtatatcatagacatgttgaaatagaaatccccaatggcagagaacaattgtgg

SEQ ID NO: 110474 - DNA, 1856 bp, Zea Mays
cgtccctacattggagggctccaaggatgcggcacaaaaggctcgcctccctcccgaccaccaaacaatctccaagaatagcgggggggacggctataaatcggaaaatctgcccctcaagtttgccaactttaggataggccgtgcaaatccatttcttgccttgccggcacagctctgcatagctcctcccaagctttaggattaggatttggatttggatttggatttggatcgggtgtgtttcctgcgtaaccatgagcgagatcatgaagctaaagcgtgggatcagcaccaaaccaggagaccacctcgtccaaaatggccaacaacatccatgtcacgaatgggaggagcaacagcgctactggccctcgccgcgggcgccgccggcgagcccgacggagtcgcccaggaccccaggcgggagccagaagaaggcggttctgggcaaggtgaagagcaaggccaagaaatggatgcacatgctgcatcacaagaagaaacccgcgccaccggaggagatgatgtggacccccagggccgggcctggacccagcgcggcacaagacagcatgcccagcagggaggagcgacacgccgccgagcaccgtggcactggcactggcacccccaggaaaccgcagcaacacgcgccttcctgttcctcgagcgatccagagcgggcgtccgaggtgttcctggaagcgtcaccgaggcagaactcgccggtcccgagccccaccgcgcacaggcagcagcagcagccgcagccgtacttcaaggtcagcagcaggttcgagtcggagatgaaggaggccaacgagatgctgatggagtccaagaagctccgcgtcaacacgaccaagcccaagaccaagaccgtgacgttcgcgccgccggccgtggagcgcgagcagccgggcccgggcggcgagaggagcggctggaagaaagactgcaggagggagctgcccggagcagcggcgtcccaggcgctccgcgacgcgttcgctgcggtccgccagacggtgctcgagatggtcgccaggatccaggaggcggtggcgctcgttgacggacggcggcacgtggtagagaggctcgtgtcgctcggcaggtacctggtgatgaagctggagcctgggcaggacgacacgttgctctcggaagcgatcactgacgccgtcctcgacctgttcgacgcgtggagcgagagcgtcgagaggcctttggtgcgacgggcgaaggagatctcttcttggttcctgcaggaaggaagagaagacacacctcctcctgttccgccgtctacgcgtccttgtgcggccgaagatgcagatgtgttttattccttagagaattgacagagcagcttgaagcaagagatcgagacattatgaaactacgtcggtagagttcatttacctaacgatgtcaggaagctgaaggcaaaggtctccacggctttgtacctgagatttgagtgagagaaagcaataggcaatcttgatgaagtttctcttcagtaaagaccatgtattcacgatgcatgtaactaggagccaaacacaatgtgtatatcgtaaaagaatagacctagtgctgaaggctgtggggtggataaaccgaggcaaaagcattttctcccgtaaatatggagaggcggctctcaccactacgtcagacccgttcaatgtgtatatcatagacatgttgaaatagaaatccccaatggcagagaacaattgtggaaaaggtatatagcatttctctggatcaacatctagccctcacattccctatccaactgaatttggacgcaccataccatgaacacaaccataatacgaaag

SEQ ID NO: 110475 - DNA, 1507 bp, Zea Mays
cgtccctacattggagggctccaaggatgcggcacaaaaggctcgcctccctcccgaccaccaaacaatctccaagaatagcgggggggacggctataaatcggaaaatctgcccctcaagtttgccaactttaggataggccgtgcaaatccatttcttgccttgccggcacagctctgcatagctcctcccaagctttaggattaggatttggatttggatttggatttggatcgggtgtgtttcctgcgtaaccatgagcgagatcatgaagctaaagcgtgggatcagcaccaaaccaggagaccacctcgtccaaaatggcaagagacccatctttttcaaacacggtttcaattcaattcagttcagttcgtcgttcttgaatatttttttaggaagtccgttcttgattcttcttcctttgtcccccactcgtacgacgttttgacattggtttttgctgccttcgcaggccaacaacatccatgtcacgaatgggaggagcaacagcgctactggccctcgccgcgggcgccgccggcgagcccgacggagtcgcccaggaccccaggcgggagccagaagaaggcggttctgggcaaggtgaagagcaaggccaagaaatggatgcacatgctgcatcacaagaagaaacccgcgccaccggaggagatgatgtggacccccagggccgggcctggacccagcgcggcacaagacagcatgcccagcagggaggagcgacacgccgccgagcaccgtggcactggcactggcacccccaggaaaccgcagcaacacgcgccttcctgttcctcgagcgatccagagcgggcgtccgaggtgttcctggaagcgtcaccgaggcagaactcgccggtcccgagccccaccgcgcacaggcagcagcagcagccgcagccgtacttcaaggtcagcagcaggttcgagtcggagatgaaggaggccaacgagatgctgatggagtccaagaagctccgcgtcaacacgaccaagcccaagaccaagaccgtgacgttcgcgccgccggccgtggagcgcgagcagccgggcccgggcggcgagaggagcggctggaagaaagactgcaggagggagctgcccggagcagcggcgtcccaggcgctccgcgacgcgttcgctgcggtccgccagacggtgctcgagatggtcgccaggatccaggaggcggtggcgctcgttgacggacggcggcacgtggtagagaggctcgtgtcgctcggcaggtacctggtgatgaagctggagcctgggcaggacgacacgttgctctcggaagcgatcactgacgccgtcctcgacctgttcgacgcgtggagcgagagcgtcgagaggcctttggtgcgacgggcgaaggagatctcttcttggttcctgcaggaaggaagagaagacacacctcctcctgttccgccgtctacgcgtccttgtgcggccgaagctcataggatgaaaaggtga

SEQ ID NO: 110476 - DNA, 1892 bp, Zea Mays
ccgcagacagagccgaccgacaacatcatggcgaggattccccaggttctggcgccgctcctcctcctgctgctccccgccggtctccgggagctgatgatcgaccgccggcccctgccggaaggcgctgccggcggcgaggtcctcctccacccgctggtgctggtgcccgggctgacgtgcagcgagctggacgcgcggctcacggacgcctaccgcccctccgcgccgcggtgcggcgccatgaaggggaagggctggttcggcctctgggccaactgctccgacctgcccgcgcaccactacgtgcggtgcttcatggagcagatggccctcgtctacgaccccgtcgcgaacgactaccggaacctgcccggcgtcgagacgcgcgtgcgcaatttcggctcctcccaaggattccagaagaacccagagcacacgacctggtcctggtgcttcgaggtcctcagaaacgagctggcaagggccgggtaccgcgacggcgacaccctgttcggggccccgtacgacctccgctacgccccgccggtgcccggccagccatcggaggtcttctccggctacttccgtcggctggcgagcctcgtcgaggacgcgagccgcaagaaccggggcaggaaggtgatcctcttcgggcacagcttcgggggcatggtggcgctggagttcgtccggagcactcccatggcgtggcgagacaggtacatcaagcacctcttcctcgtcgccccggtgccggcggaagggttcgtgaagccgctgcagtacttcgtctccgggtccaacctgatgtacgtcccgacagtcagctcgctcgagctggcctttaggccgatgtggcggaccttcgagtcctccctcgtcaacttcccctccccggcggtgttcgggcgcaggccgctcgtggtcaccgcgcggaggaactactccgcctacgacctggaggacctcctcgtcgccgtcggctacggcgccggcgtggagcccttcaggagacgggcggtccccaagatgagctacttccaggcccccatggtgccgaccacgtgcatgaacggggtgggcaacgacacgccggagcagctcgtctactgggacggcgatttcgacgcgaccccggagattgtgtacggcgacggggacgattccatcaatttggtcagcatgctggcgttcgacgagaagatgcgccggcagccggaacagaacaaggtgtacaagtcgatcaagattcgtggggcccagcacggtactattgtgacagacgacacggcgctcaagcgggtcatgcacgaaattcttgaagcgaatcgtagttaataatacctttaagggctacttaaaggttagtttgggaactagggatttttattttcccagcaaaattagttcatttttttatagaaaaataaaaatctcttaatgttcccaaactagccctaaataacatttattaaattgaaaaaaatcctatcaagagttatggtatcttagttagcattgttacggtaaaatctatgtattaaattagtactattagatataagaggtgtttgaatgaactagagataatagttagttggctaaaaaatcattagcggaattatctagctaacaaatatctagttaaatattagctaatttgctaaaaatagataatagttaaattattatctagcctatttgaacgtattcaactaatattagcagctaactattatctctagtatattcaaacattatatactatatttattttgttttatagatattgttactcgatcttataaagttactaaaaaattaaatagtttaatttgtacatattgtaaaattgatttatttagacatggaaggagtatattaattat

SEQ ID NO: 110477 - DNA, 2348 bp, Zea Mays
atctcctccgccaccaaccctcggaattcgggccgcgctccactaatcctcgtatcggtcgctaatggcgtgctgatctggcaccgtcgcatacagcagggcgctctttattcgcctgtgtgagcttcagcgaagttaatcccattttccgtgcccgcgcccgtgccgtaccgtccctatcacaccggatcgccactcgctcccccccaccccactccgccccacctccgcgcctcagatccatccccaaccggcaaccctagcgccgggttcctcctcctcggatccgcccgccgccgcgcggactccattgccagaggtgatcgagggggagagatagagcttgggtggtcggattagggagagagggaggggaggatgtccagacggtcgttgaacccgagccggcgggtggcggacgggggtctgccgacagtcggaggcctgttccaccccaagtcacgctcgcctcccgtgcttactattgccctagtcgtcctgggtgtcattcttctcgtcgcctacttcaacagcggctcaggtgtaactgttacaagcagagagtctgtgaccaggtctgaaggttcttgcacatcagaagttatgcgggtgcttccatatcttaaaaaggcatatggaaatgccatgcaaaaggttctccatgtaggccctgatagttgtacagtagtttctaatttgttgaaagaaggaaaggttgaagcttggggagtggagccttatgatttggaagatactgacagtacttgcaaaagcctcgtgcgcaagggctttgtccgtatgtctgatattaagttcccccttccgtaccgtccagattcttttaatcttgttgtggtgtcagatgctttagattatctgaccccaaggtatctgaacaaaacacttccagatttagcaagggtttccacagatggccttgttatttttgctggtatgtgttttttttcttgaaacatttactgccttctatttttccttggaaaaccctcgtttacctttgtgtggtaaaagagctatgtttaataagtgatcatgcgttcttttttactatcagaaaatggttatatgctactgatcgtctatattcctttggttgctgttatatttgaaacaaaccatctttgacttgaaatatcctctctgttgtttttccacgtgtatttctgtaactgtattaatcttagctgtgtgtcttgatctgattggatttcctttccaagtggaaacaataaaacggaatcatgtggatgaaccttaaagaagtatacgtttgatgtttctatcttaagataacagaactaaatatgtgatagtgcaacatcagatgatacaaggatgaaccttaaaagcagtatgtgtttctatcttaagatgacagatttaaatctagggtagtgcaacctcaggtgatactaatgtcttggagatcaaagtgctatcaacttttaatttgtggtctctggagtaggtagttaggtacatgattgaactcttgtggtgggtactggagttgaaacttttctgctcaaacaactctatattcctttttgagtatcaagtcgttcaaggttggcaatctgtcagtaatgcccacctaggccctgaataatgctctactcctgtactctttataccattatttaccaaatgtttaaagtttaaacataacttttttgtggtatacgtggacggcctagatcatctgagaagtgtttgtttcatttcatctttacaggcaacccaggtcagcagaaagctaaggtctcagaactaccaaaatttggaagaccggcaaagttgcggagttcttcatggtggacacggtactttgtccagaccggcttgacagagaacgaagggccgctgaagaaattcgaagatgctacatccaagaacaaatacaaaccaggttgtcagatcttccacctaagttcgccaaggtgatgcgcatccatagcaccttgaattgttgtcacaccccctgccctcctccggttggcttgctcattgttcgtgtggaggaaatcgtcgcaaaaaaagccatcaggaataggttagcttatgtagagaggctccgacacttgttgctagaaattcactctggaaattaaattgtgtcccccaatgattgcaaactggagccccgctgggatatatatgtaagaactttcacgctgttgtaccgctgtgctatccatgtattgtcaggtgttcaccgagcagtttgaaatgtaaagctcttgatgatccaggaggcggggggctatatttgaccactagttgtagacatcgtaccatgtcattttcagcaagttggatgatgcttc

SEQ ID NO: 110478 - DNA, 1544 bp, Zea Mays
atctcctccgccaccaaccctcggaattcgggccgcgctccactaatcctcgtatcggtcgctaatggcgtgctgatctggcaccgtcgcatacagcagggcgctctttattcgcctgtgtgagcttcagcgaagttaatcccattttccgtgcccgcgcccgtgccgtaccgtccctatcacaccggatcgccactcgctcccccccaccccactccgccccacctccgcgcctcagatccatccccaaccggcaaccctagcgccgggttcctcctcctcggatccgcccgccgccgcgcggactccattgccagaggtgatcgagggggagagatagagcttgggtggtcggattagggagagagggaggggaggatgtccagacggtcgttgaacccgagccggcgggtggcggacgggggtctgccgacagtcggaggcctgttccaccccaagtcacgctcgcctcccgtgcttactattgccctagtcgtcctgggtgtcattcttctcgtcgcctacttcaacagcggctcaggtgtaactgttacaagcagagagtctgtgaccaggtctgaaggttcttgcacatcagaagttatgcgggtgcttccatatcttaaaaaggcatatggaaatgccatgcaaaaggttctccatgtaggccctgatagttgtacagtagtttctaatttgttgaaagaaggaaaggttgaagcttggggagtggagccttatgatttggaagatactgacagtacttgcaaaagcctcgtgcgcaagggctttgtccgtatgtctgatattaagttcccccttccgtaccgtccagattcttttaatcttgttgtggtgtcagatgctttagattatctgaccccaaggtatctgaacaaaacacttccagatttagcaagggtttccacagatggccttgttatttttgctggcaacccaggtcagcagaaagctaaggtctcagaactaccaaaatttggaagaccggcaaagttgcggagttcttcatggtggacacggtactttgtccagaccggcttgacagagaacgaagggccgctgaagaaattcgaagatgctacatccaagaacaaatacaaaccaggttgtcagatcttccacctaagttcgccaaggtgatgcgcatccatagcaccttgaattgttgtcacaccccctgccctcctccggttggcttgctcattgttcgtgtggaggaaatcgtcgcaaaaaaagccatcaggaataggttagcttatgtagagaggctccgacacttgttgctagaaattcactctggaaattaaattgtgtcccccaatgattgcaaactggagccccgctgggatatatatgtaagaactttcacgctgttgtaccgctgtgctatccatgtattgtcaggtgttcaccgagcagtttgaaatgtaaagctcttgatgatccaggaggcggggggctatatttgaccactagttgtagacatcgtaccatgtcattttcagcaagttggatgatgcttc

SEQ ID NO: 110479 - DNA, 1562 bp, Zea Mays
atctcctccgccaccaaccctcggaattcgggccgcgctccactaatcctcgtatcggtcgctaatggcgtgctgatctggcaccgtcgcatacagcagggcgctctttattcgcctgtgtgagcttcagcgaagttaatcccattttccgtgcccgcgcccgtgccgtaccgtccctatcacaccggatcgccactcgctcccccccaccccactccgccccacctccgcgcctcagatccatccccaaccggcaaccctagcgccgggttcctcctcctcggatccgcccgccgccgcgcggactccattgccagaggtgatcgagggggagagatagagcttgggtggtcggattagggagagagggaggggaggatgtccagacggtcgttgaacccgagccggcgggtggcggacgggggtctgccgacagtcggaggcctgttccaccccaagtcacgctcgcctcccgtgcttactattgccctagtcgtcctgggtgtcattcttctcgtcgcctacttcaacagcggctcaggtcggttaaagattctcggtgtaactgttacaagcagagagtctgtgaccaggtctgaaggttcttgcacatcagaagttatgcgggtgcttccatatcttaaaaaggcatatggaaatgccatgcaaaaggttctccatgtaggccctgatagttgtacagtagtttctaatttgttgaaagaaggaaaggttgaagcttggggagtggagccttatgatttggaagatactgacagtacttgcaaaagcctcgtgcgcaagggctttgtccgtatgtctgatattaagttcccccttccgtaccgtccagattcttttaatcttgttgtggtgtcagatgctttagattatctgaccccaaggtatctgaacaaaacacttccagatttagcaagggtttccacagatggccttgttatttttgctggcaacccaggtcagcagaaagctaaggtctcagaactaccaaaatttggaagaccggcaaagttgcggagttcttcatggtggacacggtactttgtccagaccggcttgacagagaacgaagggccgctgaagaaattcgaagatgctacatccaagaacaaatacaaaccaggttgtcagatcttccacctaagttcgccaaggtgatgcgcatccatagcaccttgaattgttgtcacaccccctgccctcctccggttggcttgctcattgttcgtgtggaggaaatcgtcgcaaaaaaagccatcaggaataggttagcttatgtagagaggctccgacacttgttgctagaaattcactctggaaattaaattgtgtcccccaatgattgcaaactggagccccgctgggatatatatgtaagaactttcacgctgttgtaccgctgtgctatccatgtattgtcaggtgttcaccgagcagtttgaaatgtaaagctcttgatgatccaggaggcggggggctatatttgaccactagttgtagacatcgtaccatgtcattttcagcaagttggatgatgcttc

SEQ ID NO: 110480 - DNA, 808 bp, Zea Mays
ttaaaaaggcatatggaaatgccatgcaaaaggttctccatgtaggccctgatagttgtacagtagtttctaatttgttgaaagaaggaaaggttgaagcttggggagtggagccttatgatttggaagatactgacagtacttgcaaaagcctcgtgcgcaagggctttgtccatttagcaagggtttccacagatggccttgttatttttgctggcaacccaggtcagcagaaagctaaggtctcagaactaccaaaatttggaagaccggcaaagttgcggagttcttcatggtggacacggtactttgtccagaccggcttgacagagaacgaagggccgctgaagaaattcgaagatgctacatccaagaacaaatacaaaccaggttgtcagatcttccacctaagttcgccaaggtgatgcgcatccatagcaccttgaattgttgtcacaccccctgccctcctccggttggcttgctcattgttcgtgtggaggaaatcgtcgcaaaaaaagccatcaggaataggttagcttatgtagagaggctccgacacttgttgctagaaattcactctggaaattaaattgtgtcccccaatgattgcaaactggagccccgctgggatatatatgtaagaactttcacgctgttgtaccgctgtgctatccatgtattgtcaggtgttcaccgagcagtttgaaatgtaaagctcttgatgatccaggaggcggggggctatatttgaccactagttgtagacatcgtaccatgtcattttcagcaagttggatgatgcttc

SEQ ID NO: 110481 - DNA, 1054 bp, Zea Mays
caactcctcttccagttgacgcggcatcctctccttgaccatttccctttcctcccagcctcctctagcagccgtatcactaatccagttgttccccactaccgcctctggtcgaattgattagtcaaagtccagaggccagagcacatctctgtctcgctaatcgccttcataaacccctgccgcagccgcgctcgccgcccagaccaaccaaacacacacaactgtagccgtcgtcgtcgttggcgtgcgtgttgctctgctttcggagcccgtgcgcgagcggaaccaaagtagcagaccatggagggcctgctgccgttcctgtaccgggccatcctccacctcgccagcggcggccagtcgcccaccggcaaccccttcttccgcaacgactcgccgccggagtcgccgctggcggcgcactactacgtccgcctcgccgccggcgccgacgtgccggccttcctctcctccgcggcgcgcggctactacgaccgcgggtgagagccctgccgaaccaggaacgacgctgggcgtgcgagcaggaagaatcctcgtgagctccttcagttgcgtgttcagagtgctggttctcctccctcttcttgtggcttcttggagattctcctccccctcctttgctccttggaataaaggcatggatggatgaggtccagccatccagggggccgcgtcgttttcttccattgtatataggccatatatgacgtgatcagtcgggtgctcgcctaattgcaggttctcagacacgggcgaatatgataccgatttgcaatatatcgccgaaaaaaaatgccaaggctttgagaggttcttgtcctcctgtgcatgatctcctgctactgcttggccctgaggcctagcgttttttttcctttttcttgttttgctgttgcaaatcgatgtttcatttaatcagaagttcgcagcgtgtcatttgaaaggtaaactggcatggactgtgcatgaccgaagctgttgggtgctcgctggcagcagcagcactacacgaaaaaagaaaagaatagag

SEQ ID NO: 110482 - DNA, 640 bp, Zea Mays
ctgtagccgtcgtcgtcgttggcgtgcgtgttgctctgctttcggagcccgtgcgcgagcggaaccaaagtagcagaccatggagggcctgctgccgttcctgtaccgggccatcctccacctcgccagcggcggccagtcgcccaccggcaaccccttcttccgcaacgactcgccgccggagtcgccgctggcggcgcactactacgtccgcctcgccgccggcgccgacgtgccggccttcctctcctccgcggcgcgcggctactacgaccgcgggtgagagccctgccgaaccaggaacgacgctgggcgtgcgagcaggaagaatcctcgtgagctccttcagttctcagacacgggcgaatatgataccgatttgcaatatatcgccgaaaaaaaatgccaaggctttgagaggttcttgtcctcctgtgcatgatctcctgctactgcttggccctgaggcctagcgttttttttcctttttcttgttttgctgttgcaaatcgatgtttcatttaatcagaagttcgcagcgtgtcatttgaaaggtaaactggcatggactgtgcatgaccgaagctgttgggtgctcgctggcagcagcagcactacacgaaaaaagaaaagaatagag

SEQ ID NO: 110483 - DNA, 283 bp, Zea Mays
ctttgacaccaccatgaccttcgtctctgcgaccgcctccgccaccctcttcctctccatcctgtcccaagcacgtagccccggcgcgtgcatctgccggcagccgttgtcatctactcatctccgctgcacgcaacggtgggccccaactcggcacccgtgctgttggagagcaaggctaagggaacaaaaaaagggggtccggcgtcgcgccgggaacctaccaggacccctcgacatcgagatcagggagacggagacggtggctctactgaaatttggc

SEQ ID NO: 110484 - DNA, 757 bp, Zea Mays
ttcctttgccaggaatctgttccggacaacttcccatttgaaataattgacgaagagggtattagcgtggttagtttgagaagagactacaagtacgagaagatcgaggttactgtcagcatggctaatttagtaggaggccctgagtttggtgatgaggatggtgaggccgatggtgagagcgctgccaaggatgacgaagaagcagaagatagcaagcatttctcaaggcctggcccaaagcttgagttcacgatacacaacctttcgtcaggagatcaccattgatgatatgctaatagtagagaaaatagacggcgatcgacgacggagaagagaattgaagatcccctacgatcgagggccctgagttcaccgacctccctgcgaatgttcagaaaggcctgttcaaatacttggagcaaacgggggtaacggtgtcggctaccaactatatgcacgattacatacatgggtgactaaggctgtctccagcaacgaacgctaaagtgttcggtatgctatatttagtgttttttttggctgtccgctaccgtcctagtaaggaccggcaaatgatccgctaaaatatagttatatagcggcagctcgacgaccggtaaacctagcggagctcctcgtgtccgctatctgctgtttatgtcagctcgcgctcagtttgtgcagcatgcgcacatggacagtgacttgttatttattgttcttttttttaatctctaaagtacaacttttgtct

SEQ ID NO: 110485 - DNA, 795 bp, Zea Mays
atggccctctttgctgccgcacgccgcgccgcggcctcctccgtgcccgttctcctccgtgcctccgcctcctcggggtcccaccgcagcgccgtcctgctccggcccctcgctgccgccgtggcgccgccgaagccccgcgcgatgccgttctcctcggcgcccgcgacgagacccagctccgacgccgagctactcagcgtcatcgactccgagatcaagtacgccgaggactgcgatgaccacgacagggttgaggagattccagaaaatttccctttcaaaatcagcgacgagaaggggacgaatgcagttacccttaaaagaacatatcagggtgagcagattgaggttgtggttcacatgcccagccttgtcactggagatgagcctgatcatgaccgtgatggtgaggatgaggacacggcgggagatgacaatgacgaagatgaaggccagaagcctgaacagtcaagcattcctctcacagtcactatatccaagggtgacggtcctgttcttgaattcacctgcactgcctatcctgacgaggtcatcatcgactccatgtctgtgacacaacaatcaggggatgatgaacgtgacatgattgcatatgagggtcctgatttcaatgaccttgatgagaacctgcagagggaattccacaggtacctggatctgcgtggcatttcacccaggaccacaaatttcttgcacctgtacatgatcaacaaggacagccgtgagtacctgctctggctgagaaagctgaaggatttcttcaagcagtag

SEQ ID NO: 110486 - DNA, 1691 bp, Zea Mays
ggaagagagagaaggtgcagtcagtcagtcaggcagagaaacgtgcggaggtggaagccacaacgggagcgcctaccctcgcagtccgcccctcgacctcggagccgcagcccgcgaggagcgttcacaatcacaccggccaccgcggaccctagcgctttagccttatccgtccgagcgcgcgcccgatgcagacggaggcgcgcgtgggcgtcgtcgtcgacggcggcgccgccgtgggccggtgccaggagcagcgccacatcggcacggcggcgcacctcgccgccggaggcttcgcgggcgccgtcagcaagacgtgcaccgcccccctcgcgcggctcaccatcctcttccaggtagctggtatgcattcagatgttgcgactctaaggaagtgtagcatatggcatgaggcttcacgaatttttcgagaagaagggattgaagccttttggaaaggaaatctagtgacaattgtacatcgcttgccttattctgccatcagcttctattcgtatgagcgctacaaaaatcttctccaaacggttcctggcctggatagagactcaaataatgttggtgttgtacgtttgcttggtggtggtttggcgggaataactgctgcatctttaacttacccgttggatgttgttcgtactcgcttggcgacgcagaaaaccactaggtattacaagggcatcttccatgcggtgtccacaatttgtagagacgagggtgtcaaaggattgtataaaggccttggggccacgttattgggagttggacctagtatagcaatcagcttttctgtctatgaatcactaaggtcttattggcaaatggaaaggccccatgattcaactgcagttgttagcttgttttctgggagtctatctggtattgcatcatctacaggtaagtactgacattttatccctaatgattttcattctcgattttttccttaccgagtaaacaaagccataacatgcatttatattattgcttgcacaaacagtgatctctgttgaagcagctagcagcacacttatgcagcgatatgcttttataaaccagatagacagacttaagtttatccacttgcattgctaaattgattacctcacatcataaaataaatgatttccaacagtggatgttaaattcttcattcattgttgcagccacatttccccttgatcttgtaaagcgacggatgcaacttcaaggagcagctgggacagcgtccgtccagaaatcaaccatatctggaactgtccgtgatatcttgcagagagaaggtctccgtggcttctacagaggtatcgcccctgagtacctcaaggtcgttcctagtgttggaatcgccttcatgacatacgagacactgaagggcttgctctccagcattgacatagacgatgagagctgaggtttcccattatacgaagaggttaaacttcaccggattttttggccataggttaccatcagaatgtatgtaagtgcatcagagtggttacacgaacggcattgtggcagttttgtagttgacggtaggtcaaagcttacctgaggtgtacaactagtcttgtgttgtaccataggctaaacagagcaaataagcacttcatgatggagtcttcatcttgtgttcctttgtacattatgctccatcaaggaagagc

SEQ ID NO: 110487 - DNA, 1479 bp, Zea Mays
ggaagagagagaaggtgcagtcagtcagtcaggcagagaaacgtgcggaggtggaagccacaacgggagcgcctaccctcgcagtccgcccctcgacctcggagccgcagcccgcgaggagcgttcacaatcacaccggccaccgcggaccctagcgctttagccttatccgtccgagcgcgcgcccgatgcagacggaggcgcgcgtgggcgtcgtcgtcgacggcggcgccgccgtgggccggtgccaggagcagcgccacatcggcacggcggcgcacctcgccgccggaggcttcgcgggcgccgtcagcaagacgtgcaccgcccccctcgcgcggctcaccatcctcttccaggtagctggtatgcattcagatgttgcgactctaaggaagtgtagcatatggcatgaggcttcacgaatttttcgagaagaagggattgaagccttttggaaaggaaatctagtgacaattgtacatcgcttgccttattctgccatcagcttctattcgtatgagcgctacaaaaatcttctccaaacggttcctggcctggatagagactcaaataatgttggtgttgtacgtttgcttggtggtggtttggcgggaataactgctgcatctttaacttacccgttggatgttgttcgtactcgcttggcgacgcagaaaaccactaggtattacaagggcatcttccatgcggtgtccacaatttgtagagacgagggtgtcaaaggattgtataaaggccttggggccacgttattgggagttggacctagtatagcaatcagcttttctgtctatgaatcactaaggtcttattggcaaatggaaaggccccatgattcaactgcagttgttagcttgttttctgggagtctatctggtattgcatcatctacagccacatttccccttgatcttgtaaagcgacggatgcaacttcaaggagcagctgggacagcgtccgtccagaaatcaaccatatctggaactgtccgtgatatcttgcagagagaaggtctccgtggcttctacagaggtatcgcccctgagtacctcaaggtcgttcctagtgttggaatcgccttcatgacatacgagacactgaagggcttgctctccagcattgacatagacgatgagagctgaggtttcccattatacgaagaggttaaacttcaccggattttttggccataggttaccatcagaatgtatgtaagtgcatcagagtggttacacgaacggcattgtggcagttttgtagttgacggtaggtcaaagcttacctgaggtgtacaactagtcttgtgttgtaccataggctaaacagagcaaataagcacttcatgatggagtcttcatcttgtgttcctttgtacattatgctccatcaaggaagagcaaaaaaaaaaaaaaaaaaaagaagaggaagaaggtgaaagtcaatgattttataggt

SEQ ID NO: 110488 - DNA, 350 bp, Zea Mays
tgttttagtttttttctaaaatatgggtaaaacgttatcagtatacctaggaagttttagaaacatctacatgaacagaacaaaggaatgaataatgataatgaaatataatgcgcaccacaaagacattagagtcaacaggtacatgtttgaactaatcatagttgtccaactcggcagcgttaattatgacattgcgtgcgacatttgggccaaggccagtccacaaagctccaataccttcttggaaacatgaaagattttaaggacaacgaaaaaagaaatagtcttgtacacttactgcccatgatggttaaagtaacatgtctgattattatagcatatacatt

SEQ ID NO: 110489 - DNA, 378 bp, Zea Mays
actgccctgacgcgcttctcctgaagatttacacgcccgagagcaaggacaggaaggtgaatcgctctgaatatagcactgatcgaagtaaatatctgcacaaacagctagatgtacctggcagcagtagatgtatggagagcgccaggaatgatcttgggttgttgtggcgtgcctgcttgatattttataggcgcggatccgatttgggcgcaatccatgttcagcggatccgatttgggcgcaatccatgttctgtactacattcctagtatcctgaacatttatttcctccattagaatctcattcgccttctcaaacaaaacccttacttgtaccacataaattgcaggggatcgaagcctccaatttagtac

SEQ ID NO: 110490 - DNA, 227 bp, Zea Mays
tagggaggagctcgtgtcgtcggcgtgttgggctgctagcgtggaagtaggagcaggtgtaaggatggctccaccgcatgaggttcttgcggcagtggacagaatggcccatctcggcgcccggtgtccgtcaacgctcgatttcagctatggcgatgctggcagtgcagcccctctattgaatctaggatgggattcctatgccacaagcgaattggacctgcaaa

SEQ ID NO: 110491 - DNA, 1259 bp, Zea Mays
ctcccacgctctacctccacacacacacaacacacaggtacgcacagacgctatgtacatctagacacctcatgcatggtctggtcgcctaccatgtctcctttgatccttttgtgttttactggccaccccttctacctccactggcatgccatcatctgaaaccccagaacaaatcaacctttccctgcctcccctccctccaacaggcaacagccatccgagaatattcacacatggaggaaaatatgtacaaggatcatcttagtacaaatctagaaaaataaaaatctttttttttggtttttcccacgaactttcttctcctgctgctgtgcagtgacgcctctaagcttccctcacgcacttaccatggataagcaccgttcagaggaggcacggctgatgctgatagtttcaggagtttcattccctcagttgatgaggtcggagacccaactgacgttcagagccgctacctctacgttggcggaggcgacggtgtcgttgggcacggcgctttctttgctgagccgttcgaacaccttctcgcggagggctctcccggactcgacccgctccatgaccggctcctcgtccacgaggagcccgaggttgaggcgttccacggtcatgatggtggcgccggaggcggtggtcaccatcactgggcacgaccgggttggtggtgtggacgggagactgtacagaccggccggcgacttcagggacccgaacgggtagccgcctgccaagaacgacccgccggaaggcgccgacctcggcgagccgccgccgaggcggagctggcgcagcgaggcgaggacctcgttgacgggcgagccgccgacacccggccacgcgccgcggcggcggcgtccggcgacattggcggggactccgacggcggcgacctcgggggcgagaccagcgtgctggtcggggacgacgacatgacgccgctcttggtgaggtagctctggaacgcctggcggcggagcggcgagccgtcgtacgacggctcggccagcagcgacgccgcggacgcgcccctcgggctggactgttgcgcctgtggcacgcgaagctggtccggcgtgtgcgcgaagaagcagacgcggcggcggcacccggtgccgtccttgcagggctgcgatccgttagcgcaacgggtggagccagcactcgaacaccccgtgcgccagctcgcacgcggtcgcaggcgcaggacctaaacagccgccatggagattgtcaga

SEQ ID NO: 110492 - DNA, 326 bp, Zea Mays
cggatcgatgttgcctccctgtacagtcgcagcactcccagatgccctttgactcgtccgagatccagtctcatcgcatgcgccatgtgcatgcacatcgatcaggagcacgagcgtcgccgccgctgaggatggaggaggatcctggcctccggctccgggctgctgttcgcggtctcgcggacatggacgttggacgacatcgttgataacttgatatgcagctaggccaccgacaaggaaaatttgctacagcttcttttctatacttacggctccccgccagtttaatttgagcactgccaccaagttttgcctgttattcc

SEQ ID NO: 110493 - DNA, 307 bp, Zea Mays
tggttgcagcagcaaactcggattcggcaagaatctcatttttttggtagtacgaagggggaattggcccaaaaattggataggggtaaagacgcaaccgggtgccggcggcttattcaagtgccccccgaaccgcgcgaaatggtcgcctattacacggctcacaaactctgcctggggtggggctaccttttattcgtaggcggtacgtacggtacacgcagggcctcggtttgctgcgtggactgtctatgcatttcctacagagtgtaatggaactcagctcagctccgccgagccagcgaga

SEQ ID NO: 110494 - DNA, 1004 bp, Zea Mays
atggaacacaatagttaccccaccaaggatgcaagatttaggcagagtgacaatgacatttcccctttgcatgaagtgctaaggggtaaaacaaccatgccaactcttcctagtagtgcacctaatgatcatgctcactccttccacaactactatgataatagtgaggcaatatcacaccaactccacccagtttttaatcacgtaccatcgactagcaccattgcaccaacagggatgaagcaaagctcaaagaatgagcaagagcttatgcacatgtttttgacaaccccagtaagtgagcatgcacgcaataaggttttgtccatggagccccagtcaatagaatctttgctccaaggaaaccctatggctattctccaagctcaccttgacattgttggagtttctgatccgggttcgatcttccatgaccctaccttgcatattcctaaggacaagatgcacaaatcttttggagcttcatcctcatcccatgatggcttttatggaaaaatatcatatgtcaaaccaacttactttaatcaaccacccctatcctcagttgtccagagagagcagcacatgccaagtggttttccaagcggtaattcttatgatgccaacaaagaggttatgagctctacaattaattttggaagagtccagaagcagaagtacacatgcaagctttgtaatgctacatttagcacacaacaaatgtatcatggtcacattagcttgttgcacaataagggaatgggtagcaattaaaatgggcaatcaccccacaacaaatgcttatccatgttgtaaaccaccacttatgttaggacaaatatgaccgagtggtttcttctcatcaggtggaagtaattgaatttaataatagtatgagtaaaatatttctatatgcatgaacaattgcatttatgttgtgattgaggcttatgagagaacatatgattattcgcctaaagcagtttgctataaaaatacaaaaa

SEQ ID NO: 110495 - DNA, 103 bp, Zea Mays
gttgggcacttaatcaccaaaacattatagaaattgcccaagggcacatttccctttcaatagatcatgatgccatcaaacctcttcctttgtgctatctcaa

SEQ ID NO: 110496 - DNA, 1527 bp, Zea Mays
gccacggcccaatcgccggctgacactcacaagaacctgcctccctcggtctggatcgctatctcttttctagcggctccagagggagggaaagctagcgcacagccgagagaagaaagcagagagggagggagaacaaagagagagagaaaaaaaaaaccagagaggttgagcaagaaccgaggcggatccgccttttgtccctcctgcccgagggctagcctgccgccgcccccgcgagagatcgagaggaggcgctgttcagttcagtcctgtgattccttcctacaggggggtgagaagccgtgggggaagagatgatgcgggagacgtacatggacgtgctgccgccggtggaccacatagccgcctcacggagcggcggctggttcccgggcgcggcgcgtctctggacggcggcggagaacaagcagttcgagcgggcgctggccgggctcgacctctgccgcccggactgggagaaggtggcgcgggccatcccgggccggacggtgcgcgaggtcgtcagccacttcaagagcctccaggtcgacgtccagcagatcgagagcggcctggtgcccatgccggtctacggcgccggggccggctcgttcaccctgcagtgggacggctgctacggccccgcggactcgaggcacaacggctaccgcttcggaagcggaggctgcgggaggcggcaccacggccgcaccccggagcaggaccggaagaagggcgtgccgtggacggaggaggagcacaggctgttcctcttaggcctgaagaaatacggcaagggggactggaggaacatatcgcgcaactacgtccagacgcggacgcccacgcaggtggccagccacgcgcagaagtacttcatcaggctcaactccggcggcaaggacaagaggaggtccagcatccacgacatcaccacggtgaacctgacggacgacgagcgggcgccctcgccgtcgcggtcctctctgatcaccaccaccagccagccaaacgcgccggctccggccgcagcggtgataggcgggcccttctcgtcggcggcggcggccgaggccaagcagcaccagcacggcgctgggaacctgccaccgaaccggacctccgtggtgccggctgtttacaggatggacgattcgcaggaccacggcctgcagtgtggccctctgcgtcatcaactggtcgccagccaccacagcgttctgttttaggcgcaagcgcaatcccactttgaggcgcgccatggtcatggatccatccatcaggtgttgtctagtgtgtgtgtgtacgatgcgtgtgttctttgctgtagcttcagcgcctgtatcgaagtgattagccttttggggagggggggcgtaacggaaaggggatcttcggttccacggtggtccaggtccacaatttgttgttggtgatgccgagaacgtaacaaaaaaaaggacgccaagaattctgagtggacttggcattcaatcatggaccctgcttttgctcgccgtggcc

SEQ ID NO: 110497 - DNA, 1642 bp, Zea Mays
gccacggcccaatcgccggctgacactcacaagaacctgcctccctcggtctggatcgctatctcttttctagcggctccagagggagggaaagctagcgcacagccgagagaagaaagcagagagggagggagaacaaagagagagagaaaaaaaaaaccagagaggttgagcaagaaccgaggcggatccgccttttgtccctcctgcccgagggctagcctgccgccgcccccgcgagagatcgagaggaggcgctgttcagttcaggggggtgagaagccgtgggggaagagatgatgcgggagacgtacatggacgtgctgccgccggtggaccacatagccgcctcacggagcggcggctggttcccgggcgcggcgcgtctctggacggcggcggagaacaagcagttcgagcgggcgctggccgggctcgacctctgccgcccggactgggagaaggtggcgcgggccatcccgggccggacggtgcgcgaggtcgtcagccacttcaagagcctccaggtcgacgtccagcagatcgagagcggcctggtgcccatgccggtctacggcgccggggccggctcgttcaccctgcagtgggacggctgctacggccccgcggactcgaggcacaacggctaccgcttcggaagcggaggctgcgggaggcggcaccacggccgcaccccggagcaggaccggaagaagggcgtgccgtggacggaggaggagcacaggctgttcctcttaggcctgaagaaatacggcaagggggactggaggaacatatcgcgcaactacgtccagacgcggacgcccacgcaggtggccagccacgcgcagaagtacttcatcaggctcaactccggcggcaaggacaagaggaggtccagcatccacgacatcaccacggtgaacctgacggacgacgagcgggcgccctcgccgtcgcggtcctctctgatcaccaccaccagccagccaaacgcgccggctccggccgcagcggtgataggcgggcccttctcgtcggcggcggcggccgaggccaagcagcaccagcacggcgctgggaacctgccaccgaaccggacctccgtggtgccggctgtttacaggatggacgattcgcaggaccacggcctgcagtgtggccctctgcgtcatcaactggtcgccagccaccacagcgttctgttttaggcgcaagcgcaatcccactttgaggcgcgccatggtcatggatccatccatcaggtgttgtctagtgtgtgtgtgtacgatgcgtgtgttctttgctgtagcttcagcgcctgtatcgaagtgattagccttttggggagggggggcgtaacggaaaggggatcttcggttccacggtggtccaggtccacaatttgttgttggtgatgccgagaacgtaacaaaaaaaaggacgccaagaattctgagtggacttggcattcaatcatggaccctgcttttgctcgccgtggcccgggatgatcagcagaacctaattctggatccttcttggtcggctgatgtatcccttgagtgaccttggtgaccatctcatcctgctgctgtctctgaagacggcgacgcgcttgtattggagggtttcagagttc

SEQ ID NO: 110498 - DNA, 320 bp, Zea Mays
atcaccgccgccgtgcgccattagcgaatgggagaattcgccgtcgcatcttcaccatatggtggccgccggggagaccacgtcgtcggggactctgggttctccattgccgtgcgccagtactggagtgaggctcctcgcctctacctcgcaccggcggatctcgtgctgttgggcgcgaccatcggataatggtgaagatgtcggagttcggcgcccggttgtgaactgcgctccaaggtcggtcggctctcctccatcggtgaagagcccgtgactgaggaccctggtgagcagcaggttgaagtagctgagcagga

SEQ ID NO: 110499 - DNA, 507 bp, Zea Mays
atggaaggcaccgttctagggtccttcacggccacccccgccccgccgcgagtcgtccctgccctccagaaatctcgcccgtgccgccacatctccgccgaaaatcttgccccctcccccgaaacctcgctgccacccctcctcacgctccttatcccccacatcctcgccacagggtccttgtcctttggaaagaaccaaagacccatcaactcaatctggacacaacaatttatcttaggcaaccggtcttatcgatggggtgttgaaggagtcgttcctagagacactacgaaagaagtgaagatggagtggcttgcgaggtgcaagtttctgtccttttttatagagatggtgcccgtggagccccttccggaggctccgaaggacggcaggcaagtgtgccccatgtcagactattgccctctcacgatcgatggggtgcagaaggagtcgttcctagagaccctacgaaaggagcagagatggagtggcctgcacgagtag

SEQ ID NO: 110500 - DNA, 1312 bp, Zea Mays
atcgtcaccgcagaaaagaatttctgtttcccttcaatgagatggagaatccgagaatgggataagaccgcgccgcgcgcgctctcctctccgccactctcaccgtcgcctgccccgccatgacttccttgctgttgccgccgccgcaggcggctgccgcagcgtacggatgctgccactgtctcctgctcgcttctaccaccgtgccggcgaggagtgggtgcgtgggacgcgccagcagaatcacgctcgcgctccgctgcctcccgattaccgggcacaggctgaggagtcgaaaggttgcgtgccaagcgacgactgagaccgagcccgagggcaatggcgacgaggaggataagaaagagtttggagatgatgcttcatcaccttcagtttataatgttgcagaagcaaatgggccgggagaaaatgactcgagtttagacaataagaaagatgaaaccacgaatgcagaagcagcactgctgagctccggcgacacggtccaggacatggatgcagatgctacttctaccaatggcatacaagaaaatgtggaagttattgaagttgctagtggatctccattgccaggaatgaagcaacagcttgatgattctgtcaggatccccaaggctacaatagacattctaaaggatcaggtttttggatttgacacattttttgtaacaagtcaggagccttacgagggtggagtattattcaagggaaatcttcgtggtaaaccagccaaaagttatgagaagatcacaagtcggctacagaacaaatttggtgatgaatataagctttttcttctcatcaacccagaggatgagaagccagttgctgtggttatacccaagcagacattacagcctgaaactacaggtgacaaaaatttatcagtaccttcggtggcgtcggtagtgctcagagtgcggtcccagaatggtttgctgctgctgcatttggattagttaccatcttcactctgctacttcgaaatgtacctgttctacaggagaacttgctatcaacatttgacaaccttgagttgttgaaagacggactatccggtgctctagtaactggccttataataggggtgcacgaaattggacatatccttgctgccagggaaagtggaatcaagctcggcgtgccatattttgttcctagctggcaggtaaagacattgtacaaaaaaaatagtgaattacctgtagggaaaaaaattgaaaattatttgtatctttgtagtgcatgtttatggaaattgtttgaaacaaatgacaagagcttgttaaat

SEQ ID NO: 110501 - DNA, 2135 bp, Zea Mays
atcgtcaccgcagaaaagaatttctgtttcccttcaatgagatggagaatccgagaatgggataagaccgcgccgcgcgcgctctcctctccgccactctcaccgtcgcctgccccgccatgacttccttgctgttgccgccgccgcaggcggctgccgcagcgtacggatgctgccactgtctcctgctcgcttctaccaccgtgccggcgaggagtgggtgcgtgggacgcgccagcagaatcacgctcgcgctccgctgcctcccgattaccgggctgaggagtcgaaaggttgcgtgccaagcgacgactgagaccgagcccgagggcaatggcgacgaggaggataagaaagagtttggagatgatgcttcatcaccttcagtttataatgttgcagaagcaaatgggccgggagaaaatgactcgagtttagacaataagaaagatgaaaccacgaatgcagaagcagcactgctgagctccggcgacacggtccaggacatggatgcagatgctacttctaccaatggcatacaagaaaatgtggaagttattgaagttgctagtggatctccattgccaggaatgaagcaacagcttgatgattctgtcaggatccccaaggctacaatagacattctaaaggatcaggtttttggatttgacacattttttgtaacaagtcaggagccttacgagggtggagtattattcaagggaaatcttcgtggtaaaccagccaaaagttatgagaagatcacaagtcggctacagaacaaatttggtgatgaatataagctttttcttctcatcaacccagaggatgagaagccagttgctgtggttatacccaagcagacattacagcctgaaactacagcggtcccagaatggtttgctgctgctgcatttggattagttaccatcttcactctgctacttcgaaatgtacctgttctacaggagaacttgctatcaacatttgacaaccttgagttgttgaaagacggactatccggtgctctagtaactggccttataataggggtgcacgaaattggacatatccttgctgccagggaaagtggaatcaagctcggcgtgccatattttgttcctagctggcagataggatctttcggcgggattaccagaatcgtcaatatcgtccgcaaccgtgaggacctactgaagctagcggctgctggaccattggccgggttttccttgggattcgttcttctgctgctgggcttcgtcttgcctccaagtgatggccttggccttgtgatagatccaaccgtcttccatgaatcgttcctcgttggtggtctcgcgaaacttcttctcggagatgttttgaaagaagggacgcagttatccataaacccgcttgttctatgggcctgggccggtctcctgatcaacgctatcaacagcatacccgctggggagcttgacggcggccgcatagcgttggccatgtggggaagaaaggtatcgtcccggatcagcagcctcgccatcgggctgctcggggtcgcggctctcttcaacgacgtcgccttctactgggtggtgctgatcttcttcctgcagaggggccccattgctcctctctccgaggaaatcacagaccctgagaacagctacatcggcatcggtgctgccattttgctgtttgggcttctggtctgcctgccctacccgttcccctttgacccgtcgcagttaactgatatggatttcaacttctgagaaaaggaaaccaaaaaaaaagcagttacaactcaccggatgagatgtatttaacctgtcggctctgtattctgctgtgtcatcttttgctccattgctccttgtagtagccaataaaagcagagctttcttgtgtaagcttgcctgttgtattagtaggatgctcgatcagagtagaatatagatgttattttggctgtaactgttacctgtcagttgtggcttatcaacaataggttccttgtcagagtatgatctatcagattcatacgcgatacttagcgttttggataagaataagcagacctaggacattgtgcgattgttgtgccagagccattcaaactgatactgctactaccttatataaaa

SEQ ID NO: 110502 - DNA, 2072 bp, Zea Mays
gtcaccgcagaaaagaatttctgtttcccttcaatgagatggagaatccgagaatgggataagaccgcgccgcgcgcgctctcctctccgccactctcaccgtcgcctgccccgccatgacttccttgctgttgccgccgccgcaggcggctgccgcagcgtacggatgctgccactgtctcctgctcgcttctaccaccgtgccggcgaggagtgggtgcgtgggacgcgccagcagaatcacgctcgcgctccgctgcctcccgattaccgggcacaggctgaggagtcgaaaggttgcgtgccaagcgacgactgagaccgagcccgagggcaatggcgacgaggaggataagaaagagtttggagatgatgcttcatcaccttcagtttataatgttgcagaagcaaatgggccgggagaaaatgactcgagtttagacaatctttcccatgactcgccagaagaaagatgaaaccacgaatgcagaagcagcactgctgagctccggcgacacggtccaggacatggatgcagatgctacttctaccaatggcatacaagaaaatgtggaagttattgaagttgctagtggatctccattgccaggaatgaagcaacagcttgatgattctgtcaggatccccaaggctacaatagacattctaaaggatcaggtttttggatttgacacattttttgtaacaagtcaggagccttacgagggtggagtattattcaagggaaatcttcgtggtaaaccagccaaaagttatgagaagatcacaagtcggctacagaacaaatttggtgatgaatataagctttttcttctcatcaacccagaggatgagaagccagttgctgtggttatacccaagcagacattacagcctgaaactacagcggtcccagaatggtttgctgctgctgcatttggattagttaccatcttcactctgctacttcgaaatgtacctgttctacaggagaacttgctatcaacatttgacaaccttgagttgttgaaagacggactatccggtgctctagtaactggccttataataggggtgcacgaaattggacatatccttgctgccagggaaagtggaatcaagctcggcgtgccatattttgttcctagctggcagataggatctttcggcgggattaccagaatcgtcaatatcgtccgcaaccgtgaggacctactgaagctagcggctgctggaccattggccgggttttccttgggattcgttcttctgctgctgggcttcgtcttgcctccaagtgatggccttggccttgtgatagatccaaccgtcttccatgaatcgttcctcgttggtggtctcgcgaaacttcttctcggagatgttttgaaagaagggacgcagttatccataaacccgcttgttctatgggcctgggccggtctcctgatcaacgctatcaacagcatacccgctggggagcttgacggcggccgcatagcgttggccatgtggggaagaaaggtatcgtcccggatcagcagcctcgccatcgggctgctcggggtcgcggctctcttcaacgacgtcgccttctactgggtggtgctgatcttcttcctgcagaggggccccattgctcctctctccgaggaaatcacagaccctgagaacagctacatcggcatcggtgctgccattttgctgtttgggcttctggtctgcctgccctacccgttcccctttgacccgtcgcagttaactgatatggatttcaacttctgagaaaaggaaaccaaaaaaaaagcagttacaactcaccggatgagatgtatttaacctgtcggctctgtattctgctgtgtcatcttttgctccattgctccttgtagtagccaataaaagcagagctttcttgtgtaagcttgcctgttgtattagtaggatgctcgatcagagtagaatatagatgttattttggctgtaactgttacctgtcagttgtggcttatcaacaataggttccttgtcagagtatgatctatcagattcatacgcgatacttagcgttt

SEQ ID NO: 110503 - DNA, 2053 bp, Zea Mays
gtcaccgcagaaaagaatttctgtttcccttcaatgagatggagaatccgagaatgggataagaccgcgccgcgcgcgctctcctctccgccactctcaccgtcgcctgccccgccatgacttccttgctgttgccgccgccgcaggcggctgccgcagcgtacggatgctgccactgtctcctgctcgcttctaccaccgtgccggcgaggagtgggtgcgtgggacgcgccagcagaatcacgctcgcgctccgctgcctcccgattaccgggcacaggctgaggagtcgaaaggttgcgtgccaagcgacgactgagaccgagcccgagggcaatggcgacgaggaggataagaaagagtttggagatgatgcttcatcaccttcagtttataatgttgcagaagcaaatgggccgggagaaaatgactcgagtttagacaataagaaagatgaaaccacgaatgcagaagcagcactgctgagctccggcgacacggtccaggacatggatgcagatgctacttctaccaatggcatacaagaaaatgtggaagttattgaagttgctagtggatctccattgccaggaatgaagcaacagcttgatgattctgtcaggatccccaaggctacaatagacattctaaaggatcaggtttttggatttgacacattttttgtaacaagtcaggagccttacgagggtggagtattattcaagggaaatcttcgtggtaaaccagccaaaagttatgagaagatcacaagtcggctacagaacaaatttggtgatgaatataagctttttcttctcatcaacccagaggatgagaagccagttgctgtggttatacccaagcagacattacagcctgaaactacagcggtcccagaatggtttgctgctgctgcatttggattagttaccatcttcactctgctacttcgaaatgtacctgttctacaggagaacttgctatcaacatttgacaaccttgagttgttgaaagacggactatccggtgctctagtaactggccttataataggggtgcacgaaattggacatatccttgctgccagggaaagtggaatcaagctcggcgtgccatattttgttcctagctggcagataggatctttcggcgggattaccagaatcgtcaatatcgtccgcaaccgtgaggacctactgaagctagcggctgctggaccattggccgggttttccttgggattcgttcttctgctgctgggcttcgtcttgcctccaagtgatggccttggccttgtgatagatccaaccgtcttccatgaatcgttcctcgttggtggtctcgcgaaacttcttctcggagatgttttgaaagaagggacgcagttatccataaacccgcttgttctatgggcctgggccggtctcctgatcaacgctatcaacagcatacccgctggggagcttgacggcggccgcatagcgttggccatgtggggaagaaaggtatcgtcccggatcagcagcctcgccatcgggctgctcggggtcgcggctctcttcaacgacgtcgccttctactgggtggtgctgatcttcttcctgcagaggggccccattgctcctctctccgaggaaatcacagaccctgagaacagctacatcggcatcggtgctgccattttgctgtttgggcttctggtctgcctgccctacccgttcccctttgacccgtcgcagttaactgatatggatttcaacttctgagaaaaggaaaccaaaaaaaaagcagttacaactcaccggatgagatgtatttaacctgtcggctctgtattctgctgtgtcatcttttgctccattgctccttgtagtagccaataaaagcagagctttcttgtgtaagcttgcctgttgtattagtaggatgctcgatcagagtagaatatagatgttattttggctgtaactgttacctgtcagttgtggcttatcaacaataggttccttgtcagagtatgatctatcagattcatacgcgatacttagcgttt

SEQ ID NO: 110504 - DNA, 1957 bp, Zea Mays
gtcaccgcagaaaagaatttctgtttcccttcaatgagatggagaatccgagaatgggataagaccgcgccgcgcgcgctctcctctccgccactctcaccgtcgcctgccccgccatgacttccttgctgttgccgccgccgcaggcggctgccgcagcgtacggatgctgccactgtctcctgctcgcttctaccaccgtgccggcgaggagtgggtgcgtgggacgcgccagcagaatcacgctcgcgctccgctgcctcccgattaccgggcacaggctgaggagtcgaaaggttgcgtgccaagcgacgactgagaccgagcccgagggcaatggcgacgaggagaagaaagatgaaaccacgaatgcagaagcagcactgctgagctccggcgacacggtccaggacatggatgcagatgctacttctaccaatggcatacaagaaaatgtggaagttattgaagttgctagtggatctccattgccaggaatgaagcaacagcttgatgattctgtcaggatccccaaggctacaatagacattctaaaggatcaggtttttggatttgacacattttttgtaacaagtcaggagccttacgagggtggagtattattcaagggaaatcttcgtggtaaaccagccaaaagttatgagaagatcacaagtcggctacagaacaaatttggtgatgaatataagctttttcttctcatcaacccagaggatgagaagccagttgctgtggttatacccaagcagacattacagcctgaaactacagcggtcccagaatggtttgctgctgctgcatttggattagttaccatcttcactctgctacttcgaaatgtacctgttctacaggagaacttgctatcaacatttgacaaccttgagttgttgaaagacggactatccggtgctctagtaactggccttataataggggtgcacgaaattggacatatccttgctgccagggaaagtggaatcaagctcggcgtgccatattttgttcctagctggcagataggatctttcggcgggattaccagaatcgtcaatatcgtccgcaaccgtgaggacctactgaagctagcggctgctggaccattggccgggttttccttgggattcgttcttctgctgctgggcttcgtcttgcctccaagtgatggccttggccttgtgatagatccaaccgtcttccatgaatcgttcctcgttggtggtctcgcgaaacttcttctcggagatgttttgaaagaagggacgcagttatccataaacccgcttgttctatgggcctgggccggtctcctgatcaacgctatcaacagcatacccgctggggagcttgacggcggccgcatagcgttggccatgtggggaagaaaggtatcgtcccggatcagcagcctcgccatcgggctgctcggggtcgcggctctcttcaacgacgtcgccttctactgggtggtgctgatcttcttcctgcagaggggccccattgctcctctctccgaggaaatcacagaccctgagaacagctacatcggcatcggtgctgccattttgctgtttgggcttctggtctgcctgccctacccgttcccctttgacccgtcgcagttaactgatatggatttcaacttctgagaaaaggaaaccaaaaaaaaagcagttacaactcaccggatgagatgtatttaacctgtcggctctgtattctgctgtgtcatcttttgctccattgctccttgtagtagccaataaaagcagagctttcttgtgtaagcttgcctgttgtattagtaggatgctcgatcagagtagaatatagatgttattttggctgtaactgttacctgtcagttgtggcttatcaacaataggttccttgtcagagtatgatctatcagattcatacgcgatacttagcgttt

SEQ ID NO: 110505 - DNA, 2054 bp, Zea Mays
gtcaccgcagaaaagaatttctgtttcccttcaatgagatggagaatccgagaatgggataagaccgcgccgcgcgcgctctcctctccgccactctcaccgtcgcctgccccgccatgacttccttgctgttgccgccgccgcaggcggctgccgcagcgtacggatgctgccactgtctcctgctcgcttctaccaccgtgccggcgaggagtgggtgcgtgggacgcgccagcagaatcacgctcgcgctccgctgcctcccgattaccgggcacaggctgaggagtcgaaaggttgcgtgccaagcgacgactgagaccgagcccgagggcaatggcgacgaggaggataagaaagagtttggagatgatgcttcatcaccttcagtttataatgttgcagaagcaaatgggccgggagaaaatgactcgagtttagacaataagaaagatgaaaccacgaatgcagaagcagcactgctgagctccggcgacacggtccaggacatggatgcagatgctacttctaccaatggcatacaagaaaatgtggaagttattgaagttgctagtggatctccattgccaggaatgaagcttgatgattctgtcaggatccccaaggctacaatagacattctaaaggatcaggtttttggatttgacacattttttgtaacaagtcaggagccttacgagggtggagtattattcaagggaaatcttcgtggtaaaccagccaaaagttatgagaagatcacaagtcggctacagaacaaatttggtgatgaatataagctttttcttctcatcaacccagaggatgagaagccagttgctgtggttatacccaagcagacattacagcctgaaactacagcggtcccagaatggtttgctgctgctgcatttggattagttaccatcttcactctgctacttcgaaatgtacctgttctacaggagaacttgctgtacgagatcaacatttgacaaccttgagttgttgaaagacggactatccggtgctctagtaactggccttataataggggtgcacgaaattggacatatccttgctgccagggaaagtggaatcaagctcggcgtgccatattttgttcctagctggcagataggatctttcggcgggattaccagaatcgtcaatatcgtccgcaaccgtgaggacctactgaagctagcggctgctggaccattggccgggttttccttgggattcgttcttctgctgctgggcttcgtcttgcctccaagtgatggccttggccttgtgatagatccaaccgtcttccatgaatcgttcctcgttggtggtctcgcgaaacttcttctcggagatgttttgaaagaagggacgcagttatccataaacccgcttgttctatgggcctgggccggtctcctgatcaacgctatcaacagcatacccgctggggagcttgacggcggccgcatagcgttggccatgtggggaagaaaggtatcgtcccggatcagcagcctcgccatcgggctgctcggggtcgcggctctcttcaacgacgtcgccttctactgggtggtgctgatcttcttcctgcagaggggccccattgctcctctctccgaggaaatcacagaccctgagaacagctacatcggcatcggtgctgccattttgctgtttgggcttctggtctgcctgccctacccgttcccctttgacccgtcgcagttaactgatatggatttcaacttctgagaaaaggaaaccaaaaaaaaagcagttacaactcaccggatgagatgtatttaacctgtcggctctgtattctgctgtgtcatcttttgctccattgctccttgtagtagccaataaaagcagagctttcttgtgtaagcttgcctgttgtattagtaggatgctcgatcagagtagaatatagatgttattttggctgtaactgttacctgtcagttgtggcttatcaacaataggttccttgtcagagtatgatctatcagattcatacgcgatacttagcgttt

SEQ ID NO: 110506 - DNA, 1499 bp, Zea Mays
ggagaatccgagaatgggataagaccgcgccgcgcgcgctctcctctccgccactctcaccgtcgcctgccccgccatgacttccttgctgttgccgccgccgcaggcggctgccgcagcgtacggatgctgccactgtctcctgctcgcttctaccaccgtgccggcgaggagtgggtgcgtgggacgcgccagcagaatcacgctcgcgctccgctgcctcccgattaccgggcacaggctgaggagtcgaaaggttgcgtgccaagcgacgactgagaccgagcccgagggcaatggcgacgaggaggataagaaagagtttggagatgatgcttcatcaccttcagtttataatgttgcagaagcaaatgggccgggagaaaatgactcgagtttagacaatctttcccatgactcgccagaagaaagatgaaaccacgaatgcagaagcagcactgctgagctccggcgacacggtccaggacatggatgcagatgctacttctaccaatggcatacaagaaaatgtggaagttattgaagttgctagtggatctccattgccaggaatgaagcaacagcttgatgattctgtcaggatccccaaggctacaatagacattctaaaggatcaggtttttggatttgacacattttttgtaacaagtcaggagccttacgaggtaaatatatgagatgccatggattaacttctgtataaatcagatttttaccttactaactgtgtttatacaagacaaactcatactcaaatactcaattgatgcatgctacaccagtaagtatgctcttggtctgactaagccaagtgctctcacagaatattgtttaactttactctaggttgacattttgtcatgtaaaataaaggtctcaagtataatggccttgaatgactaagttctatttaccaacttactttgtctgaataagggtggagtattattcaagggaaatcttcgtggtaaaccagccaaaagttatgagaagatcacaagtcggctacagaacaaatttggtgatgaatataagctttttcttctcatcaacccagaggatgagaagccagttgctgtggttatacccaagcagacattacagcctgaaactacaggtgacaaaaatttatcagtaccttcggtggcgtcggtagtgctcagagtggtccgatattttgcttaactgttaggcatctatgattttattagtatatttattcagtgcaaaggttgctgagttgatatattaaatttcagcggtcccagaatggtttgctgctgctgcatttggattagttaccatcttcactctgctacttcgaaatgtacctgttctacaggagaacttgctgtacgaggtttctctttcatttattcaccagtccattttgttttagattgcttgtttccattttcatgtttccccgccttgatgtcatgtttgagttgctatatatgcttactcttttctgttag

SEQ ID NO: 110507 - DNA, 2284 bp, Zea Mays
ggagaatccgagaatgggataagaccgcgccgcgcgcgctctcctctccgccactctcaccgtcgcctgccccgccatgacttccttgctgttgccgccgccgcaggcggctgccgcagcgtacggatgctgccactgtctcctgctcgcttctaccaccgtgccggcgaggagtgggtgcgtgggacgcgccagcagaatcacgctcgcgctccgctgcctcccgattaccgggcacaggctgaggagtcgaaaggttgcgtgccaagcgacgactgagaccgagcccgagggcaatggcgacgaggaggataagaaagagtttggagatgatgcttcatcaccttcagtttataatgttgcagaagcaaatgggccgggagaaaatgactcgagtttagacaataagaaagatgaaaccacgaatgcagaagcagcactgctgagctccggcgacacggtccaggacatggatgcagatgctacttctaccaatggcatacaagaaaatgtggaagttattgaagttgctagtggatctccattgccaggaatgaagcaacagcttgatgattctgtcaggatccccaaggctacaatagacattctaaaggatcaggtttttggatttgacacattttttgtaacaagtcaggagccttacgaggtaaatatatgagatgccatggattaacttctgtataaatcagatttttaccttactaactgtgtttatacaagacaaactcatactcaaatactcaattgatgcatgctacaccagtaagtatgctcttggtctgactaagccaagtgctctcacagaatattgtttaactttactctaggttgacattttgtcatgtaaaataaaggtctcaagtataatggccttgaatgactaagttctatttaccaacttactttgtctgaataagggtggagtattattcaagggaaatcttcgtggtaaaccagccaaaagttatgagaagatcacaagtcggctacagaacaaatttggtgatgaatataagctttttcttctcatcaacccagaggatgagaagccagttgctgtggttatacccaagcagacattacagcctgaaactacagcggtcccagaatggtttgctgctgctgcatttggattagttaccatcttcactctgctacttcgaaatgtacctgttctacaggagaacttgctatcaacatttgacaaccttgagttgttgaaagacggactatccggtgctctagtaactggccttataataggggtgcacgaaattggacatatccttgctgccagggaaagtggaatcaagctcggcgtgccatattttgttcctagctggcagataggatctttcggcgggattaccagaatcgtcaatatcgtccgcaaccgtgaggacctactgaagctagcggctgctggaccattggccgggttttccttgggattcgttcttctgctgctgggcttcgtcttgcctccaagtgatggccttggccttgtgatagatccaaccgtcttccatgaatcgttcctcgttggtggtctcgcgaaacttcttctcggagatgttttgaaagaagggacgcagttatccataaacccgcttgttctatgggcctgggccggtctcctgatcaacgctatcaacagcatacccgctggggagcttgacggcggccgcatagcgttggccatgtggggaagaaaggtatcgtcccggatcagcagcctcgccatcgggctgctcggggtcgcggctctcttcaacgacgtcgccttctactgggtggtgctgatcttcttcctgcagaggggccccattgctcctctctccgaggaaatcacagaccctgagaacagctacatcggcatcggtgctgccattttgctgtttgggcttctggtctgcctgccctacccgttcccctttgacccgtcgcagttaactgatatggatttcaacttctgagaaaaggaaaccaaaaaaaaagcagttacaactcaccggatgagatgtatttaacctgtcggctctgtattctgctgtgtcatcttttgctccattgctccttgtagtagccaataaaagcagagctttcttgtgtaagcttgcctgttgtattagtaggatgctcgatcagagtagaatatagatgttattttggctgtaactgttacctgtcagttgtggcttatcaacaataggttccttgtcagagtatgatctatcagattcatacgcgatacttagcgttt

SEQ ID NO: 110508 - DNA, 2059 bp, Zea Mays
ggagaatccgagaatgggataagaccgcgccgcgcgcgctctcctctccgccactctcaccgtcgcctgccccgccatgacttccttgctgttgccgccgccgcaggcggctgccgcagcgtacggatgctgccactgtctcctgctcgcttctaccaccgtgccggcgaggagtgggtgcgtgggacgcgccagcagaatcacgctcgcgctccgctgcctcccgattaccgggcacaggctgaggagtcgaaaggttgcgtgccaagcgacgactgagaccgagcccgagggcaatggcgacgaggagaagaaagatgaaaccacgaatgcagaagcagcactgctgagctccggcgacacggtccaggacatggatgcagatgctacttctaccaatggcatacaagaaaatgtggaagttattgaagttgctagtggatctccattgccaggaatgaagcaacagcttgatgattctgtcaggatccccaaggctacaatagacattctaaaggatcaggtttttggatttgacacattttttgtaacaagtcaggagccttacgagggtggagtattattcaagggaaatcttcgtggtaaaccagccaaaagttatgagaagatcacaagtcggctacagaacaaatttggtgatgaatataagctttttcttctcatcaacccagaggatgagaagccagttgctgtggttatacccaagcagacattacagcctgaaactacaggtgacaaaaatttatcagtaccttcggtggcgtcggtagtgctcagagtggtccgatattttgcttaactgttaggcatctatgattttattagtatatttattcagtgcaaaggttgctgagttgatatattaaatttcagcggtcccagaatggtttgctgctgctgcatttggattagttaccatcttcactctgctacttcgaaatgtacctgttctacaggagaacttgctatcaacatttgacaaccttgagttgttgaaagacggactatccggtgctctagtaactggccttataataggggtgcacgaaattggacatatccttgctgccagggaaagtggaatcaagctcggcgtgccatattttgttcctagctggcagataggatctttcggcgggattaccagaatcgtcaatatcgtccgcaaccgtgaggacctactgaagctagcggctgctggaccattggccgggttttccttgggattcgttcttctgctgctgggcttcgtcttgcctccaagtgatggccttggccttgtgatagatccaaccgtcttccatgaatcgttcctcgttggtggtctcgcgaaacttcttctcggagatgttttgaaagaagggacgcagttatccataaacccgcttgttctatgggcctgggccggtctcctgatcaacgctatcaacagcatacccgctggggagcttgacggcggccgcatagcgttggccatgtggggaagaaaggtatcgtcccggatcagcagcctcgccatcgggctgctcggggtcgcggctctcttcaacgacgtcgccttctactgggtggtgctgatcttcttcctgcagaggggccccattgctcctctctccgaggaaatcacagaccctgagaacagctacatcggcatcggtgctgccattttgctgtttgggcttctggtctgcctgccctacccgttcccctttgacccgtcgcagttaactgatatggatttcaacttctgagaaaaggaaaccaaaaaaaaagcagttacaactcaccggatgagatgtatttaacctgtcggctctgtattctgctgtgtcatcttttgctccattgctccttgtagtagccaataaaagcagagctttcttgtgtaagcttgcctgttgtattagtaggatgctcgatcagagtagaatatagatgttattttggctgtaactgttacctgtcagttgtggcttatcaacaataggttccttgtcagagtatgatctatcagattcatacgcgatacttagcgttt

SEQ ID NO: 110509 - DNA, 1412 bp, Zea Mays
gccccgccatgacttccttgctgttgccgccgccgcaggcggctgccgcagcgtacggatgctgccactgtctcctgctcgcttctaccaccgtgccggcgaggagtgggtgcgtgggacgcgccagcagaatcacgctcgcgctccgctgcctcccgattaccgggcacaggctgaggagtcgaaaggttgcgtgccaagcgacgactgagaccgagcccgagggcaatggcgacgaggaggataagaaagagtttggagatgatgcttcatcaccttcagtttataatgttgcagaagcaaatgggccgggagaaaatgactcgagtttagacaataagaaagatgaaaccacgaatgcagaagcagcactgctgagctccggcgacacggtccaggacatggatgcagatgctacttctaccaatggcatacaagaaaatgtggaagttattgaagttgctagtggatctccattgccaggaatgaagcaacagcttgatgattctgtcaggatccccaaggctacaatagacattctaaaggatcaggtttttggatttgacacattttttgtaacaagtcaggagccttacgaggtaaatatatgagatgccatggattaacttctgtataaatcagatttttaccttactaactgtgtttatacaagacaaactcatactcaaatactcaattgatgcatgctacaccagtaagtatgctcttggtctgactaagccaagtgctctcacagaatattgtttaactttactctaggttgacattttgtcatgtaaaataaaggtctcaagtataatggccttgaatgactaagttctatttaccaacttactttgtctgaataagggtggagtattattcaagggaaatcttcgtggtaaaccagccaaaagttatgagaagatcacaagtcggctacagaacaaatttggtgatgaatataagctttttcttctcatcaacccagaggatgagaagccagttgctgtggttatacccaagcagacattacagcctgaaactacaggtgacaaaaatttatcagtaccttcggtggcgtcggtagtgctcagagtggtccgatattttgcttaactgttaggcatctatgattttattagtatatttattcagtgcaaaggttgctgagttgatatattaaatttcagcggtcccagaatggtttgctgctgctgcatttggattagttaccatcttcactctgctacttcgaaatgtacctgttctacaggagaacttgctgtacgaggtttctctttcatttattcaccagtccattttgttttagattgcttgtttccattttcatgtttccccgccttgatgtcatgtttgagttgctatatatgcttactcttttctgttag

SEQ ID NO: 110510 - DNA, 1700 bp, Zea Mays
atgacttccttgctgttgccgccgccgcaggcggctgccgcagcgtacggatgctgccactgtctcctgctcgcttctaccaccgtgccggcgaggagtgggtgcgtgggacgcgccagcagaatcacgctcgcgctccgctgcctcccgattaccgggcacaggctgaggagtcgaaaggttgcgtgccaagcgacgactgagaccgagcccgagggcaatggcgacgaggaggataagaaagagtttggagatgatgcttcatcaccttcagtttataatgttgcagaagcaaatgggccgggagaaaatgactcgagtttagacaataagaaagatgaaaccacgaatgcagaagcagcactgctgagctccggcgacacggtccaggacatggatgcagatgctacttctaccaatggcatacaagaaaatgtggaagttattgaagttgctagtggatctccattgccaggaatgaagcaacagcttgatgattctgtcaggatccccaaggctacaatagacattctaaaggatcaggtttttggatttgacacattttttgtaacaagtcaggagccttacgagggtggagtattattcaagggaaatcttcgtggtaaaccagccaaaagttatgagaagatcacaagtcggctacagaacaaatttggtgatgaatataagctttttcttctcatcaacccagaggatgagaagccagttgctgtggttatacccaagcagacattacagcctgaaactacaggtgacaaaaatttatcagtaccttcggtggcgtcggtagtgctcagagtgcggtcccagaatggtttgctgctgctgcatttggattagttaccatcttcactctgctacttcgaaatgtacctgttctacaggagaacttgctatcaacatttgacaaccttgagttgttgaaagacggactatccggtgctctagtaactggccttataataggggtgcacgaaattggacatatccttgctgccagggaaagtggaatcaagctcggcgtgccatattttgttcctagctggcagataggatctttcggcgggattaccagaatcgtcaatatcgtccgcaaccgtgaggacctactgaagctagcggctgctggaccattggccgggttttccttgggattcgttcttctgctgctgggcttcgtcttgcctccaagtgatggccttggccttgtgatagatccaaccgtcttccatgaatcgttcctcgttggtggtctcgcgaaacttcttctcggagatgttttgaaagaagggacgcagttatccataaacccgcttgttctatgggcctgggccggtctcctgatcaacgctatcaacagcatacccgctggggagcttgacggcggccgcatagcgttggccatgtggggaagaaaggtatcgtcccggatcagcagcctcgccatcgggctgctcggggtcgcggctctcttcaacgacgtcgccttctactgggtggtgctgatcttcttcctgcagaggggccccattgctcctctctccgaggaaatcacagaccctgagaacagctacatcggcatcggtgctgccattttgctgtttgggcttctggtctgcctgccctacccgttcccctttgacccgtcgcagttaactgatatggatttcaacttctga

SEQ ID NO: 110511 - DNA, 1101 bp, Zea Mays
tccaggcacatcaggttgttgttgacgctcggctcagagctagcgttgctgcttgttgcgagcggtgagtctgagacactcattggtctgctccttgtggatcctgaacgtgcgctatgaacagatgatggagggatacttgtcataagaggccgtaaattgtttggaatgctgcgccgattcacactgtcacctccattgagatgtgaccttctcactgctggcatggagctccctgaaggcacgctgccacttaaagtccttcctctggagggagagcaagactgccgtcttggtcgaccagctggcccactctcaacagagcaagatctagaactaggtgccccaggtctgcccctagtggcagaggttggtctttctggtagcgatgtccttaggtttggaggtgcatcaagagagaaaccaggcatttcagatggtttccatggtcttgatttgacagtaggggagctgcctcttgaaggtgttggcgctgcagtttttgctggtgaagaacctttgggcattgtcgaacctggtttggagattgaggacgatctaactggtgcagctaagttaccatgctgggccgaaggggcagaaggtcgccttgttggagttgatgcccttgatgtaggcttgctttgtgctggtatggagggtctggatgatggtgttgttgacctggtagcaggtattgatgaccttgaagtaggtgtggatgacctactagcaggggcagatgctctgcctataggagctgaagtcctgctagcaggaccaactgccctgcttgaaggggtcgttgacctggctgatggaagtgttgatctcaaagtcggtgttgacgaccttgacacagaagctccagttttggcaggaacagttgtccgggaagtgggggtcgaaggccttgaacctttggaactagctgtcaatgtagggcgtccagttggtgttgaaggccttgatgaattagaagtaagacctccagacgatgatggtcggcgggttgtagcacctgagttcaggctgttcgatgatgttgtcctcaatgggaggttggttcttgatggaggatctggatggttggacaactga

SEQ ID NO: 110512 - DNA, 563 bp, Zea Mays
aagtggaccctcccaagtcttcttctccccacggcttctctctgtctgcacgaagcgcgtccgccgtcggccggccggatcttcatcttcacgcgcacccagggtggagcagccccaccatgcctggtcctcccctcctctcctccactaatgctgccccatcactgctcctcttctcccgctagccgtcagtttctcctccacttacgactcgcaaacgtctgtagtaaagccgccgccattaatgaccaataaaactccacctgcgtccgttagtctctcagcctcgctcctagcctataaatcgaacaccgcggatctacgtgcttgttactagtctcacttttcttctctcacgctgtcctatgtgctgctcacggagccgagccaccgccgtcatcatccttcgccgccgtgccgtttcagagcctatccgccgccggtgaagacttcctcgtgaccttggacgcccgctcttccactttcctgtgctcggcaacgccccggttcgcctcgacgccgccagccgtggtcccatccacctctgcgcaagtaacagcaag

SEQ ID NO: 110513 - DNA, 563 bp, Zea Mays
aagtggaccctcccaagtcttcttctccccacggcttctctctgtctgcacgaagcgcgtccgccgtcggccggccggatcttcatcttcacgcgcacccagggtggagcagccccaccatgcctggtcctcccctcctctcctccactaatgctgccccatcactgctcctcttctcccgctagccgtcagtttctcctccacttacgactcgcaaacgtctgtagtaaagccgccgccattaatgaccaataaaactccacctgcgtccgttagtctctcagcctcgctcctagcctataaatcgaacaccgcggatctacgtgcttgttactagtctctcttttcttctctcacgctgtcctatgtgctgctcacggagccgagccaccgccgtcatcatccttcgccgccgtgccgtttcagagcctatccgccgccggtgaagacttcctcgtgaccttggacgcccgctcttccactttcctgtgctcggcaacgccccggttcgcctcgacgccgccagccgtggtcccatccacctctgcgcaagtaacagcaag

SEQ ID NO: 110514 - DNA, 2905 bp, Zea Mays
ctctttgtcgccctagccgtcgtcttcctccctcggctctgttcgtcgcgcactgcggtgccttcctcccctgtccttcaccggatctcgcccttccttgctgatttagttctgccctaggcggatcctgcgcctgtggtccattgccgccccgccgacgctggtgagctctcctacttctataaccctagggtttgcagattaggctaccgtcatggaatctgttgcggagctatgtgcccagaagctgtccgcggccgttgatgtagcccgtgacacaatgaatgcttctgctaccgcttgtatggttgctggtgattactgcaaaacattttccttaggtaacgatgtggtttctacgcttgatgttcttgaatccgctgtggcggcggaaaaagtgctatgtgttcttatcaacaggcgagtgcagccgtcgtttgtgctcgggagacattggccaaatactgtgagctgcctgtttgttcagctgaggatgaacaaaaaacttgcacatgcactcagatatgccacgtctcaaatgagtgatacagctaagaaactacaagatactgcctctttctgctacacagatgaggatgttgtagatggtttcatgatgactcaagtagctcgttcaatggacgagttagctgaaatgctagaagtaacttcaattgactgtcaggtctcgatgatggatccaacaactatattagaagctggctatggaagtgaagacagtgcggtgtgggaggacgtattccgtgaccgagaaataatgaatcagccattagaagcggagacgcttgctgagcactgtgctaagtgggggcttagtttcaatgagatctgggatagatcagtgtaacattgtcttgtgtagttcttttgtgttcagttagctgaactagtattgtaatgagtgggttggaaattgtaagacaagacatcatgaactacttgtttggttcttatttgctatgaaatgctatgaactacctgttgggttgttatttgttatgtgttctctaattgcgttctattgtgtgttctctaattttaagagagttcatgacaattatgaaagagagttcatacaaatgccatagtgtcatacaagtaccatacaaatgccataggtgcatacaaatgtcatacagatgccaaagttacatacaaatgtcacacaaatgccatagttccatacacacaccatactaccataagaacaaacaagttcaccatagtactcaaacattcttcttcctaggtgtgatctttttaactaggactcgaactacacgttcttctggtggcgaagaaggtctttcaacaacatcttcaatagctggtatcattgcaaccacgtcttcattctcgtggtcaactggctgtgatgactcaggtacatctttggggaaccagcctttagttgaatttttcctaggctttcgcttcctgttttgacagaaattagttaatatcataaaatagccagttgcacaaataatttcaaccagaaataatgtaaccttttctttgtgccatttaatggacattcgtagcttgctttcctgtgccctagttcaccacagtttggacacttgaacttgtcccgaatgcttttcttaccattgtcattgttaactttcttttttccactacctccctcaaggcatccttttatcctatttttcctctgtcgacccacagcgcgttttccaattggagcacccacttcttttgggaaaggaacttctggccaaaatgatttgtcaccgacaggtggaaccacccttgagtatgttgtggtgaaatgagctacagagtagtagtcatcgacaaaatcctccatcctgacatccctaaattcttgagctgttatcaagcacaaagcatggatacatggtttgcccgtgtgctgccactctttgcaagaacattcccgcagctgagcattgacaatgtgcttcgaatgcacatcattgttgtcccttacctctgcaatgtagttgtcagctttacgtactgataaatgacctaaacatcttgttctggcgtgtaggatatgtagaaccaacggtaaaatccttccttgcaacttttgtgcaatcctcctcctgtgaaacatctccataatttcctcccttatcctgtcagccaaatcacatacaggcagatccttccaatccttaatccaattgttgaaaacctcagcaatgttgttagtcacgtaatcgcacttgatgtccgtattgaagccacttcggtaccaaagacagtcatgatgctcatttagccaactacttaccctagggatttcttggatgctgctaaaaaagtggtcgaagacttctctcctataagctctagcagctggatacatgtactcagacccaccaaactgctttatgtagttttgtatgagatgcctgaaacactcccatttctcggcatacgggaagacattgttcatagcattgttaagacctttgcaagcatctgaacacaatgctaacaaaggcagatcccccacaaccttgtgcaactgatgaaagaaccatgtccagttttcagtattttctgcctcaaaaaatccatatgctactagatacatccaattgtgcccatcgacacctgttgcacaacaaaggtgaccattccaccttccattcggagctgtggagtcaacacttaggaatggtcggcacacacccttgaaaccagaaatgcatggactgagcgcacaaaaaaatcgactgaagaaaggacggccctcatctatttttacatcaagctcgatgacactatccggtgacttttgcataactgcttctctccaacgccatagtagctgaaagctctcttcctaacttccaaataattccttcaaaactttctcttt

SEQ ID NO: 110515 - DNA, 1868 bp, Zea Mays
ccctcctcggctcgtctctgttcccctttccctcctgcgcaccccgtcttctcctccccgcgtcaaaccccagcacaaaaagcaaccgcccgccgcctcctcgctcctctcccgaatcagccgtcgaggtgcctaatccggccgatcccccctccgatccgcgggtgcccgccgcagaggcggcgcctccgggcctcccccgatgtatagcaacttcaaggagcaggcgatcgagtacgtcaagcaggcggtccaggaggacaatgccggcaactacgtcaaggcgttccctctctacatgaacgcgctcgagtacttcaaaacccacctcaagtacgagaagaaccccaagatcaaggaggccatcaccgccaagttcaccgagtacctccgccgcgccgaggagatccgggcggtcctcgatgagggcggcgcagggcctggggccaacggtggcgacgcagctgtcgccacgcgccccaagaccaagggcaaggacggggacggaggcaacggaggggatgactccgagcagtccaagctgagggcggggctcaactccgccatcatcaccgagaagcccaacattaagtggaacgacgttgccggcctcgagagcgccaagcaggcactgcaggaggccgttatattgcccgtcaagttcccgcagttcttcacgggcaagcggaggccttggagggcgtttcttttgtatggccccccaggaacaggaaagtcttatttggcaaaaagctgttgcaaccgaggctgattcaacgtttttcagtatatcttcttcagatctggtttcaaagtggatgggtgaaagtgagaaattagttgcaaatctgttccaaatggctcgggaaaatgccccttccattatcttcattgatgaaattgattctttatgcggtcaacgtggagaaggcaatgaaagtgaagcatctaggagaattaagactgaacttcttgtgcaaatgcagggtgttggtcacaatgatgataaagttcttgttcttgctgccacgaatacgccatatgctctggaccaggctgtgcggcgaagatttgacaagcgtatctacattccgctacctgacttgaaagcaaggcaacacatgtttaaggtccatctcggggatacaccacacagtttaactgaaagtgatttcgagagcttggcccgtcggacagacgggttttctggttctgacgttgctgtctgtgttaaggacgtgttatttgaacccgtgcgcaaaacgcaggacgccatgttcttcttcaaggcggacggtgacatgtggatgccatgtggaccgaagcaaccgggcgccgtgcagaccaccatgcaggagcttgcatccaaaggcctcgctgcgaaggtgtcctgttttgaacgtagattcttccgccccctatttcgagggcggacttcgagaaggtcctgtcgaggcagaggccgacggttagcaagaaggacctggaggtgcacgagaggttcacgaaggagttcggcgaggagggctgacagacgcgcgcacccacccatgcacgggcggctgcaccacacaaatgtatattgcatcttatgacttggattgttctgcttcgaagtggaagttgcgttacattacaatttggtgtcccaactacggctaatcatgccagctggtttctcgtgttgggctaccaatgggcctctgttgtcagcctatttcatttttattgttgcacatggaatttttccacgggtgtattattatggaataataattgttagcgtggtggagtccttgtggttgcagactgtatgtatagctatttcactaacgttccttggtttttacgcccagtttctttttttt

SEQ ID NO: 110516 - DNA, 1848 bp, Zea Mays
ccctcctcggctcgtctctgttcccctttccctcctgcgcaccccgtcttctcctccccgcgtcaaaccccagcacaaaaagcaaccgcccgccgcctcctcgctcctctcccgaatcagccgtcgaggtgcctaatccggccgatcccccctccgatccgcgggtgcccgccgcagaggcggcgcctccgggcctcccccgatgtatagcaacttcaaggagcaggcgatcgagtacgtcaagcaggcggtccaggaggacaatgccggcaactacgtcaaggcgttccctctctacatgaacgcgctcgagtacttcaaaacccacctcaagtacgagaagaaccccaagatcaaggaggccatcaccgccaagttcaccgagtacctccgccgcgccgaggagatccgggcggtcctcgatgagggcggcgcagggcctggggccaacggtggcgacgcagctgtcgccacgcgccccaagaccaagggcaaggacggggacggaggcaacggaggggatgactccgagcagtccaagctgagggcggggctcaactccgccatcatcaccgagaagcccaacattaagtggaacgacgttgccggcctcgagagcgccaagcaggcactgcaggaggccgttatattgcccgtcaagttcccgcagttcttcacgggcaagcggaggccttggagggcgtttcttttgtatggccccccaggaacaggaaagtcttatttggcaaaaagctgttgcaaccgaggctgattcaacgtttttcagtatatcttcttcagatctggtttcaaagtggatgggtgaaagtgagaaattagttgcaaatctgttccaaatggctcgggaaaatgccccttccattatcttcattgatgaaattgattctttatgcggtcaacgtggagaaggcaatgaaagtgaagcatctaggagaattaagactgaacttcttgtgcaaatgcagggtgttggtcacaatgatgataaagttcttgttcttgctgccacgaatacgccatatgctctggaccaggctgtgcggcgaagatttgacaagcgtatctacattccgctacctgacttgaaagcaaggcaacacatgtttaaggtccatctcggggatacaccacacagtttaactgaaagtgatttcgagagcttggcccgtcggacagacgggttttctggttctgacgttgctgtctgtgttaaggacgtgttatttgaacccgtgcgcaaaacgcaggacgccatgttcttcttcaaggcggacggtgacatgtggatgccatgtggaccgaagcaaccgggcgccgtgcagaccaccatgcaggagcttgcatccaaaggcctcgctgcgaagattcttccgccccctatttcgagggcggacttcgagaaggtcctgtcgaggcagaggccgacggttagcaagaaggacctggaggtgcacgagaggttcacgaaggagttcggcgaggagggctgacagacgcgcgcacccacccatgcacgggcggctgcaccacacaaatgtatattgcatcttatgacttggattgttctgcttcgaagtggaagttgcgttacattacaatttggtgtcccaactacggctaatcatgccagctggtttctcgtgttgggctaccaatgggcctctgttgtcagcctatttcatttttattgttgcacatggaatttttccacgggtgtattattatggaataataattgttagcgtggtggagtccttgtggttgcagactgtatgtatagctatttcactaacgttccttggtttttacgcccagtttctttttttt

SEQ ID NO: 110517 - DNA, 409 bp, Zea Mays
cctttctacaagactcatgcaacacatagagaaagaaagtactgcaaaatccggcagcacctcccttgaaagtagcataacaagggaagcatatagtttatacaggatataaaagaaagataattgccatagtataatcaaaatgcaacggtagaaaaaaaaacattcatgaccagacaaaagatagacatctcagcccaccaaactaaacaattcaactaccatgaaagattagaatgtaataattccctagacttgacccttcctgtttaacatcattaataaacagttattcctttatttaaaagtgtggtggccgtgctgctacatcccttctttcccaaagcaaagatcaggtgcctttaccgaagttagggcaaaatccctaagaacgatccggaagtccacc

SEQ ID NO: 110518 - DNA, 459 bp, Zea Mays
atgaggaaaaggcggtacgacaaccatcagatgaccgtgaagagtctagtcgatctcctggagagaggcgccggtggcggcgccaccagcggcggctgcagcgacgtcgtcggcagtaaacttgcccttagccttgtcggcggcgcggccccgggccttgcggtcgaggagagccttacggtccttgtcgagcttcagcttggtgacgatcactttggaggggtggatgcccacgttcacggtggagccgttcaccttctcgcgggtgatccgctcgacgtggatgacccagcggcggcgcccggcggacatgagaacgcggcggacggaggacggggccgtgaagtgcgccttgcggcacttccggcgagagctcgtgacgcggggattgcgcttcatggcggcggcggggtggacgctcttgcttacctgggaggccgcttcggtggcggcggctag

SEQ ID NO: 110519 - DNA, 354 bp, Zea Mays
atggaagggtgtaatgcaacatctagtgttgtccatgagaatgacactgcagcaatatctgcaactaaaccatccaagaaggccaagagggaagacaatggtactgaattcttagttgaagcatttcagcatgccactcaaacactagccagtgccatcaaggaggcagcaaacaaacctttgccagctggtttgtttaaagttgtagacaatattccaggatttgagattgcgcacaagtccaagtattattctcatttggtttataatcctgacattgcacatgctttcatggatgtgccatttctttacaaggtctctatgattaccgacttcgttaatgagaagttttag

SEQ ID NO: 110520 - DNA, 2083 bp, Zea Mays
tccagcaccgaaatgacgtgatccccattccattcaccctcgtcgttcgtcactgcacctgccggctgtgccgcccttgaaaaatcccaccaccttcctcgccctccaggcctccactcattcctgcccccgacactcccactgccaccagtcctctcaccgccaggcgcggcacaatgcagccgcctacccttctcccgctaggcgccgtcgtggtcgccatcctcctgctcgccaccgccccgagccccgccgtctcccgccaccgccactcgtccgccgcggacacggagacgctcgatgtagccgcctcgctctcccgcgcccgcgccgcgctctccaccgacgccgtctcgctgcaccagtccgcggccgccgccgccggggcgaagcgctccccgcgagcgcgggagggcggcctcacgctgcggctccactcccgggacttcctgcccgaggagcaggggcggcacgagacgtaccgctcgctcgtgctctcccgcctccgccgcgactcggcgcgcgccgcggcggtgtcggcccgcgcgacgctggcggcggacggcgtgacccggctggacctgcgccccgcgaacgggtcggcggtgttcgcggcgtccgcggcgatccagggccccgtggtgtccggcgtcgggcagggcagcggcgagtacttctcccgcgtgggcatcggcagccccgcgcggcagctgtacatggtgctggacaccggcagcgacgtcacctgggtgcagtgccagccctgcgccgactgctaccagcagtccgacccggtgttcgacccgtcgctctccgcctcctacgccgccgtctcctgcgactcccagcgctgccgggacctggacaccgcggcgtgccgcaacgccacgggcgcctgcctctacgaggtggcctacggcgacggctcctacaccgtgggcgacttcgccaccgagacgctcacgctgggggactccaccccggtcggcaacgtcgccatcgggtgcggccacgacaacgagggcctcttcgtcggcgccgcggggctgctggcgctgggcggcgggccgctctccttcccgtcccagatctccgcgtccaccttctcctactgcctcgtggaccgcgactccccggccgcgtccacgctccagttcggcgacggcgccgccgaggcgggcaccgtgacggcgcctctcgtgcgcagcccgcgcacgagcaccttctactacgtggcgctgtcgggcatctcggtgggcgggcagccgctgtccatcccggcctccgccttcgccatggacgccacgtcgggctcgggcggcgtcatcgtggactccggcaccgccgtgacgcggctccagtccgccgcctacgcggcgctccgcgacgccttcgtccagggcgcgccgtcgctgccccggacctccggggtgtcgctgttcgacacgtgctacgacctgtcggaccggacgagcgtggaggtgcccgcggtgtcgctgcggttcgagggcggcggcgcgctgcggctgccggcgaagaactacctgatccccgtggacggagccggcacctactgcctggcgttcgcgccgacgaacgcggccgtgtccatcatcgggaacgtgcagcagcagggcacccgcgtcagcttcgacaccgccaggggcgccgtcggcttcacccccaacaagtgctagcctagcctagcctaagcctgccttctggctaaccgtgccctgttagccacggttgtcagtagtaatgacaagccggtgtttaattagcgggagaatgattagatggggtaattaagcggtgggccctgccgggtctggggaggagcgaaaggcaaaggcgaggacagatgatgccattgccatgccagcctgtgtccggcgcgatgggtccagctccagcagtgtttctctctttctctcgagtatgcgtgcgtggagccttgtcatgacgaattagatcgtgggggctcccaagttaagagtatttatttttattttatttgctatgtcaagaaaatggaagtttccatccagcggaaaagatcacacatgcatgcttttccctc

SEQ ID NO: 110521 - DNA, 2694 bp, Zea Mays
tgtcaccgcatcgcctccctgtctgtccgcttccgccgcgcccgattccttccccgatcccgcacggccgtccgatcacggatcatcgtacgggtacggcgtacgccatcaggttccagcgttcttccccccgcttcaccttgtccccttcccttccccaccactattcctccaccacctccatccgccactctaaagtctccaagcttccccactccaccgcagcgaagaaatttctctacccccgcaacccccctaaaatcctcgtcgctacgacaggggatccctcccccaatgcggctgctcccgctcctcctgctcctcctcgccggcgccggcgcccgcgcctccgacgaccccttcctctccggcgcggcgaaccacagctacaacatcgactgcggcggcgcggcggacttcacctcggccttggggcgccggtggctcgccgaccggttcttctccgcgggcggggccgccggcatggtggcggagccgcaccgcttcccgcagccgcaggagcgcacgctccgcttcttcccgccctcctcggccggcaagtcctcctgctactcgctcccgcttccccccggccgctactacctccgcctcttctccgtctacgacaactacgactccaagctgcgcacgccctccttcgacgtctccgccgccgccacgctcgtgctctccttccgctcgccctggcccgagcccgccgcgcgctacggggcctactccgacctcatcttcccctccgccaccgagcccgcctccgacctctgcttctactcgctctccaccgacgcgcccgccgtcgcctccatcgaggtctcccccgtccacccgctcgcctacgacggcgccaccaccggcgccgacctcgtcctcgtcaactacggccgcgtcacctgcgggaacagcctcttcggccccggattcaccagggacgccgacgccttctcgcgggtgtggcaggcggacgtcgatttccggaacaacgacctcagctacgacgccatcactgcgggcgggaggaaggtctttggcagcaaccagccgcccaactacttccccaccaagctgtacgagtcggcggtcaccacgggcggtgacgccgccaatgagatcgagtacctcatgccggtcgacacgaggctgtcctacatggtctggctccatttcgccgagatcgatgctgggatcggctcacctggccagagggtgttcgacgtagtgctggctggggagaacgtcacgaggatcgacatcttcaagcaggtcggaggcttcacggcgttcaagtggacctacattgtcaagaatctgacaagctcgacgttgagcgtcaggcttgtgccagtggtgggacggccgattctgtgcggccttgagaattatgcgatggtgccacttgagatgaggacagtgccgagccaagtggctgcaatgaaggcgttgaaggagtcgctgaaaattcctgccaggatgggttggaatggtgacccttgtgcaccgagggcatgggatgcatgggagggagttacttgccatcgcggtgacaaagggcttgtgataacacaactggatctggcgagtcaaggactaaaaggttacatcaccgatgaaataagtcatcttaaagacttggtaagcttgaatttgagctataattcactgactggaagcttaccacctggtttaggtcaaccttcacttgtgtcactggatatttcatcaaatgagtttactggaagcattcctggaaccataggttcatccaagttacagactgcattactaaacaacaatcaactcgatgggcaagttccagaaagactttactcaattggcgtgcatggtggcgtgatagacctctcaggtaataaaggtttgtgtggcgtgcctaccttacctgcttgtgcattattctgggagaaaggagggttgaacaaaactggcaaaattgcacttggagcatcgtttgggtttgttctgctcgtcatacttatagtggtctacatactgtgcatcagaagggggccatatgactatgattttgacttccctcaagatttgacctccatatcagcaatatcagcgaaaaggaataggtaccagagggcaaaatccgtgatgcttgctgagatggaggcacataacccggatggtttctacacaaacgggagccctcactaaatggcatgctcagaagttggtcgccctgatggccatattctttgaggaagcactcaccgtggtcttgcatcttcactcaggttccatgccatggcaggtccgcaggtatatatgttttgaatcaattttgcacgtgtcaccagcatggcggccttgcattttcactcaggttccataccataccatggcagttacactcacagtttgagatattcgaaatgtagttcgtgtagcgcatatgtgcttgtatcctgtaatatgggggcatatgaggcagtcatttagtagttcgtgtagcgcaccgattcttttttacttttgaccgaggggtctccagatagtttagcttacgcttgtgctcaatgaatcatgtcaaggctttctattgattttttttttgtatagaacctgacatggtgttactaaccgactttgggcagtgagaggttcattaggttgcatatcttacttggcccgtttgcctgtgaatggttc

SEQ ID NO: 110522 - DNA, 456 bp, Zea Mays
acgagcactgggcactggtgaatgaacgagagtgacctgacccccgtgcggccgtccgccgtcaccgaccgagcgccgggtcccaccactccccgtccccaacccctcgcgctcgctccagcctccagcaaccgcgctccctgttcctttccttcccaggcggccaggcccagcagcgtgaagtgaggccagctagcctattatcagcctatggcggctcggattggagcggacgggaaggcgatggcacgccgcggccgcgtggagctgcggcggatcgaggaccgggtgagccggcaggtgcgcttctccaagcgccgctcggggctcttcaagaaggccttcgagctctccctgctctgcgacgccgaggtcgccctcatcgtcttctcccccgccggcaagctctacgagtacgcctccaccagagtaaagtttgtcttagagcatctataa

SEQ ID NO: 110523 - DNA, 585 bp, Zea Mays
acgagcactgggcactggtgaatgaacgagagtgacctgacccccgtgcggccgtccgccgtcaccgaccgagcgccgggtcccaccactccccgtccccaacccctcgcgctcgctccagcctccagcaaccgcgctccctgttcctttccttcccaggcggccaggcccagcagcgtgaagtgaggccagctagcctattatcagcctatggcggctcggattggagcggacgggaaggcgatggcacgccgcggccgcgtggagctgcggcggatcgaggaccgggtgagccggcaggtgcgcttctccaagcgccgctcggggctcttcaagaaggccttcgagctctccctgctctgcgacgccgaggtcgccctcatcgtcttctcccccgccggcaagctctacgagtacgcctccaccagcatagaggatacatataaccgctatcagcaattttctggagaaggaaggaatataaatgacgatcgaaatagaaacgataacaaggatgaagcttcttcagatttgcagttgatgctgagcaagattgcgacctggtctccccagagcaatgctgac

SEQ ID NO: 110524 - DNA, 2782 bp, Zea Mays
atctaaataaaatccccacccagaaacccacggaggagacaagcgtagccagagcagcaaaccaccccccttcctcgcccgttcgcttcctcatggagccgctgccgtcggcgacggccgccggcgtgggggggcctgggcccgggtaccccgagtccacggagtcttctccacgcagccggggtggggattcgtgggacgagcctttcccgtcctccgcggcggcggcggccgctgctgccggcggtgggggccggctccgcctgatgtgcagcttcgggggacggatcgtcccgcgcccgaccgataagtcgctctgctaccttggcggggagaccaggatcgtggccgtggaccggcacgcttcgctcgccgatgtccacgcgcgcctctcgcggtcgctgctgggcggccgccccttcacgctcaagtatcagctacccaacgaggacctggactccctcatctccgtctctacggacgaggacctcgacaacctcgtcgacgagtacgaccgcatcgctgcgacctcctccggcggaggaacctcgcgcacctcccggatccgcctcttcctcttccccgccaagcccgagtcctcgtcctcgctcggctccctgctcgacgactcttcaaagtccgagaactggttcgtcgacgccctcaacagcgccatctccggctccctcgacggtatcccgaggggaatctccaccgattcagcctccgtcaactgccttctcggcctcgaggacgactcctccgtgcactcccgtagcggagtaaccaactcggctcccacggaggaccagcgcgccagccagccgaagctccaggcgggcgccgccgctgccgccgtcggtaccgggaggcacccgcacgacgtccagtccgtgccagactcgccgatgctggataagaactcctcgttcgggtctacctcctcggccccgtcgctatcgaatcttccgcctatacgcgtgcggccggaggaccgcccgtcggacgcccgcatcatgcaacctaccgccgtcgaggaccacttcgcgcagatgggaatctccgagcagcagctgcccatgtatatacaagctcaacagcaggtgccgatccctgctatgaccggcatgtcgccatctgaggcgtccagccgaatgttctctgacgatgataagtccgatcacggtggtggcggaggtcggaaaccacaacctcccaagcaggacgttccgccggttgttgatcccaccaatagagctgtgtactataatgatagatctcctccggctgaattgaagcgagacatgccggtgggaactgaagctgccagctaccgcctccccgtttcagctccggacgctgctgcggcagctgcagccaccgccgcgacacaggcccctcctggatatgtgcttgcccagatgcatgcgcctccgccaccgcagcaacctccaccacagcagcaaccacaacagccagctcctcagcagattgttgctgctgggaatcaacatttcatccacaaccctgccactggcacctttattccaatccagtcctattaccaccatcctgtccatcagcaggcaccccagaccatgcaaaggcagcaacaggcacctacgttcgacccaaatacagggatgtattatgttcctatgcagcagaacgcacatcaggcatatggcgtgcctcctggtgcacaagtcactttgccacctccgacccttgttgacacaacgccaaagccaaccgtgccaattcctcagatggcagtaaggcctgaattgcaacaacctggtgtctaccgaacaacagctgcggctacccctgctccagcgcctaatgcagcacctggatatgctgggatggcctaccaccatgtcatccaatcccaccaccaccaccaccctgcgccgcagcctgtagcaaacatggctggcaactacgggtatgagtttgctgatcctacgcgcccgcaagtctactactcacaggcagctgcacctccaacattgccacagtatccgcccattgtctctcctgatgctggccaggctgaaaaacattaagcagactgagcattggtgaattcaggtatgcctcaaattctagaggccttgttatccgtctgttacttatcattattgttgctaccgcatgttacatgaatccgcgtcaaagagtgaagatgttgctattaggcaactgtgcatttgcattgggatcaaaacaagcatgcatcatccaaggataggttcaacataaggtttttattggatggttcttgtgttggtgagagacagaagggtgccggattagtttgggggagtgaagtgttggatccctgttccaaattggtctctttttttttccctttcttcttattttgaataaaatatagtgtccaaaagaacctggtggtaacgaagaactcatcatcatcatcatcatttgtgtagccctctgtatatttgatctcatggatgtcattcaggttgaggtgcagataagtgtgttattagcttgcttgtagaaaccttatgcgagttaaatatatatatacatcggtcccgtattgtactttgatattgatgttggtatgtttctttttgttgaatacattgacttcgatttttcttgctgctttagtcgttctggttccgtctacctcccaaatttcatcgcagcacacatagcatagcccttctccgaatcatatgccatgccgttttggtgggggcgttgatttgcaaagcaaatcggcaaaaaaaaaaaaacc

SEQ ID NO: 110525 - DNA, 2695 bp, Zea Mays
atctaaataaaatccccacccagaaacccacggaggagacaagcgtagccagagcagcaaaccaccccccttcctcgcccgttcgcttcctcatggagccgctgccgtcggcgacggccgccggcgtgggggggcctgggcccgggtaccccgagtccacggagtcttctccacgcagccggggtggggattcgtgggacgagcctttcccgtcctccgcggcggcggcggccgctgctgccggcggtgggggccggctccgcctgatgtgcagcttcgggggacggatcgtcccgcgcccgaccgataagtcgctctgctaccttggcggggagaccaggatcgtggccgtggaccggcacgcttcgctcgccgatgtccacgcgcgcctctcgcggtcgctgctgggcggccgccccttcacgctcaagtatcagctacccaacgaggacctggactccctcatctccgtctctacggacgaggacctcgacaacctcgtcgacgagtacgaccgcatcgctgcgacctcctccggcggaggaacctcgcgcacctcccggatccgcctcttcctcttccccgccaagcccgagtcctcgtcctcgctcggctccctgctcgacgactcttcaaagtccgagaactggttcgtcgacgccctcaacagcgccatctccggctccctcgacggtatcccgaggggaatctccaccgattcagcctccgtcaactgccttctcggcctcgaggacgactcctccgtgcactcccgtagcggagtaaccaactcggctcccacggaggaccagcgcgccagccagccgaagctccaggcgggcgccgccgctgccgccgtcggtaccgggaggcacccgcacgacgtccagtccgtgccagactcgccgatgctggataagaactcctcgttcgggtctacctcctcggccccgtcgctatcgaatcttccgcctatacgcgtgcggccggaggaccgcccgtcggacgcccgcatcatgcaacctaccgccgtcgaggaccacttcgcgcagatgggaatctccgagcagcagctgcccatgtatatacaagctcaacagcaggtgccgatccctgctatgaccggcatgtcgccatctgaggcgtccagccgaatgttctctgacgatgataagtccgatcacggtggtggcggaggtcggaaaccacaacctcccaagcaggacgttccgccggttgttgatcccaccaatagagctgtgtactataatgatagatctcctccggctgaattgaagcgagacatgccggtgggaactgaagctgccagctaccgcctccccgtttcagctccggacgctgctgcggcagctgcagccaccgccgcgacacaggcccctcctggatatgtgcttgcccagatgcatgcgcctccgccaccgcagcaacctccaccacagcagcaaccacaacagccagctcctcagcagattgttgctgctgggaatcaacatttcatccacaaccctgccactggcacctttattccaatccagtcctattaccaccatcctgtccatcagcaggcaccccagaccatgcaaaggcagcaacaggcacctacgttcgacccaaatacagggatgtattatgttcctatgcagcagaacgcacatcaggcatatggcgtgcctcctggtgcacaagtcactttgccacctccgacccttgttgacacaacgccaaagccaaccgtgccaattcctcagatggcagtaaggcctgaattgcaacaacctggtgtctaccgaacaacagctgcggctacccctgctccagcgcctaatgcagcacctggatatgctgggatggcctaccaccatgtcatccaatcccaccaccaccaccaccctgcgccgcagcctgtagcaaacatggctggcaactacgggtatgagtttgctgatcctacgcgcccgcaagtctactactcacaggcagctgcacctccaacattgccacagtatccgcccattgtctctcctgatgctggccaggctgaaaaacattaagcagactgagcattggtgaattcagagtgaagatgttgctattaggcaactgtgcatttgcattgggatcaaaacaagcatgcatcatccaaggataggttcaacataaggtttttattggatggttcttgtgttggtgagagacagaagggtgccggattagtttgggggagtgaagtgttggatccctgttccaaattggtctctttttttttccctttcttcttattttgaataaaatatagtgtccaaaagaacctggtggtaacgaagaactcatcatcatcatcatcatttgtgtagccctctgtatatttgatctcatggatgtcattcaggttgaggtgcagataagtgtgttattagcttgcttgtagaaaccttatgcgagttaaatatatatatacatcggtcccgtattgtactttgatattgatgttggtatgtttctttttgttgaatacattgacttcgatttttcttgctgctttagtcgttctggttccgtctacctcccaaatttcatcgcagcacacatagcatagcccttctccgaatcatatgccatgccgttttggtgggggcgttgatttgcaaagcaaatcggcaaaaaaaaaaaaacc

SEQ ID NO: 110526 - DNA, 2101 bp, Zea Mays
atgtcgatctccacgctacgccggtgtcgtccccctcgacggcatcgcccacactacagtaccagcgagcaggtgggcacaaagcgcgcagcattgaaaaggagagccatgcgcgccaacagttccgtgcccacttggcgctttgccaacgctgcggtagcacgcgggccccgtgcgccagtggcagcatcgtcagttagtctcgacccactgacaactcgggtctcacgttacgttgctatatccactatgtactactatatgcactgtcaagtgacaactcgggccgcacggtctccgctcggttctccagtccagtgggcaatggtgccaatggacccctcgatctcctcgtcctcctcgcctctccggctccccggaacccccaccagcccgggcgcgagcccgaggcccaccctcgtcgcggccggccgccagcccgccgccgcgcccagcaccacccgcctccgcgccatctcgccgtcccagtccccgcccaccccggcgtcccccgtggagccgttcggcttcgacgcgctcaaggggaccttctccgtggacgtggcggcggccgacgcgcgctcgctcgacgtcccgctcgccgcgcccttcaccatcgcgtcctcccgcctcgtcgcggtctccaacgtcgccgtgcgcgtcgagctccgcaccggcgctgtcgggtggggggaggcgcccgtgttgccctccgtcacggccgaggaccagccggcagcgctcgacgccgcgggacgggcgtgcgcagcgctcgtcggcgccccagcggcgcccctcggcgcggtgctccaggacctcgccagtgtgcttccgggacacgccttcgcctcggccagagcaggggtggagatggcgctgattgatgctgttgctaatagcattggcatacctctatggagattatttggaggagcatcagatagtttgacaactgacatcacaattccaattgtgaccccaaatgaagctgctcaattggctgcaaaatatcatggacaagggtttcaaactctgaagctcaaggttgggaagaacttgaattcagatatagaagttctgaaagctatacgacttgtccatccagattgctcatttattttggatgcaaatgagggatacacagcaaaacaagcaattgaagttcttgatagactaaatgaaatgggagtgacccctgtgctctttgaacaaccagttcacagagatgattgggacggtctccgagatgttacctctgtggccatggagaaatacaaagtcgctgttgctgctgatgaaagctgtcgaagtttacttgatgctcaaaaaataatagatggaaatcttgcccatgttattaatatcaagctggcaaagttgggggttcttggggcccttgaaataattgatgctgcaagaaaagccaatattgctctgatgatcggtggcatggttgagactaggatcgctatgggcttcgctggtcacttagctgctggccttggttgctttagtttcattgacctggacacacctcttttactgtctgaagatcctgtatatggtggctatgaagcagctttcggacctctgtacaagtttacaaatgctcgtggccatggcggtttccttcacttggacaatgaagcctcgaaatgaagatgaaatacaagtgatagaagtgagcttcatcgaagcattgctgtgcattccgtaatgcactgttccactggacaatcatcacataaccggaatcacacaagcgatcgcaagcatatagccatataggaccatttagtcagcctgtagatagacattcagaaggctgttgcaagtccagtcaggcctggagcactggactatttggtcagcctgtagatatagatattcagaaggctgttcccgctggctctgttgttttatccagacattctatgcaataaatacatctggttgtaaatgtcaacacatgcagccctgagccgtcgtaagcctttgttgttctatagctgttcagtataattaaggctttccttaattacgctgaagcgaacgtatgtaggagcaaatttaacaatagagccaactattggctgcaaga

SEQ ID NO: 110527 - DNA, 2098 bp, Zea Mays
atgtcgatctccacgctacgccggtgtcgtccccctcgacggcatcgcccacactacagtaccagcgagcaggtgggcacaaagcgcgcagcattgaaaaggagagccatgcgcgccaacagttccgtgcccacttggcgctttgccaacgctgcggtagcacgcgggccccgtgcgccagtggcagcatcgtcagttagtctcgacccactgacaactcgggtctcacgttacgttgctatatccactatgtactactatatgcactgtcaagtgacaactcgggccgcacggtctccgctcggttctccagtccagtgggcaatggtgccaatggacccctcgatctcctcgtcctcctcgcctctccggctccccggaacccccaccagcccgggcgcgagcccgaggcccaccctcgtcgcggccggccgccagcccgccgccgcgcccagcaccacccgcctccgcgccatctcgccgtcccagtccccgcccaccccggcgtcccccgtggagccgttcggcttcgacgcgctcaaggggaccttctccgtggacgtggcggcggccgacgcgcgctcgctcgacgtcccgctcgccgcgcccttcaccatcgcgtcctcccgcctcgtcgcggtctccaacgtcgccgtgcgcgtcgagctccgcaccggcgctgtcgggtggggggaggcgcccgtgttgccctccgtcacggccgaggaccagccggcagcgctcgacgccgcgggacgggcgtgcgcagcgctcgtcggcgccccagcggcgcccctcggcgcggtgctccaggacctcgccagtgtgcttccgggacacgccttcgcctcggccagagcaggggtggagatggcgctgattgatgctgttgctaatagcattggcatacctctatggagattatttggaggagcatcagatagtttgacaactgacatcacaattccaattgtgaccccaaatgaagctgctcaattggctgcaaaatatcatggacaagggtttcaaactctgaagctcaaggttgggaagaacttgaattcagatatagaagttctgaaagctatacgacttgtccatccagattgctcatttattttggatgcaaatgagggatacacagcaaaacaagcaattgaagttcttgatagactaaatgaaatgggagtgacccctgtgctctttgaacaaccagttcacagagatgattgggacggtctccgagatgttacctctgtggccatggagaaatacaaagtcgctgttgctgctgatgaaagctgtcgaagtttacttgatgctcaaaaaataatagatggaaatcttgcccatgttattaatatcaagctggcaaagttgggggttcttggggcccttgaaataattgatgctgcaagaaaagccaatattgctctgatgatcggtggcatggttgagactaggatcgctatgggcttcgctggtcacttagctgctggccttggttgctttagtttcattgacctggacacacctcttttactgtctgaagatcctgtatatggtggctatgaagctttcggacctctgtacaagtttacaaatgctcgtggccatggcggtttccttcacttggacaatgaagcctcgaaatgaagatgaaatacaagtgatagaagtgagcttcatcgaagcattgctgtgcattccgtaatgcactgttccactggacaatcatcacataaccggaatcacacaagcgatcgcaagcatatagccatataggaccatttagtcagcctgtagatagacattcagaaggctgttgcaagtccagtcaggcctggagcactggactatttggtcagcctgtagatatagatattcagaaggctgttcccgctggctctgttgttttatccagacattctatgcaataaatacatctggttgtaaatgtcaacacatgcagccctgagccgtcgtaagcctttgttgttctatagctgttcagtataattaaggctttccttaattacgctgaagcgaacgtatgtaggagcaaatttaacaatagagccaactattggctgcaaga

SEQ ID NO: 110528 - DNA, 728 bp, Zea Mays
aattatcattttatcagcaagagatactgtcatcagaatgctgaaaccacaagctgtacaatgttaccatgttcgatgtcttatacctgtcaaatcagctgctaaagttgttttctaaacttatggatgcagtttcattgacctggacacacctcttttactgtctgaagatcctgtatatggtggctatgaagctttcggacctctgtacaagtttacaaatgctcgtggccatggcggtttccttcacttggacaatgaagcctcgaaatgaagatgaaatacaagtgatagaagtgagcttcatcgaagcattgctgtgcattccgtaatgcactgttccactggacaatcatcacataaccggaatcacacaagcgatcgcaagcatatagccatataggaccatttagtcagcctgtagatagacattcagaaggctgttgcaagtccagtcaggcctggagcactggactatttggtcagcctgtagatatagatattcagaaggctgttcccgctggctctgttgttttatccagacattctatgcaataaatacatctggttgtaaatgtcaacacatgcagccctgagccgtcgtaagcctttgttgttctatagctgttcagtataattaaggctttccttaattacgctgaagcgaacgtatgtaggagcaaatttaacaatagagccaactattggctgcaagattcttataatat

SEQ ID NO: 110529 - DNA, 218 bp, Zea Mays
tctcttggtcgccgaagcttgactgtcgattcctcgaagctcgaaaatggatcgcagtcacggtgacgaacggcgactccggcgaggcgagcttggacgctggcgaggacgggggcgcgcaggctcgctggccggccgaccggctgccgcgccgcgcttccatgcagcgccgtcggggctggccgcacgcaggggtgaggatgggcgtcgcgccgtgg

SEQ ID NO: 110530 - DNA, 583 bp, Zea Mays
gctccggctgtacaagtcgtcaaggaggcggcaccgaggatgtcggtcgacttcgaggtcctcgtcatggatcttgatccaacagtcgaggtggaagaacaccggctccagacgtttaacaggaggacgctaatactttgttcgatgtcggtaccagcatcaacctagacatgcctaggacggagactggcataggccccacaagacgtacccctaccgactctatggcccctactgatgtggcttgcactgctgccagtgatgatcgcggtagcaacaaatcaaggaagagggcacccagatctaaagtctagaacgacttcgaggagctaactcatgtcatcaatggtaagagggtcaggtatggttccatttgcaagtactataagcagactttgagtgccaaaactagctacggtataggccacttgctctggcatctaaagtgtaaactatctgtgaactgcttgtgatctgtatttgattctgattgtgatctgtatttgaggaaattgtatgtgttttgtgcctattacttgaactgtatgtatttgagtaattctgtatgaagtatatgtattca

SEQ ID NO: 110531 - DNA, 255 bp, Zea Mays
atggcgggaaaagcggtggtaaaatccggtgccatggtaggagacggtgaagaagctggagcgggcgccggtgaagacgtcaatgcgggcgctggtgcagaagacggccgttcccagcacaaggacgaagcaactgcgctgatgaagcgtggcgacgacggccatcgtttatcgcatcacatacgtcccgcattgtgctgccaaggctcgaccgagggaaggaaggctgtggacaagctttcctcccgatggtag

SEQ ID NO: 110532 - DNA, 346 bp, Zea Mays
ctcttctgctagtacaccttttttcttttttaatatttttatctctattttgttttttagagatagtttgctctcctactttttatgttgatctatgcaaaaatgtttaaagcatcaattataacgagaccaagtgattactactcctctgactcaatttaaaatttgtttgactttttttactaagtttgagtggttttttatttactttttttgcgaagattatgaaaattagtatgttatatggtaaacgacatcacagtaaaaactaataactacttcctcagttcttttttatttatcttgatttagttaaaattgaactagtaggagataaatattcgag

SEQ ID NO: 110533 - DNA, 342 bp, Zea Mays
aaccgttctgttctagttttgttgttgtttggttacaaagtaactagaatggaatggctccaattagggaatattctcctcagatccggaaccattccgctccaaaaaatcaatggaacggagccgctccgttccaatcccgctctcacagtcacgctccgttccgttcactctgcaaccaaacaaaaaacagaaccgctccgttccagattaccaaacacagaacagagcggctccattcttagaataagggatggaacggctccgttctacttggcttctcaaccaaacactaccttagtcatgagtcccactgaacgtccccaattccttcgtcaccaa

SEQ ID NO: 110534 - DNA, 2262 bp, Zea Mays
cgggcagacagacgccaaccagaactagaaccaccacctatcctttccttcctcagtcctcacgatgcagaccaccgccgtggtggcggcggcgctgctgctcctcctctccgccttcccgcgcttaggctcagccacggccgccgccgccgacaccaataccaacaccaaccagacgaccagcggcggcaacggcacgggctgcgcgccggcgcggtgcggggggctgaccatcacgtacccgttctcgctcgtgggcgcgcacccaatctactgcggcttcccggccttccagctgacgtgcgacgccgccgccaaccgcacgtacctcagcaggacgttcagggaccgcctctaccgcgtcctccacatattctacggcaacagctccctggtgatggccgtccaggccaccttcgccggcgacggcgggtgccgcgtgcccgacttcaacgtgtccgccagcctcgcgctcctgcccgtctacatcagcgccgccaacaggaacctcaccttcgtctacggctgcgacgtccctccgcggctccggctgcagccggcgtgcgacaacactactatgggggcgtacacctccgacgacgacaccaccgagccgctcggttcgatcaactgcagcagcgtgagcgtgccggtgcgctggatcgagcgcggaacggagcccggtcgtcggctgaactactcggagctgatcggggaagggttcctgctggagtggccgccgaggtcgacggcggaatgcgacgagtgcaaggagcgcggcggggagtgcagattccccgatatttcgttccagtgcatctgccgcgacgggagaccctgccgacgctctcgcggcactctggctctgggaatcaaaatcggcgcaggagcaggagcagcccttctgtttctgatcatactgggcgctctgtctcttctcatgctacacaaacgaaggaagagaaaacgatctgcgtcactggtcgggctcatccgtgatgggaaggggacgccattggcatcgctcaggaaagagttgagcatgaccgggtcgccgcgtacgcacatcttcacttacgaagagctcgacgaggccaccgacggcttcagcgacgaacgcgagctcggcgtcggcggcttcggcagagtctacaaagggacgctgcgggacgggaacgtggtggcggtgaagcggctgtacaagaacagctacaagagcgtggagcagttccagaacgaggtggagatcctgtcgcggctgcgccaccccaacctggtcacgctctacggctgcacctcgccgcgcagcagccacgacctgctcctcgtctacgagtacgtcccaaacggcacgctcgccgaccacctccacggcgcgcgcgcctcctcggcgacggggtccgccgcgccgccgctctcgtggcccgtccgcctcggcatcgccgtggagacggccagcgcgctggactacctccacgccgtggagccgcaccaggtggtgcaccgcgacgtcaagaccaacaacatcctcctggacgaggcgttccacgtgaaggtggccgacttcgggttgtcccggctgttcccggcgcacgccacgcatgtgtccacggcgccgcagggcacgcccgggtacgtcgaccccatgtaccaccagtgctaccagctcaccgacaagagcgacgtgtacagcttcggcgtcgtgctcgtggagctcatttcctccaaacccgcggtggacatgagccgcgccggcggcgacgtcaacctggccagcatggccgtgcacatgatccagtgttacgagatcgaccgcctggtagacccgcggatcgggtaccggacggacggcgggacgaagcgggcggtggacctcgtcgccgagatggcgttcaggtgcctgcagccggagcaggacgtgaggccgcccatcagtgaggtgttgggcgcgctgagagaggcgcagaggatggagcaggatggctgcgccaaggccaaggatgacatggggttgctgaagaagagcagggacggctcgccggactccgtcatgtatcagtggacgagcccatcaaccactacccataacagcagttgagggttcaaaacgaaacacagtaaactgtgcagtttgttctgtcacttaggccttgtcaacatgtacagtgtctatttttgatgatccatttatgtatagtaatataattttataagctaactgatggatttggtttcatatcaaaatttcaacagagcaaacac

SEQ ID NO: 110535 - DNA, 2278 bp, Zea Mays
ctctaatcatctctacactatttccggtgctgtggcaccatctccattaattgggcaaacaagctagcatgacgcaacccaccttgctgttcctcctcccgctcttggccacctccatgctcctccaattccacgaccacgccagcgccgactgcgagccggcggcggcgtgcggggacctcactctccggtacccgttctggctcgggagcagcagcgccaacgacacccatcacgacacgccttccccatcaccacccccatgtgcccaccaccacccgggcttcgaggtctggtgcagcgacgacggccgcgtggcctccctgaagggcacctacatccacgtcctcagcatcaactacagcgccggctccctcgtcgcctcccacgccaggatcgccggcgccggcggcgtgtgccaggccgacttcaacgtgtcctccagcatcgcgctcagcgtgttcacgtttagcccgcggaagaaccgcgcgctgtgcttcctctacgcctgcaacggcacggccccgccgagcgggcccgggtacgcgaacgccacctccagctgcgccgcccccgtctacgcgttcctcgccgacggggacttctactgggacaggccgccggcggtcgcggcgggcgcgtgcaagtacagctacgtgccggtgctcgggtcggaggcggcggtcatgacggcggccaactacagccggctgctcaaggacgggttcgtcctgaactgggaggtggcgggagtcgccgactgccaggactgcaacgccagtgccgagcagtgccggcacggcaacagaagcgccgccgcggggtctacatgcgccggaccaaaaggcaggacaagtaaggtagtcggaattgtatgtggagtagtagccgtcagtctattggcagcgtgcttcttttttgtctggcacaagcgcaagaggaggaaacaagctagagcaccaaatggcttcatgcatagtgaatcttcattgcaatcatacagcaaagaccttgagttgggtggctctccacagattttcacttatgaggagcttgaagaagctactgatggatttagtgactcgagggaacttggtgatggtggttttggaactgtttacaaagggaaactccaggatgggagagtagttgcggttaagcgcctctacaagaacaactacaaacgggttgaacagttcaaaaatgaggtagacattttgtcccgcctcctccaccagaacctagtcatcctatatggctgcacgtcgcgtagcagccgtgaccttatgctcgtgtacgagttcgtccctaacgggacagtcgcagaccatcttcatggatcccgtgcgtcagaacgcgaccttacatggcctctaagggtgaacattgccatagaaacagctgaagcacttgcatacctccatgcggtcgaaatcatacaccgcgatgtcaagaccaacaacatactgctggacaacagcttccacgtcaaagtcgccgactttgggttgtcgcgtctgtgccctcctgaagtcacacacgtatcaactgtcccgcagggcacaccaggctatgttgacccggtgtaccaccagtgctacaagctaactgagaagagcgacgtgtacagcttcggcgttgtgttggtggagctcatctcctctaaaccagctgttgacatgagcaggacccacagcgatatcaacctggccaacatggctctcaacagaatccagaaccacgaagttgatcggctggttgaccctgagcttggatatgagactgacgatggaacaaagaaatcgatagatctcgtcatggagttggcatttcagtgtttgcagttagaaagggattcaaggccgtcaatgaaggaagtagtggtggccctgaactgtatcaagaatggggattccccagagaataagatggacaggagctcctcatctcctaaggaagacgcacacttgctgaccaatagcatacagtattcgcctgactctgtaatccacagattccatagccaatcgactacgcactcggcagcatcaaatgctagtggatgagataccttgtatatatactgatcctgaagaaataaagccccatcggacgaattgtaaacagtatagagatttgttagtgaactgattcatctgggtaagttgtttcttctttgttaactggctcgtagtacaaagccgggttgtatgtgaccacagcaggagcttggcataatcttaaacattagggaaagtagtagaatcagtctcaggcc

SEQ ID NO: 110536 - DNA, 2222 bp, Zea Mays
tgagagctaggccagtgagagcggctcacggctcacccacacttctgttcgtcgtcagctaacgccataatagccgcgaagctttccatggctctggtcccatcctcgttgctgctcttcctagtctcgtcgtcggtgtgggtggccttatccctaccgttgccggtggcagcagctcatggcgggcaagcaggagggcagcgctgctcgccgtttctatgcggtaacgtgagcatcgccttcccgtttgggcttatcccggatggcgccgcgcagaccagctgcggcgccgggtttgggttccaggttcgttgctatgacgccatcccgcaccttggattttctcaaagcgagatcaacttgaagatcctcagcatcttctaccacaaccgctccttgctcctcgcggatagaccatggtttacatatttcaatcggactagcaccaaagggtgccgcatcccgacggccaacacctcgtcccggcttgcccctccgctctcggtcagctccgacaaccagaacctcatcttctacaactgcaccaagccaccgtcgccattcgagggactcgtggccacgacatgccacgacaacacgtttgttcgtgccgccgatgggcggcgttccgacgagtcaggcgactacgttttggaaggctgcaccgctactaaggttccggtgcttggagtgtctggcaaggtgatcaacgctagcaactacgaccaacttgtctgggacggcttcctcgcgacatggcagttgctgccgacgccgtcaggaccaaaaggcaggacaagtaaggtagtcggaattgtatgtggagtagtagccgtcagtctattggcagcgtgcttcttttttgtctggcacaagcgcaagaggaggaaacaagctagagcaccaaatggcttcatgcatagtgaatcttcattgcaatcatacagcaaagaccttgagttgggtggctctccacagattttcacttatgaggagcttgaagaagctactgatggatttagtgactcgagggaacttggtgatggtggttttggaactgtttacaaagggaaactccaggatgggagagtagttgcggttaagcgcctctacaagaacaactacaaacgggttgaacagttcaaaaatgaggtagacattttgtcccgcctcctccaccagaacctagtcatcctatatggctgcacgtcgcgtagcagccgtgaccttatgctcgtgtacgagttcgtccctaacgggacagtcgcagaccatcttcatggatcccgtgcgtcagaacgcgaccttacatggcctctaagggtgaacattgccatagaaacagctgaagcacttgcatacctccatgcggtcgaaatcatacaccgcgatgtcaagaccaacaacatactgctggacaacagcttccacgtcaaagtcgccgactttgggttgtcgcgtctgtgccctcctgaagtcacacacgtatcaactgtcccgcagggcacaccaggctatgttgacccggtgtaccaccagtgctacaagctaactgagaagagcgacgtgtacagcttcggcgttgtgttggtggagctcatctcctctaaaccagctgttgacatgagcaggacccacagcgatatcaacctggccaacatggctctcaacagaatccagaaccacgaagttgatcggctggttgaccctgagcttggatatgagactgacgatggaacaaagaaatcgatagatctcgtcatggagttggcatttcagtgtttgcagttagaaagggattcaaggccgtcaatgaaggaagtagtggtggccctgaactgtatcaagaatggggattccccagagaataagatggacaggagctcctcatctcctaaggaagacgcacacttgctgaccaatagcatacagtattcgcctgactctgtaatccacagattccatagccaatcgactacgcactcggcagcatcaaatgctagtggatgagataccttgtatatatactgatcctgaagaaataaagccccatcggacgaattgtaaacagtatagagatttgttagtgaactgattcatctgggtaagttgtttcttctttgttaactggctcgtagtacaaagccgggttgtatgtgaccacagcaggagcttggcataatcttaaacattagggaaagtagtagaatcagtctcaggcc

SEQ ID NO: 110537 - DNA, 2248 bp, Zea Mays
cgcttctttcttctagctgcttgtgatgccatgctccctcccccatgactgcgacggcgactcggcccgtgccgtggctctccctcgtctcctcgctctggacggcatgggtggcgtggacgttgcctgtggtgctcgcgacggcggcgccaccggaccggcaaggagcagagccggcctgctccccgacgctatgcggcggcgtgaacatctccttcccgttctggatcgtcgccgaccacgccacggagaccagctgtggactgatcgggttccaggtcatttgctctaacaacaccaccccctacatcgggtcctacaagactccgtactcgttccggatcctcaacatcttctatagcaacgcctccctgctcgtcgccgacgtccacaagctcggcgacttcgtcaatgtcaatggctccacctccgcctccgcctccgcccccgctccttccaagccctgccactccccgacgggcaacagctcctccaagctcggcctccctttctcgatcagcccggccaaccagaacatggtcttctacgactgcgtggagccgccggcgcaggcggtgcggcggagccgcgggctcgtggacacggcgtgcgggaacaggacgctggtcggcgtcgccaggcgccccgacgtgcctggcagctactccctggagggctgccacgctaccgtcgtgccggtgcttgtgaggtccggtcaggcgaacccagcgaactacgaggagctcatccgtgacgggttcctcttgacatggcaactgccgctgttgccgccgccgtcaccggctggaccaaaaggcaggacaagtaaggtagtcggaattgtatgtggagtagtagccgtcagtctattggcagcgtgcttcttttttgtctggcacaagcgcaagaggaggaaacaagctagagcaccaaatggcttcatgcatagtgaatcttcattgcaatcatacagcaaagaccttgagttgggtggctctccacagattttcacttatgaggagcttgaagaagctactgatggatttagtgactcgagggaacttggtgatggtggttttggaactgtttacaaagggaaactccaggatgggagagtagttgcggttaagcgcctctacaagaacaactacaaacgggttgaacagttcaaaaatgaggtagacattttgtcccgcctcctccaccagaacctagtcatcctatatggctgcacgtcgcgtagcagccgtgaccttatgctcgtgtacgagttcgtccctaacgggacagtcgcagaccatcttcatggatcccgtgcgtcagaacgcgaccttacatggcctctaagggtgaacattgccatagaaacagctgaagcacttgcatacctccatgcggtcgaaatcatacaccgcgatgtcaagaccaacaacatactgctggacaacagcttccacgtcaaagtcgccgactttgggttgtcgcgtctgtgccctcctgaagtcacacacgtatcaactgtcccgcagggcacaccaggctatgttgacccggtgtaccaccagtgctacaagctaactgagaagagcgacgtgtacagcttcggcgttgtgttggtggagctcatctcctctaaaccagctgttgacatgagcaggacccacagcgatatcaacctggccaacatggctctcaacagaatccagaaccacgaagttgatcggctggttgaccctgagcttggatatgagactgacgatggaacaaagaaatcgatagatctcgtcatggagttggcatttcagtgtttgcagttagaaagggattcaaggccgtcaatgaaggaagtagtggtggccctgaactgtatcaagaatggggattccccagagaataagatggacaggagctcctcatctcctaaggaagacgcacacttgctgaccaatagcatacagtattcgcctgactctgtaatccacagattccatagccaatcgactacgcactcggcagcatcaaatgctagtggatgagataccttgtatatatactgatcctgaagaaataaagccccatcggacgaattgtaaacagtatagagatttgttagtgaactgattcatctgggtaagttgtttcttctttgttaactggctcgtagtacaaagccgggttgtatgtgaccacagcaggagcttggcataatcttaaacattagggaaagtagtagaatcagtctcaggcc

SEQ ID NO: 110538 - DNA, 2165 bp, Zea Mays
gttcggtcgggccaggaggtccctggccgccgaactaccgactccaaaacccaagccactctccatccccaatccgctatgcaaccggctcctcctcctcctactgctcgcttccttcctcctcccgccgccggcggccagcacggcaggctgctggcccaaggaatgcgggggggctcaacatcacgtacccgttctggctggaggagcccgggcagccgccgtgcgggccgccgtccttccggctccggtgcagcagcggcggcggctcgttcctgagcatcttccccggcaaccgctccttccacgttgtggaccacaacctcccgctcgccaccggctgcccgccgccgacggtgaacgtctcgctcctctcgccggccgggacgtttgccttcagccgagccaacagggagctgctcttcctcgggaagtgcacggcgttcccgccgccggattcggccgggtttcgcagcctgccttgcgacaaccgctccttcgtcagggtaggcgtcggccgggatttgtcgatcccgcacggctgcctcttcacggtagtgccgatcctccgggttcccgagggaggtgaggaggacggctacgtcgcgagcatggagaacgggtttctcgtggagtggacagcggtgccggacgattgccccaagtgcatggtacggctacggcgacacgaagttcgcctgtgattgctccggcgacaagtgcggaccaaaaggcaggacaagtaaggtagtcggaattgtatgtggagtagtagccgtcagtctattggcagcgtgcttcttttttgtctggcacaagcgcaagaggaggaaacaagctagagcaccaaatggcttcatgcatagtgaatcttcattgcaatcatacagcaaagaccttgagttgggtggctctccacagattttcacttatgaggagcttgaagaagctactgatggatttagtgactcgagggaacttggtgatggtggttttggaactgtttacaaagggaaactccaggatgggagagtagttgcggttaagcgcctctacaagaacaactacaaacgggttgaacagttcaaaaatgaggtagacattttgtcccgcctcctccaccagaacctagtcatcctatatggctgcacgtcgcgtagcagccgtgaccttatgctcgtgtacgagttcgtccctaacgggacagtcgcagaccatcttcatggatcccgtgcgtcagaacgcgaccttacatggcctctaagggtgaacattgccatagaaacagctgaagcacttgcatacctccatgcggtcgaaatcatacaccgcgatgtcaagaccaacaacatactgctggacaacagcttccacgtcaaagtcgccgactttgggttgtcgcgtctgtgccctcctgaagtcacacacgtatcaactgtcccgcagggcacaccaggctatgttgacccggtgtaccaccagtgctacaagctaactgagaagagcgacgtgtacagcttcggcgttgtgttggtggagctcatctcctctaaaccagctgttgacatgagcaggacccacagcgatatcaacctggccaacatggctctcaacagaatccagaaccacgaagttgatcggctggttgaccctgagcttggatatgagactgacgatggaacaaagaaatcgatagatctcgtcatggagttggcatttcagtgtttgcagttagaaagggattcaaggccgtcaatgaaggaagtagtggtggccctgaactgtatcaagaatggggattccccagagaataagatggacaggagctcctcatctcctaaggaagacgcacacttgctgaccaatagcatacagtattcgcctgactctgtaatccacagattccatagccaatcgactacgcactcggcagcatcaaatgctagtggatgagataccttgtatatatactgatcctgaagaaataaagccccatcggacgaattgtaaacagtatagagatttgttagtgaactgattcatctgggtaagttgtttcttctttgttaactggctcgtagtacaaagccgggttgtatgtgaccacagcaggagcttggcataatcttaaacattagggaaagtagtagaatcagtctcaggcc

SEQ ID NO: 110539 - DNA, 417 bp, Zea Mays
atggccgtaaagctcaacaagccgcccaaggcgaagagcctgtggatcctcgtgcggcgcctcctccgcaggagtcgcaacccgccgccgccggcctcggccgcgctggaggacggcgagggggagaagagcggcctcctcagccgaagctccttggagcagctgctcgtgatgacggacgactgcgcccctggcgacgatggcgacggcgacggcgacgtctgccggtgcgccaagaagccgcacggccagccggtggccgtgctgctgccggcgctggcccggccagaggcgtccgcggctgcggtgccgtcggcagcaggtgccgcgcaccggaggttcgtgttcggcgggttccggcggcggctgctcattcgcaggccgtggcggcctatgctggtcgccatcccggagtga

SEQ ID NO: 110540 - DNA, 932 bp, Zea Mays
actacacgagacgacagctggtttgtttttatttattcactcgcagaacacaacacactgagtcggggagctcaccgaacagcacaatgtacagacgatgaccacgaaacactgaacagcacacgtacacaccagacataccaaagcagagcaaccacagtaccacacacacgagtcgcgtcgctgaaacccaagacccgacgccgcgacgcgaacgcgacgcgaccattcacctcgcgtccatgtcttcttcagccggagatctggatgctcttaacctcaggcttcttgacctcggccttgggcacggtgaccgtgagcacgccgttctccagcgcggccctcacctcctcggtcttggcgttctcggggaggcggaagcgccgcacgaactggccgctgctgcgctccacgcggtgccacttgtcgcccttgtcctccttctccctgctgcgctgcccgctgatgagcagcacgttgccgtcctccacctccaccttcacctcctccttcttcacgccggggaggtcggccttgaacacgtgcgcctcgggcgtctccttccagtcgatgcgggcgctggcgaaggcggcggtctcggaggccgccgccgccgacgacgacgacggcacgatggagcggaacacgctgtcgaaggggtcgaagaggtccacggagaatgggtcgaacacgctgccgcgcctcaccagcgacatttctgcttggttgctagcggctcgctgcgggcgagtctgccaactgcgaagtagcgagtcttgtggattggaagatttcggtgcgcgttgcctgctcctgctctgatcgcgatcttcgctctggattgggattgggttgggacgagttgtggccttgtggggtgacgcttttatagcttcgtcaagagcggtcgctgaatcgtctggacttctctc

SEQ ID NO: 110541 - DNA, 110 bp, Zea Mays
ctgtcccgtcctcgtccccgcgcggccaaccttctctaagagggccctggtccttccttttatagacgtaaggagaggatccaggtgtacaatgggggtgtagcagagtg

SEQ ID NO: 110542 - DNA, 321 bp, Zea Mays
atggaagataatatgattgattactcaaattcaccattttttcgccagcatactcagatcagtcttgttcagctattcacgagtcgagtcactactttccttagtaaagctcaacagaaaatggaaaaaggatccaatgactgggggttttatgttatgggttacattctcttttatgaatgcgacgaaggatctctgcggtcagacatagaagcaggcaacactagtgagatacggtctcttgcgctgcattatatcatattccatccgaagaacaaagcattatcgctgcttgaagacatccaaagattcaaggtctaa

SEQ ID NO: 110543 - DNA, 730 bp, Zea Mays
aaagggatacatgaacgatacccggaagattgtacatacgaaacgaaacaaacggaagtacgttatatatcgtagaagacacaggaaacatcacacaagacagggacagccacggaccagcagcagtacaccttccttcccacgtccatattggattggatgctcaaccagatatctcaatagccttcacctcaggcttcttctcctccgccttgggcacggtgaccgtgagcacgccattctcaaggccagccttcacctgatccaccttggcgttctccggcaggcggaagcgcctgacgaactggccactgctgcgctcgacgcggtgccacttgtcgtccttgtcctccttctccctgctgcgctggccgctgatgaccagcacgttgccgtcttcgacctcgaccttgacctcctccttcttgacgccggggggtcggccttgaacacgtgcgccccgggcgtctccttccagtcgatgcgggcgctggcgaaggcggcagtctcggagttggtggaggtcgccgacgggacgatggagcggaacatggtgtcgaaggggtcccagaggtccatcgagaaggggtcgaacacgttgctgcgcctcacgagcgacattgtcgtcgctagcagctagctctatgcgtctcaacaaacagaactcagtggattgcaagagtgcttcgggaactttgcttttgctaggcgctttgtgaatttccttggt

SEQ ID NO: 110544 - DNA, 993 bp, Zea Mays
atggtcgtcgtcgccacactctcactcttgtacctcttgcgccacgcatccatctactgtttccccgcgtcccaccagcctgccctcaccatctcgctcgccccattcccccgcagctcctgcgacgccgcctcgcgccgactggtcccgcccgaccaccgcctcgctaagctccgcgcctccccgcgctggagacgtcgtgccgcctccctggccacgtccgccttcccaccgctccgcggcctcggcatcctcgcggccccttcgcgcgtcctctgcctcgccgccggcgccggccacgccgtcgacgcgttccgcgcagcggggaccagagacgccataggggtcgacctcgtagagttcccgccgcttgtccgccgcgcggatccccaccaccccccattttccgacggcgccttcgacctcgtgttctcggatgacccctcggcgacctccggcgcgctcttcccgtcccgcctcgcgcgagaggctgagcgcgccgtccgccgcggtggcggcatcgcgctcgcgttcgatcgggagatcgagaccgtcgctgtcgctacgctattcaagagatcgcgcgtcctggatgtgaaggatgtcacgttggatggctctcagtatcgcaggcagctggatcttgagcgaccttacacaaaaaagaaagaggctagaatagtaggtgggacaggcactgatgggacacctattattgcagggattgcaaagttcatggatatattaactactggacttgttacatccccattatcttgcaacactaaattacagtcaactattgctattgctttcagttcagatggaaaacacttgcatccacaagatcattttatacaaactgaactgaaaggcatttattttgttagtggcgaccatatagtgaaattaattgactgtcatatagggaaatgtttgaaggttttgagtggacatcacaatacaaactgaaatgaaagacgtttatttttt

SEQ ID NO: 110545 - DNA, 1116 bp, Zea Mays
cttaattaggatatgttgcatgcatgattgatgtttccttgtctgacttattgtgtttccctatttataccgtgtttcgcttctgtagtgtatatttcttaattaagatctgttgcatatactaattctgttttcgtattttttgtttaattacggattttttgttgaagtctcatcaatttttccgtagcatcctctccctcgaccaatgcatgcccctgctactgggcgatcaatttgttcatctatgttcatacttcattcattctaaattataagacgttttaggttttctagatatttagatttcactgtgcacttaaatgcacactatgtcttagatatatagtaaaaacaatttatctataaaaaatgtcttataataacggagggagtagtagttaatgggcgattgcttcatcaggatctgcaaagatgctgcttgttgacattttttagtggtgtgtgtttcagatgcagagtttcggaatactgggctggagagatcagaggcgctgaaaaatgatctggaatggttcaggcaacagggccacacaattccaaaaccatcggcccctggcaccacatacgcttctctactggaagatctgtctgaggaggacccccaggcctttatctgccatttctataacatgtactttgctcatactgctggaggccgaatgattggcaaaaaggtttccaagaagattctgaacaacaaagagctggagttctacaagtgggagggcaatctctcccagctgctgcagaacgtccgcaacaagcttaaccaagtcgcttcgagctggtcttgggaggagaaggaccactgcctggaggagacggagaagtcgttctcttactcaggaggcctcctccgccatatattcacctgatctatcattgccggttgatccagtctcaaacgctgtaaatacatagtcctcttgactgttaaaactttattactggtgagggggatctcctcccccaggtacggtttacctgcattcaagttgcccagtgtcttacttgatttctggtgtttggtgtttctgtgatgcaatctgtattctgtaggtcgtttcatgactaatagagtcgaccccttcc

SEQ ID NO: 110546 - DNA, 1144 bp, Zea Mays
ggctcagccgcggcgcgatgcctggcagattcgccgaccaaggcagccgacacgaagacccgtctcgcgatacgagaagtcgttgccctgccgctccgtgcgtgtcaacagcgcgtggtcgtcagtgtgcctgctctggcgccctattaataccttctgcatccacgacgccacaagctcacattcacatcgcactctcctccagcctccaggcttggcaagcgtgcttcacatgaccacatccatgtcgaacagcgccgctagcgagaagcaatcgcagcaggcaggccacaggcagcggcccccggcggcgtcggccgcggacgcggagatgcagagggtgttctgccgcatcgacgcggacggcgacggccggatctccgcctcggagctggccgcggtgacgcgcgccatctccccgccagcgagctcctcgcacgggcgccgcgaggtggccgccatgatggacgagctggacacggaccgcgacggcttcgtggacctcggcgagttcagggcgttccacgcgcgcggcggcggcggcgtggacgacgacgccgagctccgcgccgccttcgacgtctacgacgtcgacggcgacggccgcgtcacggcggccgagctgggcaaggtgctcgcgcgcatcggcgagggcggatgcagcgccgaggagtgcgagcggatggtcgccggcgtcgacgccgacggctgcgtcgggttcgaggacttcaagaagatgatgtgcccccagccgcaagccgaagccggcgccgccgggcgggacaaggcagaggccgaggccgaggacaaggaggagtgacgggtgtagtcaggggggaacgggaacggctggagttgtttgcgtctcgcgttcttttcacctgtacgcaggaaatactcctcctgcataagactactgtacttttggataaaaaattttatttctacatgactatcacgtagatgtaggagcagtatctataactgtaggagtatatactagcacctattatctacagtattgtacgccctctgtgcgtgagtcgctctctgtgtctgtacggtgtaggtgtaggggaccgaattttttgtattttagcccttaaacagaagtaaatttacgtttagacctaaaaaaatttta

SEQ ID NO: 110547 - DNA, 2295 bp, Zea Mays
gtgccgcccccggctccacatggcagcctcatgagctcatgatgcgctccgagccggacagacatggccggccggatcttgcgcatcctttactgtcactcaaaagctggagcacagagacggccacacacagaaagagaaaagacattcccgtccgtggtggttgcttcgagttcgcacgacgctatggagtggcgttcgttcggtgcgctttacgacaattttcgtggtggttttgacgaacgaacgaccgatcggctctttataagatctcccgccgcgatcctagccagtcgacagcaagcaagtttctccatccaaccaacctcccagcgatcacccctgctccgatccttgcattggtctcatccgccggccggccgggtaccaacgatggcctgcacccaggaggtggtggtgttcggcgtgaacctcctcgagagcggcgcgccggaggacgacggcctggtggccggctgggcggcggtgggcccgtgcacggcgctgtccgcgcgcgacgaggagccggccaaggtcccgaccgagacgatcaacgacgtggcggacggctacaggcccagcggccggtacgtcctggcgtcgggccgcgccggcgaggccgacggcctgcgccgggcgctgaagcgggccgcgctccggccccgggtcacgtaccgcgtcgccgggtgggtcggcctcggggacggggacggggacgagggggcccgccacgcggtgcgcgtcagcctccgcgtggacggcggctgcgtcgtcgtcgatggaggcgccgtcgtctgcgccgagcccggcaggtggaccgagatcaagggcgcgttccgactcaaggagagcccgcgcgacgcggaggtgtacgtgcacggcgcgcccgcgggcgtcgacgtcaaggtcatggatctccaggtctttgccaccgaccgcagggcgcggttcaggaagctcaggaagaagactgacaaggtgcgcaagcgggacgtggtcctcaacttcggcagcgcggcgtcgggcatctcgggcgcgtccatccgcgtgatgcagatggacagcagcttcccgttcggcacctgcatcaacaccaacgtgatccagaacccgggcttcgtggacttcttcgccaagcacttcgactgggccgtgttcgagaacgagctcaagtggtaccacacggaggcgcagcaggggcagctcaactacagcgactcggacgcgctgctcgacttctgcgaccgctacggcaagcccgtgcgcggccactgcatcttctgggccgtcgccaacaccgtgcagcagtgggtcaagaacctggacgacgaccagctcgcgtcggccgtgcgggcccgcctgcagagcctgctcacccgctacgccggcaggttcccgcactacgacgtcaacaacgagatgctgcacggcagctactaccaggaccgcctgggcgacgacatcaacgccttcatgttccgcgaggccgcgcggctggacccgggcgccacgctcttcgtcaacgactacaacgtcgagggcggcagcgaccccaacgccaccccggagaagtacatcgagcagatcagcgcgctgcagcagaagggcgcggcggtgggcggcatcggcctgcagggccacgtcaccaaccccgtcggcgagatcatctgcgacgcgctcgacaagctcgccaccaccgacctgcccgtctggctcacggagctggatgtgagcgagtccgacgtcgacctccgcgccgaggacctcgaggtggtgctccgggaggcgtacgcgcacccggccgtcgagggcgtcatcttctggggctgcatgcagggccacatgtggcgccaggacgcgtgcctcatcgacgccgacggcaacgtcaacgacgccggcgagagattcgtcgatctccggagggagtggacatcgcacgcgcgcgggcagatcgacagcgctggacacttcaaattcagggggtaccacggcacgtacatcgtgcagctcgcgacggcgacggggaaggtgcacaagacgttctccgtggagaaaggggacacccctctcgtgctggacatgaacctttgacgatcacttttaccgttccctagttatatacagacatatggcattgatttgacccaatggaacgcaaacagaaagcagcactccaatgctacatgtatctatctatgattggtattgtaaggcaaacttaaggtattgtactccttaagaattattggtgatggtgaataaagtgaacgagttattcctcgttttgtagtaaac

SEQ ID NO: 110548 - DNA, 2175 bp, Zea Mays
gcatttctactaccgcgccaacgcaactgcctcactagctcactcatcacattcgtattgcattgcgccgccaacgactaattcgctgccgtccaggaggtggtggtgttcggcgtgaacctcctcgagagcggcgcgccggaggacgacggcctggtggccggctgggcggcggtgggcccgtgcacggcgctgtccgcgcgcgacgaggagccggccaaggtcccgaccgagacgatcaacgacgtggcggacggctacaggcccagcggccggtacgtcctggcgtcgggccgcgccggcgaggccgacggcctgcgccgggcgctgaagcgggccgcgctccggccccgggtcacgtaccgcgtcgccgggtgggtcggcctcggggacggggacggggacgagggggcccgccacgcggtgcgcgtcagcctccgcgtggacggcggctgcgtcgtcgtcgatggaggcgccgtcgtctgcgccgagcccggcaggtggaccgagatcaagggcgcgttccgactcaaggagagcccgcgcgacgcggaggtgtacgtgcacggcgcgcccgcgggcgtcgacgtcaaggtcatggatctccaggtctttgccaccgaccgcagggcgcggttcaggaagctcaggaagaagactgacaaggtgcgcaagcgggacgtggtcctcaacttcggcagcgcggcgtcgggcatctcgggcgcgtccatccgcgtgatgcagatggacagcagcttcccgttcggcacctgcatcaacaccaacgtgatccagaacccgggcttcgtggacttcttcgccaagcacttcgactgggccgtgttcgagaacgagctcaagtggtaccacacggaggcgcagcaggggcagctcaactacagcgactcggacgcgctgctcgacttctgcgaccgctacggcaagcccgtgcgcggccactgcatcttctgggccgtcgccaacaccgtgcagcagtgggtcaagaacctggacgacgaccagctcgcgtcggccgtgcgggcccgcctgcagagcctgctcacccgctacgccggcaggttcccgcactacgacgtcaacaacgagatgctgcacggcagctactaccaggaccgcctgggcgacgacatcaacgccttcatgttccgcgaggccgcgcggctggacccgggcgccacgctcttcgtcaacgactacaacgtcgagggcggcagcgaccccaacgccaccccggagaagtacatcgagcagatcagcgcgctgcagcagaagggcgcggcggtgggcggcatcggcctgcagggccacgtcaccaaccccgtcggcgagatcatctgcgacgcgctcgacaagctcgccaccaccgacctgcccgtctggctcacggagctggatgtgagcgagtccgacgtcgacctccgcgccgaggacctcgaggtggtgctccgggaggcgtacgcgcacccggccgtcgagggcgtcatcttctggggctgcatgcagggccacatgtggcgccaggacgcgtgcctcatcgacgccgacggcaacgtcaacgacgccggcgagagccccgatagtataatgcagattcgtcgatctccggagggagtggacatcgcacgcgcgcgggcagatcgacagcgctggacacttcaaattcagggggtaccacggcacgtacatcgtgcagctcgcgacggcgacggggaaggtgcacaagacgttctccgtggagaaaggggacacccctctcgtgctggacatgaacctttgacgatcacttttaccgttccctagttatatacagacatatggcattgatttgacccaatggaacgcaaacagaaagcagcactccaatgctacatgtatctatctatgattggtattgtaaggcaaacttaaggtattgtactccttaagaattattggtgatggtgaataaagtgaacgagttattcctcgttttgtagtaaaccgtattgatgttctctgtcacggatcctacgtagatgattcgttctttttctagcttgtaggatgcatttttttttttgcgaatacatatgagagattgagagctgcatatctttgtactaagaagatgaaaacataattacaaccaaacagaagaacaaatcaagattgggc

SEQ ID NO: 110549 - DNA, 2220 bp, Zea Mays
gcatttctactaccgcgccaacgcaactgcctcactagctcactcatcacattcgtattgcattgcgccgccaacgactaattcgctgccgtccaggaggtggtggtgttcggcgtgaacctcctcgagagcggcgcgccggaggacgacggcctggtggccggctgggcggcggtgggcccgtgcacggcgctgtccgcgcgcgacgaggagccggccaaggtcccgaccgagacgatcaacgacgtggcggacggctacaggcccagcggccggtacgtcctggcgtcgggccgcgccggcgaggccgacggcctgcgccgggcgctgaagcgggccgcgctccggccccgggtcacgtaccgcgtcgccgggtgggtcggcctcggggacggggacggggacgagggggcccgccacgcggtgcgcgtcagcctccgcgtggacggcggctgcgtcgtcgtcgatggaggcgccgtcgtctgcgccgagcccggcaggtggaccgagatcaagggcgcgttccgactcaaggagagcccgcgcgacgcggaggtgtacgtgcacggcgcgcccgcgggcgtcgacgtcaaggtcatggatctccaggtctttgccaccgaccgcagggcgcggttcaggaagctcaggaagaagactgacaaggtgcgcaagcgggacgtggtcctcaacttcggcagcgcggcgtcgggcatctcgggcgcgtccatccgcgtgatgcagatggacagcagcttcccgttcggcacctgcatcaacaccaacgtgatccagaacccgggcttcgtggacttcttcgccaagcacttcgactgggccgtgttcgagaacgagctcaagtggtaccacacggaggcgcagcaggggcagctcaactacagcgactcggacgcgctgctcgacttctgcgaccgctacggcaagcccgtgcgcggccactgcatcttctgggccgtcgccaacaccgtgcagcagtgggtcaagaacctggacgacgaccagctcgcgtcggccgtgcgggcccgcctgcagagcctgctcacccgctacgccggcaggttcccgcactacgacgtcaacaacgagatgctgcacggcagctactaccaggaccgcctgggcgacgacatcaacgccttcatgttccgcgaggccgcgcggctggacccgggcgccacgctcttcgtcaacgactacaacgtcgagggcggcagcgaccccaacgccaccccggagaagtacatcgagcagatcagcgcgctgcagcagaagggcgcggcggtgggcggcatcggcctgcagggccacgtcaccaaccccgtcggcgagatcatctgcgacgcgctcgacaagctcgccaccaccgacctgcccgtctggctcacggagctggatgtgagcgagtccgacgtcgacctccgcgccgaggacctcgaggtggtgctccgggaggcgtacgcgcacccggccgtcgagggcgtcatcttctggggctgcatgcagggccacatgtggcgccaggacgcgtgcctcatcgacgccgacggcaacgtcaacgacgccggcgagagattcgtcgatctccggagggagtggacatcgcacgcgcgcgggcagatcgacagcgctggacacttcaaattcagggggtaccacggcacgtacatcgtgcagctcgcgacggcgacggggaaggtgcacaagacgttctccgtggagaaaggggacacccctctcgtgctggacatgaacctttgacgatcacttttaccgttccctagttatatacagacatatggcattgatttgacccaatggaacgcaaacagaaagcagcactccaatgctacatgtatctatctatgattggtattgtaaggcaaacttaaggtattgtactccttaagaattattggtgatggtgaataaagtgaacgagttattcctcgttttgtagtaaaccgtattgatgttctctgtcacggatcctacgtagatgattcgttctttttctagcttgtaggatgcatttttttttttgcgaatacatatgagagattgagagctgcatatctttgtactaagaagatgaaaacataattacaaccaaacagaagaacaaatcaagattgggcgctaaaaggaagaagaaaaagcaccgtaaaaaaagcatcatatggtaacagaaaataaaaagaa

SEQ ID NO: 110550 - DNA, 369 bp, Zea Mays
atgactattgtatccccgccactaacgcagagccttcttcagggctgtcggatctccacagtggctagggaaggtgtccacaatatgcgctcccccctctcctcggcctcggcaccatgcaacaaccgtaatagtgtcagcttcgtggacgaggacgacgacaggcctgccttcggcttcgacggcaacaagaagaagttatgcctcgtcatgggcctccatgacggatcagccaaggttcaaacaggcatatctctgaacaccttgggctctctaggctatgagatggatcatggatggagacggagatggagaaaatatgatcctacggctcacaatcttgacacctccgccatcagcatagaatag

SEQ ID NO: 110551 - DNA, 112 bp, Zea Mays
gatccatttctccaaccaaggtttgtttactagcgccattagtaggtttgttcagtttggcgtacacaaaaccggctttgccaattcatggagacatgttcattgtattatt

SEQ ID NO: 110552 - DNA, 481 bp, Zea Mays
actgaaattgtgacatatctggttcggcaatctgggccatttttagatcaacttggcatacagagagacctttgtgacaaactagtggagatgttatgcagtaaacgaaatggtcggctcatgtatcattctctttcacaggacagacccttagctgagaacatatctgacgagcttgatctaagaatagctagggtattagaaagtactggttatcacacagatgaaggtttttggaatgaccctgcaaagtacaagatctcagacaacagacagtatgttgctattgtcaccacagcaagccttccatggatgacaggaacaacaatcaatccattgtttcgtgctgcatatctggcaagaagtgcaaagcaaaaggtgacattggtggtcccatggctctctaagtcagatcaagaattggtttacccaaataacatcaccttcagttcgccagaagagcaagaaacttatataagga

SEQ ID NO: 110553 - DNA, 101 bp, Zea Mays
gcctaattacaatgtgattcattatcttttttctattgatattttgcagcagcatcaaagtgttttagggatagagagggcaatatcgtctaacaaaatag

SEQ ID NO: 110554 - DNA, 3027 bp, Zea Mays
gactgcagtgcaagtcatcactcggctcgtttcccgaaccttcctcctcgacttatccccatgggcaagtccggcgcaaaaaagaagaagccggccaccgccgccgccgccgccgccgcaaagccgccgcccgcctcggttgagctgaaggcaacgccgtcctcgtcttctttacccgcggcgaacggtgcggcgccccaccaggtggtggacgcgggcgtcctcttgcgccgcgcacacgagctcaaggaggagggcaaccgcctgtttcagtcgcgcgactacgccggggcgctgcgccaatacgagctggcgctccgcctcgccccgcgcggccatcccgaccgcgccgtcttccacagcaatcgcgcggcatgcctcctccagctccgccccgtagaccacgaggccgtcgcgcaggagtgctccctcgcgctccaggccgagccacgctttccgcgcgctctcctccgccgcgcccgcgcgctcgaggcgctcggccgccacgagctcgccctcgccgacgcgctggcgctccttgcgctcgaccctgaccaccgcgaagccatcgacctctcctaccgactacgctcccgtgtcaacgcatcctctgctgcctccgcttcctcggcacccgagcccaccagccggccctcccccgctgcccttggtgcctccgccgttgtcgccggacttggccattccctccccgctcgctcattccctaagaaacaaccaccaccagcctctcctgctaacttgcagccaaatctcgcagtgattccaaaatctaacccgccaccgttgcccaagctggtgcctttctccaattctccgccatcttcaaccaagcctttggctgcagatagctccgagaaggccatgacgcctccagttgcctctttgctaccggaaagagcggcaccacttataaataaaaaggttgtgacgagatggaggcctctcaagctggtgtatgaccacgacattaggcttgggcaggttccagagaaatgcagcttccgaacacttcgtgagtttgtagctaagaggttcccatcatccaaggcagtgttgattaaatataaggatgctgatggtgatctagttaccatcacatcaacagaagagctccggttagctgaattattcattgataaagttggccacgaggttgtagaaaatgggagggaggatgacaataagctcccggtgttgaggctgcaccttgttgaagttagcccagaacaggaaccaactttgccattggaagaagagaagttggaggaggatgaggaattgttgatcaatggtgaagatagcactttacatgctttagcagtggtaaccgacgcagaggtggtgaagcaagatgttgagaacagatctgctgatcaaagtgtggagacagggaagaatgattgtggccatgccgagtgcaaggaagctgagattgatgattggttgcttcagtttgcagatttgttccggaaccaggttgggattgatgcagatgcacatttagacctgcatgagttgggcatggagctgtgctccgaggctctcgaggaaactgtgacaagcatggaggctcaggtcctttttgagttggctgcttctaaatttcaggaggttgctgctttggccttattcaattggggaaatgtgcacatgtgtgaagcaaggaagcgcatccctctcgatgaatctgctccaaaggaagtcatggctgctcagctccgcacagcttattattgggtgaaggagaggtatgctcttgcagggcacaaatatgaggaggcccttaaaatcaagccagacttctatgaagggcttcttgctttaggccagcaacacttcgagactgcaaagcttcattggtcatatgcactggcagataaggctgacctatctacctgggattctttggaaacattcaagctttttgatagcgctgagcagaacatgagggctgcaacagagatgtgggagaaggtggaagaacagagaatggcagagttaaaagaaccaggcgcatgtgataaggatggggtactgaggaaaaggcagcacggtgcaggtggtcaaccggagttgacaccagaagaagcagctgagcaggcagcagtaatgaggcaacagattcacctcttctggggtaatatgcttttcgagcgttcccaagtggagtttaagctcagtgttggtgactggaagacaaatcttgatgcatctgttgaaaggtttaagttggctggagcttcagaatcagatattttgacagtgttgaaaaatcacttttctaatgtagcctctgagtgtgaagagaagaaagtcatgacttcaggcacagaaatttcccaaacaaatgacaatgttgaggataagtgtgtggttgaaacctaagttttcatggttcaaggtgaatgacatcaatgtgtatcatattcatcaattgcttgataggctttatttgttcttggtattatcatggtcctttgtcattacatctaggcgagagcttcaagcacactgagttttgtgattgccattgccaactggtgcagagtcgacatgctccatgaaatcttgataatttactagaggtcttagatttctgaatatatgttatcattcttctaccagttttagtggtatttgatgttgagttagttttctttttctgtcagaaaccaggtcttggcaatatctccctgctcacattgtttaaaatatcggacacatacttagtaaacacggaatgttacccatgactcatttattgtgccaagttgctgatccctacataatagatctgtattttagtttttgtgtatctattcttgccgcttttgcatccagcaatcgaaggcagttgtgcctcaaatgtggctgctttgtaagttgtaacatagtgtactttatgcactctacagtaccgaattattttggcactgtacatgtactgaattccttccgcagaaaatattcaaacaaaggtactggccaggttcagccaccattaaa

SEQ ID NO: 110555 - DNA, 2443 bp, Zea Mays
gtcatcactcggctcgtttcccgaaccttcctcctcgacttatccccatgggcaagtccggcgcaaaaaagaagaagccggccaccgccgccgccgccgccgccgcaaagccgccgcccgcctcggttgagctgaaggcaacgccgtcctcgtcttctttacccgcggcgaacggtgcggcgccccaccaggtggtggacgcgggcgtcctcttgcgccgcgcacacgagctcaaggaggagggcaaccgcctgtttcagtcgcgcgactacgccggggcgctgcgccaatacgagctggcgctccgcctcgccccgcgcggccatcccgaccgcgccgtcttccacagcaatcgcgcggcatgcctcctccagctccgccccgtagaccacgaggccgtcgcgcaggagtgctccctcgcgctccaggccgagccacgctttccgcgcgctctcctccgccgcgcccgcgcgctcgaggcgctcggccgccacgagctcgccctcgccgacgcgctggcgctccttgcgctcgaccctgaccaccgcgaagccatcgacctctcctaccgactacgctcccgtgtcaacgcatcctctgctgcctccgcttcctcggcacccgagcccaccagccggccctcccccgctgcccttggtgcctccgccgttgtcgccggacttggccattccctccccgctcgctcattccctaagaaacaaccaccaccagcctctcctgctaacttgcagccaaatctcgcagtgattccaaaatctaacccgccaccgttgcccaagctggtgcctttctccaattctccgccatcttcaaccaagcctttggctgcagatagctccgagaaggccatgacgcctccagttgcctctttgctaccggaaagagcggcaccacttataaataaaaaggttgtgacgagatggaggcctctcaagctggtgtatgaccacgacattaggcttgggcaggttccagagaaatgcagcttccgaacacttcgtgagtttgtagctaagaggttcccatcatccaaggcagtgttgattaaatataaggatgctgatggtgatctagttaccatcacatcaacagaagagctccggttagctgaattattcattgataaagttggccacgaggttgtagaaaatgggagggaggatgacaataagctcccggtgttgaggctgcaccttgttgaagttagcccagaacaggaaccaactttgccattggaagaagagaagttggaggaggatgaggaattgttgatcaatggtgaagatagcactttacatgctttagcagtggtaaccgacgcagaggtggtgaagcaagatgttgagaacagatctgctgatcaaagtgtggagacagggaagaatgattgtggccatgccgagtgcaaggaagctgagattgatgattggttgcttcagtttgcagatttgttccggaaccaggttgggattgatgcagatgcacatttagacctgcatgagttgggcatggagctgtgctccgaggctctcgaggaaactgtgacaagcatggaggctcaggtcctttttgagttggctgcttctaaatttcaggaggttgctgctttggccttattcaattggggaaatgtgcacatgtgtgaagcaaggaagcgcatccctctcgatgaatctgctccaaaggaagtcatggctgctcagctccgcacagcttattattgggtgaaggagaggtatgctcttgcagggcacaaatatgaggaggcccttaaaatcaagccagacttctatgaagggcttcttgctttaggccagcaacacttcgagactgcaaagcttcattggtcatatgcactggcagataaggctgacctatctacctgggattctttggaaacattcaagctttttgatagcgctgagcagaacatgagggctgcaacagagatgtgggagaaggtggaagaacagagaatggcagagttaaaagaaccaggcgcatgtgataaggatggggtactgaggaaaaggcagcacggtgcaggtggtcaaccggagttgacaccagaagaagcagctgagcaggcagcagtaatgaggcaacagattcacctcttctggggtaatatgcttttcgagcgttcccaagtggagtttaagctcagtgttggtgactggaagacaaatcttgatgcatctgttgaaaggtttaagttggctggagcttcagaatcagatattttgacagtgttgaaaaatcacttttctaatgtagcctctgagtgtgaagagaagaaagtcatgacttcaggcacagaaatttcccaaacaaatgacaatgttgaggataagtgtgtggttgaaacctaagttttcatggttcaaggcgagagcttcaagcacactgagttttgtgattg

SEQ ID NO: 110556 - DNA, 3264 bp, Zea Mays
caaggacatggttactagtgccaaaagtgacaacacaactgtagccgtaaaagatgcaccagaacacagcgtcttgatccactcacgcaaattagcacaacttttatcgcaaccaaaccaacccccgccgccgccgcagccgcagctactctagggatctagagtcagttaaaaacaggaacaagaatccagagccaagcagccaacgtgaacaatgtacacacacgcacacgccgatcaccagatccaacggccctcgctaatccagcccacccccaaaaaaaacaagagcagattaaaccaaacaaataggcacgcatcacaaggcaattccgaagaaggaccagcagcgccaggccgcgccctcactggctgagcgcgccgccctccgacacggcgggcgagtccgagacgccggaggactcgtccatggactcgtgcgacggcgacgccgtctccccgcacgcgcggacctcgtcgaccatcttcaccacgtacccgaccttgggccgctgctcgggcgccgcggccgtgcagctcagcgccagctgcagcatcgccaccatctcctcctcgatgcccttgtccttcatcagctccaggtcgaacacctccgacgtccactcctcccgcaccacggactgcacccaccggggcagctccaccacgacgccgccgttcggcagctcgctgcccgggaaccgccccgtcaggagctccagcagcaccacgccgaacgcgtacacgtcgcccctgtgcgacgcccagggcctgggcggcgggggcgcctcgggcgcgcggtaccccgccgaccgagccgccgccgcggccggggacgaccccagctgcgccagcccgcagtccgcgagacgcgccacgccgaatctgtccagcaggatgttggtgctcttgatgttgccgtgcgccagcttcggcgtgccgctgccccgccgcccagagtggtggatgtaggccagcccgcgcgcggcgccggctgcgatgcgaagccgcgccgcccactccagcggcgtgcgcccggggccccggttacctgaccataataacgcttcgaagtcagcatttatcaaggggattcctttatcaagacacgacggagatgttaagcggatgacttgccgtggaggacggagaagaggctgccgttgggcatgtactcgtacaccagcagcttctcgtcgcgggcgtagtagtaggcgttgaggggcacgatgttggggtgccggaggcggccgagcacggccatgtggtgctcgaagtccttcttggacgcggccgccggcgtcgcggcgtcgcgcagccgcttcacggtcacgacggtgccgtcgtccagcacggccttgtacgccgtgccgcatccgcccttccccagcatctccgcggacgcgcgcagcagctcctccagctcaaaccgcctcgtgcggccgtcgctgcagctcaggtcctcgaggaacaccatcttccctcgctcgaacgtcgagccaccggccgccgccgcgaccaccccggcggcgccgtaggggctcgaggagtacactatcttctccccctgctggagtcgccgggcgcttcgccggccggagaggcgcggccagaagtagcagaacaggagcccggccacgagccccaccacggcgaagtcccccgccacaattgccaccacggcggcgcggctcatcttccccttgacgccgctcgccgcctcggcgcccgctggcttacccgaaggcgaggacgccaccatggcagaagccggagggcagtcccctgccgcagacgcgttcaccgccgccgacgcgttcggctgaggcgcctcgtccttgcagggcgggagcggcgcgctgcacaggccgacgttcccgccgaaggccgcggccgggaacgacgccatcgccgccggaatcctcccggacatgagattgttggagacgttcagctcctgcagcctcggcagcgcaatggcgtcaaccccgccgctgagccggttggagtccagcctcagggtgagcagcctgtcgagccggctgagctcgggcggcacggcgccggacagcttgttggacgacaggtcgagccggtacaggcggtacagcgcccccagcgacggcggaatcgcgccggacagctcgttccccgcgaggaacagcagcttgagccccgcgagcggcgagaggtcggggatttcgcccgagaaaccgttgcccttgaggctgagcacgcggaggccgtccagcctcgcgagcgccggcagcgcggcggcgccggagaggccgaggccctcgagcaccagcctcgtgacgcggccgccggcgcaggtgacaccgcgccacgccccggcgcacggcgccgggttcgcggacacgttccaggtcgccagcgcggcgccggacgggtccgcgacgagcctgaaatccgacagagccgcgacgtcggcatccagagagccggcattggcgaaggaacgcagcagcagcagcagcagcagcggtggcaggaggagcagcagagcagtgctgccgttgggaggcatgctcgcttctttttgtggttttcttgggggctcgcggttggctcgcgcccgcgcgctggtcgcgctgctcgctccggtgcaagtaggaaatggacagcggcgagagagacggaggcacggtgggttggttcttgtctgtctggtgctcgtcgcacggacagtggctgcccttgtcgctggagccttttgccctcccgtctttgtactgcttttattttatctactgagcacgggagcagggaacagtgaagccgctgcgatcgtggccccaccacatgggtgcggtggcgaacggcgagcttccctacctagccgcttgcagaggactggagtgcaggagcgacgcaggaccaaggcgatgggagcggtcggatgacgcctgggctccacactaccgttgttcggcgtcctggcacgtcgttgtcgcggtgggactttactactccagtggcctcgggatgcgtggtagccgaccgcgtgctggagacgatcgtgcgcaatccggtgatcattatggcgccaagaagttgcgttcccgcgcgcggtagaagttggtagcgctatgctctactgctctcggactaaacttaaaagacttcagatctgtttggttttttagtctagggactaaagtttagttaggagactaaaattttgtctctacctatttagttttaaggactaaaactattcaaaacacattagatgaatcataa

SEQ ID NO: 110557 - DNA, 867 bp, Zea Mays
ctgagtcctgatagcctgatggtggactcgagtcgactctctgcctgtgattcccagctcaacctgggtcgatcatccacggcgcaaagaatagtagaatgctatggtacactgcctcctgctccggtcggtcgatcgtctggtcaggtcacccgaaccccatgaccttgggcgccagccggagcagcggctcgagcgtgtccggcgagaacttgcgcgcgaacaggttgcagatgcctctcctggcgccgttgtagaagcaccgcctgccgccttcctccctgatctccctgatccgctcctccgtcacctcgtccgggccgtgggtgtgcgggtgccggttgacgggccgcttccagtccgcgtacgtgagcgtgcggttggcgttgcggcggccccaccccagcaggctcaccagcgtcggcaggtagtgctcgtcgatgaggcactccctccgccccacgcaaaagtcgcggaacgccgggaagcaggagccgtccgcgacggactccagcgccagcgcgcggtccatctcgaaccactgcgcgcccttgcgccaccgcgccagcgtgatgttgcgggtggcgaagaagggccggtagcgcgaccggctgccgccgttctcgtagcagtccacgaagctggtgtcggagccggtcaggaaggcgtgcacggtggggaagtcgtacaccgggatgcacgcctcggagaagagcgcgaaccgctcgttgcccaggtccaggagcgcgtttgccaggagccgccgctccgcctccaccaggctcgcgtcgccccatttcgttatctgcgtgcaattgcaatgcaatagaaccaccgagatgaatgaagttaatgtgtagttgcgtt

SEQ ID NO: 110558 - DNA, 433 bp, Zea Mays
ctcgaccagccaagccctcctatgtactgaccgcaccatgggtggactcgagagagattctgctgccactaggcttagatgtcgctgtcggtcgctactgctatccttgaccggcgcgtagtggcgggtgatccccgggatcggatttggtgccgctgtgcgcatacccgcttcgccgttcgttgtgtgtgccgtgccgtgcgattgggggcctggccacgggtgccattgccgcgtgttgtggccccgctggcagaccaagaagcgtcgccccgccgtagcgcttgctcgctccgtagccggcttctctgcgacatcatcgctgcgaggttacgagtcacctgaagatcatcctggtacctggaatctcaactcccaggcaagttgtgcccttgatcacttctttttacctactcatgttctaattaatcat

SEQ ID NO: 110559 - DNA, 2228 bp, Zea Mays
aaaaaactaaaaagtgggggaaggagaggattcggcaagttccggcctcatccgctgctttcctcgcaactatcggatcttgcgaggcatcgtcctcctatcctataatcgcatttcgaatcgcaaacggagacttcgcccctcttcacagattctaatcgaatttgccaatctgcaagctaacgtagaacaatcaccaatcaccatccttaagaagatgatgcgatgcactgtaacgggcggcgggtgcgttgcttcgtggattggtgatcggaggtcgccggcggtcaaccccttcagcgtgcggatgtcgacgggcaacggtgggtggtgcggcggcctgaggtcgcgggcggcggaactctccggcctcgagatggcccatctacgtggcggcatcggggggctcttccgcgcgagcccgcgctatgggcgcttgcaagccacggccgcagttgaccctgaagatattccactggagaaggttcaagttaaatcctcaggacatgttatgccatatgttggtgttgcttgtttgggggctattctgtttggttatcatcttggtgtggtcaatggtgcgcttgaatatcttgcgaaggatcttggaattgctgaaaatgccgtcttacagggatgggtggttagcacatccctagctggtgcaacactaggttcctttaccgggggatctttggcagataaatttgggcggacaagaacattcatcctggatgcagccccactggctgtaggtgcattcttgagcgcaacagctcaagatatccgcaccatgattattggtcggttgcttgctggaattggtattgggatctcatctgcacttgtacccctttacatatctgagatatcaccaactgaaattcgtggaacacttggttccgttaatcaactttttatctgcattggaattcttgcagctttgttagctggattgcctttggcaggaaatcctgcctggtggaggacaatgtttggaattgctgtagttccatccattttgctggctgtaggaatggccttttcgcctgaaagccctcgatggctattccagcaaggaaaggttattcaagcagaatcggctgtaaaaagactatatggaaaagaaatggttaccgaaattatgtatgatctgagagctagtggccaaagttcttctgagaccgaagctggctggtttgatcttttcagcaagcgttactggaaagttgtgagtgtgggggcagcactgtttttgttccagcagcttgctggtataaacgctgttgtatattactctacatcggtgttccgtaatgcaggcattacatctgatgttgctgctagtgctcttgttggagcagccaatgtttttggcaccatggttgcatcttctctaatggacaagcaaggaaggaaaagccttctgatgacaagcttttctggaatgggtgcttcaatgctactcctagcattgtccttcacctggaaagctctggcaccttattctggtattcttgctgttgttggcactgttctgtatgtgctgtcttttgctctaggagctggtcctgttcctgccctgcttcttcctgaaatatttgcctccagaataagggccaaggctgttgcattatctctaggcatgcactgggtatccaacttttttattggcctgtacttcttgagtgttgtcaacaagtttgggatcagcaatgtatatttgggatttgcatcagtgtgcgtccttgcagttctctacatagctgggaatgtggtcgagaccaaggggcgatcacttgaagagattgaacgggaactaagtgtagcagaatgatgtgcttttgctagtcatgctgcggcgccgttttggtgattttgagaatgcaaccaagcacacaaccgagcatccttggacctggagactttctagtttcatgtagcagttaccaatcagattcagaaacaatgaactcgtcaatgtttctggagataagttttcattttttgttctaaaatttcttgtttctcttgtataggagactttgagatagtttcagctctaaagacgtgaatatggagcagctccgctaacgaatctaggattcactagtaaaatgtttagctatacactagctctagatttacgaaacagaggtctcccttggaatgacttgttttgctcttgatgttggctgacatatccttcgaagcaatttggagtaaaa

SEQ ID NO: 110560 - DNA, 2188 bp, Zea Mays
aagttccggcctcatccgctgctttcctcgcaactatcggatcttgcgaggcatcgtcctcctatcctataatcgcatttcgaatcgcaaacggagacttcgcccctcttcacagattctaatcgaatttgccaatctgcaagctaacgtagaacaatcaccaatcaccatccttaagaagatgatgcgatgcactgtaacgggcggcgggtgcgttgcttcgtggattggtgatcggaggtcgccggcggtcaaccccttcagcgtgcggatgtcgacgggcaacggtgggtggtgcggcggcctgaggtcgcgggcggcggaactctccggcctcgagatggcccatctacgtggcggcatcggggggctcttccgcgcgagcccgcgctatgggcgcttgcaagccacggccgcagttgaccctgaagatattccactggagaaggttcaagttaaatcctcaggacatgttatgccatatgttggtgttgcttgtttgggggctattctgtttggttatcatcttggtgtggtcaatggtgcgcttgaatatcttgcgaaggatcttggaattgctgaaaatgccgtcttacagtggacatctgcttattgctcaggatgggtggttagcacatccctagctggtgcaacactaggttcctttaccgggggatctttggcagataaatttgggcggacaagaacattcatcctggatgcagccccactggctgtaggtgcattcttgagcgcaacagctcaagatatccgcaccatgattattggtcggttgcttgctggaattggtattgggatctcatctgcacttgtacccctttacatatctgagatatcaccaactgaaattcgtggaacacttggttccgttaatcaactttttatctgcattggaattcttgcagctttgttagctggattgcctttggcaggaaatcctgcctggtggaggacaatgtttggaattgctgtagttccatccattttgctggctgtaggaatggccttttcgcctgaaagccctcgatggctattccagcaaggaaaggttattcaagcagaatcggctgtaaaaagactatatggaaaagaaatggttaccgaaattatgtatgatctgagagctagtggccaaagttcttctgagaccgaagctggctggtttgatcttttcagcaagcgttactggaaagttgtgagtgtgggggcagcactgtttttgttccagcagcttgctggtataaacgctgttgtatattactctacatcggtgttccgtaatgcaggcattacatctgatgttgctgctagtgctcttgttggagcagccaatgtttttggcaccatggttgcatcttctctaatggacaagcaaggaaggaaaagccttctgatgacaagcttttctggaatgggtgcttcaatgctactcctagcattgtccttcacctggaaagctctggcaccttattctggtattcttgctgttgttggcactgttctgtatgtgctgtcttttgctctaggagctggtcctgttcctgccctgcttcttcctgaaatatttgcctccagaataagggccaaggctgttgcattatctctaggcatgcactgggtatccaacttttttattggcctgtacttcttgagtgttgtcaacaagtttgggatcagcaatgtatatttgggatttgcatcagtgtgcgtccttgcagttctctacatagctgggaatgtggtcgagaccaaggggcgatcacttgaagagattgaacgggaactaagtgtagcagaatgatgtgcttttgctagtcatgctgcggcgccgttttggtgattttgagaatgcaaccaagcacacaaccgagcatccttggacctggagactttctagtttcatgtagcagttaccaatcagattcagaaacaatgaactcgtcaatgtttctggagataagttttcattttttgttctaaaatttcttgtttctcttgtataggagactttgagatagtttcagctctaaagacgtgaatatggagcagctccgctaacgaatctaggattcactagtaaaatgtttagctatacactagctctagatttacgaaacagaggtctcccttggaatgacttgttttgctcttgatgttggctgacata

SEQ ID NO: 110561 - DNA, 1358 bp, Zea Mays
gtgccgtgccgctgcaccccaagccccaccaccgtccaccaccataaaacacccgcacaccaccactctcactctcgcagtcgcagcaaccaactcggtcggtccgcgcccgcccgcccgcccgcctccgttggccatttgaatgtgagaaagagagggaccagtgatccgtcgtcggtcgccggccatgccgagatcctcctccagccccggctccggctccaagcgcatcctggggagggcgatggccgcgatcctggcgctgccgctgaccccgatcaccaaggccaagctcggcctgctgctcttcaagaagcgcgcctccgccgccgcgggcaggcgccgctgctacaagccgttccgccactacaactacgcctacgtgggcgagtaccagttctcgccctcccgctccccgctgctcccggccccgccccccggcgtcaccacctggcggagggccgccgccgccgccgccaggaggcgccggggcagggccaggatggtcctcgcctccctcttctgtggcggcggcggcgccgacgagctcgacgtcgccgtgctggacggcctcgcgcgtcgcaccgacgggcgcgcggagagggaccagctggtggtgctcgccccggctctcgagtgggcgcgcggccgcgacgacggtgcagcctacgcctgcagcagcaacgacgaggatgaggaggtggcggttgtggactacggggaggaaggcgacgtggaagtggacgaccgcgccgagcgcttcatcgagcggttctaccaggagatgaggctgcagaggcagcgctctctggtccagcgcctgctctagagacattcgtccgttgctgctgcttcaattccttggtcgatcgggcagaaccagtcgtggttgtcgctgctatcttagctgcacttcggttaaatctctccgtatcttgcatttgcgtcgttccatgtttttttgcttctcatgtggcaattctcttgtctgtggaaggagacattcgtctcccctgctgttgtactgttacttctagtccttacctatataatccatccttgtgttgcaatgttcatttttttttggggggtagtgttttgagtttgtacaattattacaaagcatgcgtgctacacacctgtttctattagcacaaaatgccaacttctgatttcaaaatcgacatcgtggattctttaattcggaactggaaaggagcggctaccagagcaaatcatggaaaacgatcaggatatataatgtggggatgacaagtcgaagagcagctgacggtcagctgtctcgtatcctggatagattaagcgaatcgaggagtgccttttcgacagagtactgc

SEQ ID NO: 110562 - DNA, 1280 bp, Zea Mays
agtcgcagcaaccaactcggtcggtccgcgcccgcccgcccgcccgcctccgttggccatttgaatgtgagaaagagagggaccagtgatccgtcgtcggtcgccggccatgccgagatcctcctccagccccggctccggctccaagcgcatcctggggagggcgatggccgcgatcctggcgctgccgctgaccccgatcaccaaggccaagctcggcctgctgctcttcaagaagcgcgcctccgccgccgcgggcaggcgccgctgctacaagccgttccgccactacaactacgcctacgtgggcgagtaccagttctcgccctcccgctccccgctgctcccggccccgccccccggcgtcaccacctggcggagggccgccgccgccgccgccaggaggcgccggggcagggccaggatggtcctcgcctccctcttctgtggcggcggcggcgccgacgagctcgacgtcgccgtgctggacggcctcgcgcgtcgcaccgacgggcgcgcggagagggaccagctggtggtgctcgccccggctctcgagtgggcgcgcggccgcgacgacggtgcagcctacgcctgcagcagcaacgacgaggatgaggaggtggcggttgtggactacggggaggaaggcgacgtggaagtggacgaccgcgccgagcgcttcatcgagcggttctaccaggagatgaggctgcagaggcagcgctctctggtccagcgcctgctctagagacattcgtccgttgctgctgcttcaattccttggtcgatcgggcagaaccagtcgtggttgtcgctgctatcttagctgcacttcggttaaatctctccgtatcttgcatttgcgtcgttccatgtttttttgcttctcatgtggcaattctcttgtctgtggaaggagacattcgtctcccctgctgttgtactgttacttctagtccttacctatataatccatccttgtgttgcaatgttcatttttttttggggggtagtgttttgagtttgtacaattattacaaagcatgcgtgctacacacctgtttctattagcacaaaatgccaacttctgatttcaaaatcgacatcgtggattctttaattcggaactggaaaggagcggctaccagagcaaatcatggaaaacgatcaggatatataatgtggggatgacaagtcgaagagcagctgacggtcagctgtctcgtatcctggatagattaagcgaatcgaggagtgccttttcgacagagtactgc

SEQ ID NO: 110563 - DNA, 861 bp, Zea Mays
cgaacatgttgcttttgaattctctcgattgcatcgtgaactcgggattcagagtgtgatcttagagcagaacatgtgctaacatgggcaaactaacggtcttctaattcgtgcttagcactagatccagcaaaaaaagtgcctttttcatcacacacaacaaaacgtaccctggcgtacaatgttgttatcagctgggtaaaaagaggagcgacgaaaagaaaaaaaaagcgccaaaagtaggagacacttttaggctttagcacgtttcggttacagcatacaaagggcaaaacaaccgggaggtccttcaaccttacatggctctgtacaaaatttgctgcagggaaaaaaaaacaaagatatccgcagtatctcttatttatacgtaattgatcatgcgagcagaaagtccaaacatgtcaatatctcacatacagcagccaatacgccgtgtttcaccacaggtcgagtgcgaactcaccggcaagcgcctcaagaatgtcgttctcgattgcaatgcttatgtcaaatgcttcaacctggcttgcatcccacctgtcagtcacttggtccacttctttgtcagagacttgtctaagagcagtcccactcgactccctccagttgccgatgtcttccaatacctggcgcttcagcaggtcctcgctcaaactgagaggcaggctcagccaggccttgtatccacatttgccgaaattgcagaattttgaatccagtgactctatgatgcagtcaaacaggaagttggtacgttgatacttcttatcttcagtgaaacctgaatactctcctccactaaacatatccatggtgttttccagcatttcgacaatgaaa

SEQ ID NO: 110564 - DNA, 853 bp, Zea Mays
ttgcttttgaattctctcgattgcatcgtgaactcgggattcagagtgtgatcttagagcagaacatgtgctaacatgggcaaactaacggtcttctaattcgtgcttagcactagatccagcaaaaaaagtgcctttttcatcacacacaacaaaacgtaccctggcgtacaatgttgttatcagctgggtaaaaagaggagcgacgaaaagaaaaaaaaagcgccaaaagtaggagacacttttaggctttagcacgtttcggttacagcatacaaagggcaaaacaaccgggaggtccttcaaccttacatggctctgtacaaaatttgctgcagggaaaaaaaaacaaagatatccgcagtatctcttatttatacgtaattgatcatgcgagcagaaagtccaaacatgtcaatatctcacatacagcagccaatacgccgtgtttcaccacaggtcgagtgcgaactcaccggcaagcgcctcaagaatgtcgttctcgattgcaatgcttatgtcaaatgcttcaacctggcttgcatcccacctgtcagtcacttggtccacttctttgtcagagacttgtctaagagcagtcccactcgactccctccagttgccgatgtcttccaatacctggcgcttcagcaggtcctcgctcaaactgagaggcaggctcagccaggccttgtatccacatttgccgaaattgcagaattttgaatccagtgactctatgatgcagtcaaacaggaagttggtacgttgatacttcttatcttcagtgaaacctgaatactctcctccactaaacatatccatggtgttttccagcatttcgacaatgaaa

SEQ ID NO: 110565 - DNA, 97 bp, Zea Mays
tgagattaaatcattccacataacattaacactgctacaacttagtgatactccaatgatagaacaaacagtcgctgttaaaccatatgtgaaatga

SEQ ID NO: 110566 - DNA, 273 bp, Zea Mays
gaacaatcacaatattatatgtcaaaacgttttagaaaccaccatagagttttttttagtgtagaacaatcctagctccaactctccaacattttgctcatgtatcagattcaagtggatggcgcacggatgtactcgagcgatgttgatgagggaggagaaattgtcgacgaggctggagacggctgggcccgccttctacatcagcgacttctgcttctgcaccgcggcggacgccgccgcagccgtcgccccgtcggacccggggccgct

SEQ ID NO: 110567 - DNA, 778 bp, Zea Mays
tccgccctccgcgctgacgtcgaggcgcatatcaccgcctcgaacgtctcgacggattcgcggatccgccaactcgaggtcgatgtgggtggtcgcctcacggctctggaatcaaacgcccagatgttggattactggaggctgcaggtggattcctcgatccacaccctccagacctccatggattgggtgtgttctgaggctgccaggcgtgagattccactctcccctgcgccgcccttaggaggttccgacgcgccgggcattctcggtgcacctggagtcttcgccccaaccggatcggtgccgcggcgcccaccagccggcgtgaactaaaccgacggccctcgtttcggccaccgcttcgacaattacctccgggacagtgaattggggcctctagatccctctattcattgcccggtcatgggtatgtgggatgttcactcttcaccttcatttgcgtttgctcagaccagcggttcccaccatcagagtccacacggtcgtcccctcgacggcctgcctaagcttagttttccctcctttgatgggactaacccgaagctgtggcagaagaggtgtgaagattatttcgatatgtatgatactgagcagattgtgtgggtgaaagcagccacaatgcacttgtcggggtggctgtgcgatggcttcagtcaattgagcctcgcctcccatcctggtcatggcagcgtttttgtcacgcagtgcacgaacgctttggtcgcgaacaacatgaactcctcatccgtaaact

SEQ ID NO: 110568 - DNA, 642 bp, Zea Mays
tttggaattatttgccagcccttgacatccctcttaaaaaagggagtgctctttgtttggacagcggaccacgacttggcttttcacaccttacaacaagccttggtgtcggcccctgtacttgccttgccggatttctcctcgcaattcaccattgaaacagatgccagtgacctcgacattggggcagtattaatgcagcatggtcaccctctagcgttcctcagcaaggccttgggtcctaaatctcggggtctatccacctacgaaaaagagtatatggccattattgttgctgtccaacaatggcttcctatcttcaacacagagagtttgtgatagtcactgaccataaaaacctaacgagcagcgacttcacactccttggcaacataaagtcttcactaaattgcatggacttcagtaccggatccaatatcgtaaaggcaatgaaaatcgtgctgcggatgccttgtctcgacgtggccatgttgaactccatgttgggcgtgtttggttcggcttttttctgaccagcttttctgaaaagctggctgtggggaaaagctagctgttgggaaaagctggtggttagaatttaggtgtttggttcgccagctgtgcagaaaagttgttcgtgag

SEQ ID NO: 110569 - DNA, 612 bp, Zea Mays
atgcggggaggagacggactgccggcggcgcgatgggttcgcggcggcggccggatgggtccgcggcggcggcgcgatgggtacgcggcggcggaggagcgtcgcgtgcctagcgaagtgggcgcggcttcgaaccgaagccaactcacggccgcttcgggcgttaagtggccggacggcttcctgcggaagcgcgtcgcggagaagcggcgccagaagctacccgtttggctccagcttctgcttctggcggccagaagccgcccagaagctgaaccaaacagccgcgttgtgtcccttgtggtgcctcagtggctgactgatgttcagaccagctattctgctgatccagatgcacaaaaaatgctgtctaaattatcaatcaatgttgcagttgtacctaattttgtgctaaaggatgggagcagcgccgccctgatcgctccatctccgaccccgaggaaggctccagggccgcagccacagcccgtgccatggctcgtcgggggtaacattgtgctcgataggttctgtcagaccagcaattcaagacgatctgacccccgtcgcgaaaggtgcattcgtgtctctgggcccaattgggtcgtgtaa

SEQ ID NO: 110570 - DNA, 1915 bp, Zea Mays
aaattatggaccgttctgggccgactcatgtggtcctagtcctgagtcctagtcctgtcatcctgtgcagctgcccgtagccttatctgctttcgttcgaccaggtgtcgttcgctttgccttgccccggcaaagcaatggcgctccgtctctctgctccgttcctcacctcgcgctttacgccgtcgcaagcgttggccccgcgcaggcgcacccgggcccgctctttctctccgtcagccgatgcgcgagccgcgtgcttcaagagaccctacacgtccgttctaattatccccacgggcgtcggcgcggccgtcgggggcttcgccggcgacgcccttccggttgcgcgagccgtcgccggcgtcgctgactgtgtcatatcccacccaaacgtgctgaacgctgcgatgctatactggccgatgcccaatacactttacgtggaagggtacgcccttgacaggttcgcagaaggatcctgggctctccaacctgttcaccagaacaaggtaggtttggtgctggattctggaatcgaggaagacctccggctgcgccacttgcagattgcagatgccactagggcttctcttggcttgcctgtagtggagtacattgttacagatgctcctctggagatcaagacatggtttgatcccaggtgtgggaagtcaacagggagtgttggtaactctgattctcttctgagagcagttgacgcactagtgaaacattcagatgtgaatgctgtggctgtagttgcacgctttccagatgatgacccagaagattcagattgttaccgggaaggaaagggtgttgatctattggcaggagttgaagcaattatcagtcatttagttgtgaaagaattcaaaatcccttctgcacatgctcctgcagtgttacccccaccactcagcccattagtatgccctagatctgctgctgaagaggtatatgtctatcgttgtgtaacaacatcagggtacacgtacacagagtactagaaagagagaattaggagatagcatggcacaattcggtggtcatgttgaacctgatcacgagtgagagtcaacatgcggttagttagagaggtttaggctgcagtgtacgtccccttgcatcaattgatgagcacaaaggagaaaaaaattacaagctcaaacaccaattggacatacatttctgccttgtgtgcttgctgggttaagcaatgctccacaatatgtcatgaggagcggaaccttggaccatggttgcatagtggctggtgatgttgacagtgttattcttcccaaggactcctgtggaggagatggtacacttgcttttgctcgagctgcaagaaaggacaagcccttaatcattaccgtgcaggaaaatgagacagtgcttgatgatactccagacaagttcggcatagaagtgctgaatgtccgaaactactgggaagcaattggagtcatcgctgctcacaaagcaggtgtcaatccacatgctcttagaagacgagggattgatcatcttaagagccctcaacgatcatattctgcctactctgcaagtcctaaaccatctgcccgtcctccagtgcacgataaagtacagagacagcagctagttaggcaaatttagtactaaaaagagcactagcagcagtagaaattactttagatagtcgtgattaggaacttccaaaattttgaagcccagatacatatttttcagaccgtcctgaagtgtaggaccatagcatcacacgaattttgtcgtgttatccagtctggacttcgctgacatgagtctttctccactgccttacatttctccaatctctagtcggtttgtcaatcatttacatcattattttgccaaggtatacacagcgctggtaatcattttcgtc

SEQ ID NO: 110571 - DNA, 1645 bp, Zea Mays
gtcgttcgctttgccttgccccggcaaagcaatggcgctccgtctctctgctccgttcctcacctcgcgctttacgccgtcgcaagcgttggccccgcgcaggcgcacccgggcccgctctttctctccgtcagccgatgcgcgagccgcgtgcttcaagagaccctacacgtccgttctaattatccccacgggcgtcggcgcggccgtcgggggcttcgccggcgacgcccttccggttgcgcgagccgtcgccggcgtcgctgactgtgtcatatcccacccaaacgtgctgaacgctgcgatgctatactggccgatgcccaatacactttacgtggaagggtacgcccttgacaggttcgcagaaggatcctgggctctccaacctgttcaccagaacaaggtaggtttggtgctggattctggaatcgaggaagacctccggctgcgccacttgcagattgcagatgccactagggcttctcttggcttgcctgtagtggagtacattgttacagatgctcctctggagatcaagacatggtttgatcccaggtgtgggaagtcaacagggagtgttggtaactctgattctcttctgagagcagttgacgcactagtgaaacattcagatgtgaatgctgtggctgtagttgcacgctttccagatgatgacccagaagattcagattgttaccgggaaggaaagggtgttgatctattggcaggagttgaagcaattatcagtcatttagttgtgaaagaattcaaaatcccttctgcacatgctcctgcagtgttacccccaccactcagcccattagtatgccctagatctgctgctgaagagggctaagggaggtctccgaggtgcggtggtcctatcttagtgggtcccgcgacaactttctgtactgggatcattgaatgcatcttagcagctgctgcagattggacatacatttctgccttgtgtgcttgctgggttaagcaatgctccacaatatgtcatgaggagcggaaccttggaccatggttgcatagtggctggtgatgttgacagtgttattcttcccaaggactcctgtggaggagatggtacacttgcttttgctcgagctgcaagaaaggacaagcccttaatcattaccgtgcaggaaaatgagacagtgcttgatgatactccagacaagttcggcatagaagtgctgaatgtccgaaactactgggaagcaattggagtcatcgctgctcacaaagcaggtgtcaatccacatgctcttagaagacgagggattgatcatcttaagagccctcaacgatcatattctgcctactctgcaagtcctaaaccatctgcccgtcctccagtgcacgataaagtacagagacagcagctagttaggcaaatttagtactaaaaagagcactagcagcagtagaaattactttagatagtcgtgattaggaacttccaaaattttgaagcccagatacatatttttcagaccgtcctgaagtgtaggaccatagcatcacacgaattttgtcgtgttatccagtctggacttcgctgacatgagtctttctccactgccttacatttctccaatctctagtcggtttgtcaatcatttacatc

SEQ ID NO: 110572 - DNA, 1511 bp, Zea Mays
tcgttcgctttgccttgccccggcaaagcaatggcgctccgtctctctgctccgttcctcacctcgcgctttacgccgtcgcaagcgttggccccgcgcaggcgcacccgggcccgctctttctctccgtcagccgatgcgcgagccgcgtgcttcaagagaccctacacgtccgttctaattatccccacgggcgtcggcgcggccgtcgggggcttcgccggcgacgcccttccggttgcgcgagccgtcgccggcgtcgctgactgtgtcatatcccacccaaacgtgctgaacgctgcgatgctatactggccgatgcccaatacactttacgtggaagggtacgcccttgacaggttcgcagaaggatcctgggctctccaacctgttcaccagaacaaggtaggtttggtgctggattctggaatcgaggaagacctccggctgcgccacttgcagattgcagatgccactagggcttctcttggcttgcctgtagtggagtacattgttacagatgctcctctggagatcaagacatggtttgatcccaggtgtgggaagtcaacagggagtgttggtaactctgattctcttctgagagcagttgacgcactagtgaaacattcagatgtgaatgctgtggctgtagttgcacgctttccagatgatgacccagaagattcagattgttaccgggaaggaaagggtgttgatctattggcaggagttgaagcaattatcagtcatttagttgtgaaagaattcaaaatcccttctgcacatgctcctgcagtgttacccccaccactcagcccattagtatgccctagatctgctgctgaagagattggacatacatttctgccttgtgtgcttgctgggttaagcaatgctccacaatatgtcatgaggagcggaaccttggaccatggttgcatagtggctggtgatgttgacagtgttattcttcccaaggactcctgtggaggagatggtacacttgcttttgctcgagctgcaagaaaggacaagcccttaatcattaccgtgcaggaaaatgagacagtgcttgatgatactccagacaagttcggcatagaagtgctgaatgtccgaaactactgggaagcaattggagtcatcgctgctcacaaagcaggtgtcaatccacatgctcttagaagacgagggattgatcatcttaagagccctcaacgatcatattctgcctactctgcaagtcctaaaccatctgcccgtcctccagtgcacgataaagtacagagacagcagctagttaggcaaatttagtactaaaaagagcactagcagcagtagaaattactttagatagtcgtgattaggaacttccaaaattttgaagcccagatacatatttttcagaccgtcctgaagtgtaggaccatagcatcacacgaattttgtcgtgttatccagtctggacttcgctgacatgagtctttctccactgccttacatttctc

SEQ ID NO: 110573 - DNA, 1463 bp, Zea Mays
tcgttcgctttgccttgccccggcaaagcaatggcgctccgtctctctgctccgttcctcacctcgcgctttacgccgtcgcaagcgttggccccgcgcaggcgcacccgggcccgctctttctctccgtcagccgatgcgcgagccgcgtgcttcaagagaccctacacgtccgttctaattatccccacgggcgtcggcgcggccgtcgggggcttcgccggcgacgcccttccggttgcgcgagccgtcgccggcgtcgctgactgtgtcatatcccacccaaacgtgctgaacgctgcgatgctatactggccgatgcccaatacactttacgtggaagggtacgcccttgacaggttcgcagaaggatcctgggctctccaacctgttcaccagaacaagatcaagacatggtttgatcccaggtgtgggaagtcaacagggagtgttggtaactctgattctcttctgagagcagttgacgcactagtgaaacattcagatgtgaatgctgtggctgtagttgcacgctttccagatgatgacccagaagattcagattgttaccgggaaggaaagggtgttgatctattggcaggagttgaagcaattatcagtcatttagttgtgaaagaattcaaaatcccttctgcacatgctcctgcagtgttacccccaccactcagcccattagtatgccctagatctgctgctgaagagattggacatacatttctgccttgtgtgcttgctgggttaagcaatgctccacaatatgtcatgaggagcggaaccttggaccatggttgcatagtggctggtgatgttgacagtgttattcttcccaaggactcctgtggaggagatggtacacttgcttttgctcgagctgcaagaaaggacaagcccttaatcattaccgtgcaggaaaatgagacagtgcttgatgatactccagacaagttcggcatagaagtgctgaatgtccgaaactactgggaagcaattggagtcatcgctgctcacaaagcaggtgtcaatccacatgctcttagaagacgagggattgatcatcttaagagccctcaacgatcatattctgcctactctgcaagtcctaaaccatctgcccgtcctccagtgcacgataaagtacagagacagcagctagttaggcaaatttagtactaaaaagagcactagcagcagtagaaattactttagatagtcgtgattaggaacttccaaaattttgaagcccagatacatatttttcagaccgtcctgaagtgtaggaccatagcatcacacgaattttgtcgtgttatccagtctggacttcgctgacatgagtctttctccactgccttacatttctccaatctctagtcggtttgtcaatcatttacatcattattttgccaaggtatacacagcgctggtaatcattttcgtccgac

SEQ ID NO: 110574 - DNA, 897 bp, Zea Mays
ctgatctcgcactgacagtcctgtcacaccgccaatggaagaagccccggagctgatcagccccaggatctccttctcgcacgacctagcagccgcgacaccgccgccagcgccagcgccagccctgcttgccggccggcggtcggacgcgtcgctgctcgggtcacgcccgcgcctcccggagccggacttcgacttcgacttcgacttcgccaacgccacggccgccgccgacgtcgccccggccgaccgcctcttcgccggcggcaagctgctgccgctgccgccgcttccgcccgctccgaagcccaacaacccgtgcaagccacaggcttgcagcagcagcagcaccagtgtcaagcaggcgcagcagcaggcgtgccaacagaggcggccggggtcgtgggcgtcctcgttctcacgcagcagcagcgccaactcggccacgacgggcgcgccgcggtccgcggggaggttcggatgcccgccgttcccgctgatgcgcagctggtcagtcggctcggcggcgagcgtggcgcggggtgctgctgctgccaccttgggtgatgatggcgcggccccggacgccgccgccgccagccatcggcctcatcatcaccagtaccacaagaaattcggcatcgtcgctggggctgctactagcaacaacggtggtagctcaagaacttactactatggaggtagcagaaaaggcggcggcggcggcggcagtagcggtagccatggtgttagggttcggccggtgctgaacgtgccgttcatcggcacaagtgtgtccaacgtgctcagctacttgctctgtgactgtagccacgggaccaagaagagtaggggcttgtagagttaactggcctggtgctggtgcctcagctaata

SEQ ID NO: 110575 - DNA, 148 bp, Zea Mays
ccctgttctgcctttctgattccctcctccccgcgcataatccattcccatgttctgtcaccattctatatctatcattctcattccccctccccgcaaagctcattctcattctcattccccgtacagccgacgtctagctaaaatt

SEQ ID NO: 110576 - DNA, 476 bp, Zea Mays
cccgaacccgtccctgccatcacaagtgattttttttttgtcaaaaccccatggaaagaacagccaagaaatcaccagatctggacgaacagggccatagaacccggtcaaaaccacccagatcgatgaaagaatgaaccttttgcgggtgaaattgaaaggaaaagaaaaaaggcacggacctgagcatcgacgaggatttgttccagccgttgagccccttgcgcatagatcggccagagcaagcgagggcgcggaggatgacggcgaagacggcgatgatgagcgctacgaccaccagatcggaaaaggggcaagaagacatatacgagagttgtctgcttcttcttctccgacgccggcgccgtcgtcgtcgcctccggcctcccttacacgcgcttaaaccccaacccaaagcggcgagaggagcgaaaggggttggccacgcctcgtccgacgatatttaatccccttcc

SEQ ID NO: 110577 - DNA, 463 bp, Zea Mays
ctgccatcacaagtgattttttttttgtcaaaaccccatggaaagaacagccaagaaatcaccagatctggacgaacagggccatagaacccggtcaaaaccacccagatcgatgaaagaatgaaccttttgcgggtgaaattgaaaggaaaagaaaaaaggcacggacctgagcatcgacgaggatttgttccagccgttgagccccttgcgcatagatcggccagagcaagcgagggcgcggaggatgacggcgaagacggcgatgatgagcgctacgaccaccagatcggaaaaggggcaagaagacatatacgagagttgtctgcttcttcttctccgacgccggcgccgtcgtcgtcgcctccggcctcccttacacgcgcttaaaccccaacccaaagcggcgagaggagcgaaaggggttggccacgcctcgtccgacgatatttaatccccttcc

SEQ ID NO: 110578 - DNA, 597 bp, Zea Mays
atgcaggccggccttcacgccatcatctgcacgtcctgctcagcgacgccggagagccgttcgctcatcccggacgttgcggcaaaccccgtgagaaccggcgccacgcacgcacactactcctacacacaccctggcagaacatgcaagtacatgcaccacctcccttgcgacccggacaagctcggacgctcaggtcacacgaaccaggtacacgctctgattttctctgtttcaaagatcaaagtcaccagcatgtccgggtgtcgaatgagcctggcaaagaacggattgggtcaatgtataggattttcactcgatggctccggatttaagagttccacaacaaaccgctgtcacttttcagacagtgaagctcgatctgttgcttcgaagacgggcaaaaaaataaaattgcatgtcccttctaaaccaaacatgtggagctgtgggggatcaggttccaattccaaatgccatcgttgtcacacgccgcgcatgctacttgagcagcccccaccaccagttcgtccaaaagaaaggaaaaaaacgacgagggtcactgaaagaggaaagggaaagatggggctaggctag

SEQ ID NO: 110579 - DNA, 94 bp, Zea Mays
tccgtagctataagcatacgtgttggtttttcttccaccagagacacggtagacagggacgggcaatggcgaaaggcatttatttgcacgacag

SEQ ID NO: 110580 - DNA, 1695 bp, Zea Mays
cacctatcccctacccatacacttatataagcttttgagattttcctgcaatttatttgaatttctcaactgggccaaacccataaatcctaacacattcatcatactagtcaaacgtcaaagattcaatcttttattgttgcagcaatgttgtactctgctccttgcacagagcaccccctgatgacagatttttcagaatatggattctgactgcacatcagcatggcaggatctacccatctaaatcagaaacggaacacgactttaagcaaattcatggagacggaagcacagcatcactcgacctatgcttcgatccgcatgttccatgtcatggtgaagctcttcccgagcggcaatgccagcccgccgatctccaccatgacgccgttcttactatcctcgacgccttcttccccctgcagcttcgcgttgccacctgctgcaaagtaagggctcgacgtcgcgacggcagtggcgtccgtgccgtccacctggatggcaaggtccttgccggtaccctccagacccagcaccgagagcttctcgacgaccagccccttgtgcaggctgtagcttcccatcagcacctccgaccgcaccgtcacggcctttccgcgcacgctcgcgtggaaacgcacgtacgacgcctggccttccgcgagcaccatctccgggcgctcgtcgtcgtccacgtacaccgcgccctccgcgtcggcctgcgtcgccccgaacgggaacgcgaccacgagcgtgaacggcgtcgcccgggcgtccttggagacgaacccgccgcgctgcatcggcaggatcgtgttctggtacacgtgcacgttgatctcgttcagcggcgcgtccagcttcactggggccccgctcctggacaccaccaccttactcatgtcgaacaggttgtaccaggtgcccggcgggaacatggcgctcaccgaagtggcgccctgctcgaggaccggggacaccatgacgccgggaccgagcaggaactgcgtgctcagcccgtagcacggcgtgaagtcggggaaggagaagaacaccggccgcgccacgggggccccggtcaggtgcgcctggtagttgagcgtgtacaggtaggggagcagcttgtaccgcatgccgagcgcgttccgagcagacttcgccacggagtcccagacatacagctcctgcctcggtgacgcgaagttggcatggtccctggagaaggggtagaaggccccgagctcaatccacctgttgcagagctcctcagtcggcgacgggtagaaaccgcagatgtcagagccaaccatgggcatgccgaagatgccaaagttgagcatggttgagatcgagtaacggagattttcccacgtgcccttgttgtctccggtccagtgcgcggcatacgcccccgacccgacgaacgtggagcgggtcaggatgaacggcctcttcccctgcagcccttgcagcgccgtatgcgtggcaatggcctgcgagaagccatacagactgtgcgcattgtactccaggatgccgttgtagtgtgtagcgctggttgcgatggtgttgaagccgagacgggcagtctgcccggaggcgttgatcttgtacggcggctcatcccacctcgtgtttgtaaggttcttgcaatccaagcaacagagccatggtgtcttggtgtcaggaata

SEQ ID NO: 110581 - DNA, 1085 bp, Zea Mays
ttccgcataattgctctttccgccttataaaccagcggtcctttttcttttcttcgaaaacactcctctaagccaccaaacacttgctatgcccgctcctccccgcgcactgctcagcacgccgtgcccgtgagaccatggacgcgagcgcggccaccgccaggcgcaagcgcaagcgccccgacgccgacatcaccggcgacgccgacgccgccgccgccgctgccgctgccgccgccccggtcgccgtcgacgaggcctcggacgccgaggtcgaggagttctacgccatcctgcggcgcatccgcgacgcctcccgccggctgtgcggcgccggcgcccggcccgccccgcgcgcgccggcgtggcggcccagcttctcctgggaggacttcgcgaccccggcccctggcgcgccggcgcctgagaccccgacccccacgcagcaggagccggcgcagccgcggcccgacgagcctgtagccgtcgtccgcgctaccgccccgtcgccgcgtgccgggctggacctgaacgcggagccggagccggaggcgccggccacccctcgctcggcgcgcgtccaggcgtagcgtagcgtagcgcgcggcgcatcgtcacctgcctcctgcaccgcgccagccaaggagagccgtagcgtggggccgttgggcgtgcgcgtcagctcggctgctgctgggaggtggctggcccggtgagtcggtgatgtcatgtcagccgagagccgacggtggtcgcaatcgtccgcgggcggcacagcacagcacacacagtgcgtaccttcccctcggtgaattactgatccgaatccccatcatgtaatcgtaatttttttagtggctctctttggtgcgctgctccgtgtggacaggtgagactggttcgttgctttggttgcaggaaaataccttttaatcggagcagttgatgtaccgtccgaaaaaatgacgtgtttaactattcgttgcgttttatgtattatttttaacctatgactgctaacgatggcatgtttattagttttatgtatacagtattatattaatgatatatactattaatatagc

SEQ ID NO: 110582 - DNA, 343 bp, Zea Mays
tttgcttctatttcactgggtgaattgtcatctttgagacaagcttagccatcttagagatgtttgttagggtagctgctcacaaggtgcaaaaccatttaatcttcgctccccactatttctgtgtggtcaggaaggggggaaaccttacatgcatgtaaattttgaggacatcatgtgctgttgtatattaggaatacctttgcatttgctggtgcgacacctaatcttcctgtctattaacagagttatttggccatgtatcatgaacatcattgtaggtttttttaggatttctcactgctgtttgtggcgctgtatttgtagtttacaaaacttctag

SEQ ID NO: 110583 - DNA, 124 bp, Zea Mays
gatacgacctgattggcggcggaaactgctaagagtactactaggcacgattttttttttgcctctttttagtgatcttagattatatagttaactccaagataataccacccgaacgaaaaag

SEQ ID NO: 110584 - DNA, 1656 bp, Zea Mays
atgggcggggcaggtgggcttatgttgctgcgcgcgcggtgccgtctccaactctgtctcggcctctcgcgtggaggtggaggtggaggcggagccgatgagatcgatcgcccgacccccgtcacgtccggggtcgcattctctttccgtcccggggaaaaaagaaggaaaccgaaccttggcagcggcgtgccggcaggcatgtcagcgacggtagccggccacaggtccagattccggaaccgaaccaccgtcccccgcgaaccacggaacagcgaagacacctgggccagggctagtgaggccaagccgatccgaaacatcgcgttgcgtcccgcacaatcccgtcccgatctgggccgggggcacgcgagcgacgataaacttcctcgtggcggtgagggccggcttggagtcggcgcagagctggacgagttgcacttgcaccttgcacgcgacagccacgcactagcctgcagctgcagggcaggggcggagaccatggggagcccgcaccatggacacggcgttgacggtggcggccgcagcgacgacgaggagggcgacgccgggtcgtggcggctgcgcatggacagcggcttcagcgtcccggaccggttccaccgccagccgcccttctacgccaggatcttcggcggctcgcacgttcagttcaccgtgccagggaagcagaggaagatcgcgaagtactacaagaaacaagagaatctactgaaggatttcagcgaaatggagaccatgaacgaaatgggtggcctagatcagaatgctcctaccgaggaagagcagaagcagttggcgaagagcgagaggtttgccatcaacctgtcgaatgcagtcaacctggtcctcttcgtaacaaaagtcgtcgcttcagtcgaaagcgcgtccatggcggttatagcgtcgacgctggactctctgttggacctgctgtcagggttcatactttggttcactgcgtacaagatgaaaaagccgaacaagtacaactatccaattggaaagaggcgcatgcagccagtgggaataatagttttcgcatcagtgatgggcacacttggcttccaagtgctgatcgaatcagggcgccagctcataactcagcatgtcctctgttgcggtcgtgagttcttcctcatgctctactgcagaacgttcaagaatgagatcgtgagggcctacgcccaggaccatttcttcgacgtaatcacaaactcggtcggcctggtctcggcgctgctcgctgtccggttcaaatggtggatggaccctgttggcgccatactgatcgcgttgtacacgatcacgacgtgggcgcgaacagtgctggagaacgtaggcacactgataggcaagtcggcgccggcagagtacctgacgaagctcacgtacttgatctggaaccaccatgaggagatccagcacatcgacacggtgcgagcctacaccttcggcacgcactacttcgtcgaggtggacatcgttctctcgggcgacatgccgctgagtcaggcacatgacatcggcgagtcgctgcaggagaagctggagcagctgaccgaggtcgagcgcgccttcgtccatgtggatttcgagttcacgcaccggcccgagcacaaggccgaggtctga

SEQ ID NO: 110585 - DNA, 2097 bp, Zea Mays
ttggggttgtttcttgccgccgccacgcttgtttttccagaccgaacgttgcgcttaaccgcgatgaagcgagtttacccggcgacgcacggtatctggtttatgggcggccttccttgttttgccgggttggggggaaatcgggcccagctaccgatgcaagcgttggctaccggaccgcaatggaagcggccaacaccgatcagccgccctattctccacgccgcatcgatggtgaaagtggggcgtttacatttttgcccgcgctattatcgacggcggcaatatcccgcatgtgattgggcggcgttggcatggtcatggcactggtcaccattctttatggctttctgatgtatttgccacagcaggatatgaagcggttgctagcctggtcgaccatcactcaacttggctggatgttcttcggcttgtcgctctccatcttcggctcgcggctggcgctggagggcagcatcgcctacatcgtcaaccacgcgttcgctaaaagcctgtttttccttgtagcaggtgcgctgagttacagctgcggcacgcgcttgttgccgcgtctgcgtggcgtattgcacaccctgcccgttgccaggcgtgggtttctgcgtggcagcgctggcgattaccggcgtgccgccgttcaacggcttcttcagtaaattcccgctgtttgctgccggttttgcgttgtcagtggagtactggatcctgctgcccgccatgattcttctgatgattgaatcggtcgccagtttcgcctggtttattcgctggtttggtcgcgttgtgcctggcaaaccgagcgaggccgtcgccgatgccgcaccgctgccaggatcaatgcgcctggtgttgattgtactgattgtgatgtcgctgatttccagcgtaatcgccgcgacctggttgcagtaaggagatgatgaatgaccggttctatgatcgtaaataatctggcgggactgatgatgctgacatcgctgtttgtgattagcgtcaaaagctatcgcctgtcatgcggattttacgcctgccagtcactggtgctggtgtctattttcgccactctctcgtgcctgttcgccgcagagcaactgctgatctggtccgccagcgcctttatcaccaaagtgctgctggtaccgttaatcatgacttacgctgcacgaaatattccccagaacatcccggaaaaagcgttattcggtccggcaatgatggcactgctcgcggcgttaattgtcctgctttgcgcatttgtcgttcagcccgtgaagctaccgatggctaccgggctgaaaccggcgctggcggtagcgttaggtcattttctgcttggcctgctgtgcattgtcagccagcgcaatatcctgcggcaaatttttggttactgcctgatggaaaacggctcccatctggtgctggcgcttcttgcctggcgagcaccggaactggtggaaataggtatcgctaccgacgccatcttcgccgtcattgtgatggtgttactggcaagaaaaatatggcgtacccacggcacgctggacgtgaacaacttgaccgcgctgaagggataatgagatgagttattctgtgatgttcgctttactcctgctcacgccgctgcttttttcgctgctctgttttgcctgccggaaacggagactttctgcgactcgcacggtgaccgtattacatagcttagggatcacactgctgctgattctggcactctgggtggtccaaactgccgctgatgcaggagaaatattcgctgcgggactgtggcttcatattgatggtctgggcggtttgttcctcgccattcttggtgtgattggctttctcaccggtatttactcgattggctacatgcgtcatgaagtggcacacggcgagctttcacccgttacgctgtgcgattactacggtttcttccatctgtttttgttcaccatgctgctggttgttaccagcaataacctgattgtgatgtgggcggcgatcgaagccaccaccttaagctcggcgtttctggtaggcatttacggtcagcgttcatcgctggaagctgcatggaag

SEQ ID NO: 110586 - DNA, 2440 bp, Zea Mays
acaagtctggtttccctggaaaatgtctcggtttcttttggccaacgccgcgtcctctctgatgtgtcgctggaacttaaacctggaaaaattttgactttacttgggccaaatggcgcaggtaagtcgacactggtacgggtagtgctcgggctggtaacacccgatgaaggggttatcaagcgcaacggaaaactgcgcatcggctatgtaccgcagaagctgtatctcgacaccacgttgccactgaccgtaaaccgttttttacgcttacgccctggtacacataaagaagatattttgcctgcactgaaacgtgtccaggccgggcacctgattaacgcaccgatgcaaaagctctctggtggcgaaacgcagcgtgtactattagcgcgagcattgttaaatcgcccgcaattattagtgctggatgaacccactcaaggcgtggatgtaaatggccaggtggcgttatatgaccttattgaccaactgcgtcgtgaactggattgtggcgttttaatggtttctcacgatctgcatctggtgatggcaaaaaccgatgaagtgctgtgcctgaatcaccacatttgttgttccggcacaccggaagttgtttccctgcatccggagtttatttcaatgtttggtcctcgtggtgctgaacaactgggtatctatcgccatcatcataaccatcgtcacgatttacagggacgaattgttttgcgtcggggaaatgatcgctcatgattgaattattatttcccggttggttagccgggatcatgctcgcctgtgccgcgggtccgctgggttcgtttgtagtctggcgtcgtatgtcttatttcggtgatacgctggctcatgcctcattacttggcgtcgcgtttggtttgttgctggacgtgaatccattctatgcggtgattgccgttacgctgctgctggcgggcggtctggtatggctggagaagcgtccacagctggcgatcgacacgttattagggattatggcgcacagtgccctgtcgctgggcctggtggtcgtgagtctgatgtctaatattcgtgttgatttgatggcttacctgttcggtgatttgctggcagtgacgccagaagatctcatctctattgcgattggcgtggtcatcgtggtggctattttgttctggcaatggcgcaatttgctgtcaatgacgataagcccggatctggcgtttgttgatggtgtgaaattacagcgagtgaaattgttgttgatgctggtgacggcattgacgattggtgtagcgatgaaatttgtcggtgcgttgattattacttcgttgctgattattcctgctgctactgcgcgtcgctttgcccgcacgccggaacagatggctggtgtcgctgttttggtggggatggtggcagtgactggcggtttaaccttttccgcggtttacgatacgccggcgggtccgtcggtggtgctatgtgcggcactgttatttattctcagtatgatgaaaaagcaggccagctaatctatcgctgaacacatttgtcggatgcggcgcgagcgccttatccgacctacggttcggtatctctggtagtcctggtaagacgcgaacagcgtcgcatcaggcatattgccagtgccggatgcggcgcgagcgaccaatccgacttacggcatttctggcggcgttatgccaaagtgattccacgcccgcgtcgtcgccatacgcccacgcggtgtacgctgcaaaaagccttgctgaatcaaataaggttccagcacatcctcaatggtttcacgttcttcgccaatggctgccgccaggttatccagacctacaggtccaccaaagaacttatcgattaccgccagcaacaatttgcggtccatataatcgaaaccttcagcatcgacattcaacatatccagcgcctgagcagcgatatctgccgagatggtgccatcgtgcttcacttcggcgaaatcacgcactcgacgcagcagacggttggcaatgcgcggcgtaccgcgagcgcgacgagcaacttccagcgcgccgtcatcactcatctcaagccccataaagcgtgcgctgcgactgacgatatattgcagatccggcacctgataaaactccagacgttgcacaataccaaaacggtcgcgcaacggtgatgtcagcgaacctgcgcgcgtggttgcaccaatcagggtaaacggcggcaaatcaattttaatggagcgtgccgccggaccttcaccaatcatgatatccagttggtagtcttccattgccgggtacagcacttcttcaacaactggcgatagacggtggatctcatcaataaacagcacgtcatgcggttcaaggttagtgagcatcgcagccaaatcgcccgccttttccagcaccggaccagaagtcgt

SEQ ID NO: 110587 - DNA, 618 bp, Zea Mays
attttggatcctagagctaaactcactaattttaataatgcattgcatgttctttttgattcacttcatcttgattactctagttattccattgaagttaaaactcaattgtcaattctatatgccaaatatgagtctaaatttggttctgtacgtttgcaaagaccccaacctgctactattggacctggtaatgtattgtcttcatggaataggtttgtgaggactaatccatcatcatcaccatctgtttctactggaactgtttttaacacacctatttctagcacaatttctgagttatcatcttatctagatagtgatcctcttactgagtttgatgattcatttagtgtacttagttggtggcgtgatcataaaagaacctatccaattttatcaattctagctaaagatgtctcaactgtgcctgtatccactatttcttctgagtcggcttttattttatgtggcaggttgatcgaggaacgacgacgaagtctaacaccagaacatgtggagatgctgtccctggccaaggattgggagcaagcagctgttcggcagcaacactgtgttgagaacaaagatcttgaagagctaatggaaaacatgtat

SEQ ID NO: 110588 - DNA, 582 bp, Zea Mays
agagctggctgagaaagagctagcacaaacgtcgatgcaagcgacgaataagagaccgcagagaagataccctgtggcacccatcgtcatgtgcctggtcctggcgtgggcatcatgcctccacggcgacgacactaaattattagcggccgcggttccattgccgcggcgtccagcagcaacaagcagcgtggccgccgcaggggggatgcccgtcgtcgtgggctaccgcccgagacctcaagcaggcgccgccgccggccgctcagcaccgcgttccaccgcctggatcggagacgacaagcgccagattccaagctgtcccgacgctctccacaacaggtagggtcgaaatccaagcaccctggcctggcctggcctaccccgtgcccgtggtaaccactgcttaattagaagagagagtgtgtgtgtgcgcgcgtcgctatgtgttttggttgaattagttcaaaagtatcgtcatcttacaaagctgctgcaacagtatgcaacgctgaagatcggtgagcagaaccacggtggctagctcgatctcttgtgcatctcgcattatgaaaaaaagtg

SEQ ID NO: 110589 - DNA, 122 bp, Zea Mays
ccgaggaaattcaattaaacgaacaaaatctaatagttatatcaaacacttttataattgtgccaaaatggaacctgtaagtctacatagtgtaggaacaaaccacaaaaagttcggttggg

SEQ ID NO: 110590 - DNA, 2431 bp, Zea Mays
gccagagcttcctctctgacagagaagatcgaatcacacactctcggtctcggcagatgcgcaacgccagcgacagcagctggtcttcgtgtgtggcggtgctgcagcgagcgcttggcccgcagcaggcttcacatggcttcttcggcttcggcctccaccagcagcggcttggtgacgcttattctcctggcggcatggaattggaacccgacgcagtgatgccgcctctcctcttccgctccctcgcgtcgctcaacctcctcctcctcgtcggctaccttctgctcgtcctcctcgccaagctcttcgcgcgcctgcaccacagggccaccgccaaggacagaacaagtaattggtatgatggccgctgcgaccaccgcacggaggccctggccaccgatgaagcagagtacgccgccgccgccgccgatatcgtccaagcacaacaagcggacacgctgtcctggttcgacgaggccgcgttcgaggacagcaccctggtgcttggcgacgaaggaaaagatcacccgtacgccgctactgcagccactgcacgttgttgcttgcaggtggtggagagcaactttcccatgcaggaatctgcccgcatctcgccgcgcaaccagaaccgccgcgtcgatgtcgatgtcgaagccgaaccgatgcagcagcagcagcacgtgctggaggaggccaagggcatcgccgtcgatgtccagcaggcgacggtcctggaaccggaacggcggcggagtgctcctgctccagtcgtcgtatcaccggaggatgtctccatccaaggcagtctcctagggaacaagcaggaaagcaacagaccaggagaagacactcgtcgcgacgcccatgccgagcacgaggatgaggagggccagcaggggaagagcctcgctgaaggccaccataatgtcaagctgttcgtcaacaaccgtgcgctcgccgacgccaggaagctcctgctggagggcgcggtgaacggagcgcaggcgcagctgcagctgcagctgcaggacgacaaggacaataagaacggggacagctgccggctcgacgcgtcgacgctgacgagcgggtcgtcgacgtccaagagctcggtggagtggcagagctcgacggtgaccaaggactcggagacggagtaccccttctcgtgctcgtcgcgccggagctccgcgcggtgggagccgtacacgctcttccgcaagtacgacgaggacatggtctacttccaccgggtcggcgcccagaagctcaccgaaacagagtcattcaggtccatcaagtaccagccgcggtcggtgtcggagaggatcgtgcacaagctgacgccgagctggccgagcacccgcatcgtcggcctgcgggacccgtacccggagctggagcgcgcgtacgtggcgcaggtgtgcctcacgtgggaggccctgaactggaactacaccagcttccggcggcacaacggcagcgacgacggcagcgtcgcggcgcggtgctgcccggcgcgcgtggcgcaggagttccagcagttccaggtgctgctgcaccgcttcgtcgagaacgagccgtacgagcacggccggcggccggaggtgtacgcgcggacgaagaactccacgcccaagctactcctcgtcccggagttcagagacgaggatgacgagaaggatgatctgatatcggcggtccagttcctgcttatactggaggagtccatcaggacgttcatggcgttcctccgcgccgacaagaggagccactacgagatgttcagggagacggtgaagaggagggcgagcgccatggaccagacgccggtcgtcacactcaagaaagccaacaagaaaaagaagagccggctcaaggacctgacgcggccgcggcggtgcctcaggaggacgaggctgaggcagcaggaggagctgtccatcctactgggcctgatcgacctcaaggtggtggcgcgggtgctgcgcatgccggagatcaccgaccagcagctgcactggtgcgaggagaagatgaacatggtcaggatcgatctggtgggcaagatgcagagggattctgcacctcttttctaccctgcacattgacacggacgtggtgatgctgccgccgctgctgctgttggagaacagtcttgtctgataatcttctagtagctcttttctttcttcgtgtcttcttttgtccaagatatgtagtgggagaagagaaccaaaggtaaagttgcactgcattgacatgagaatgtgcatggcacttagcctgatttactagtactgtaaaaagggagatcacggatgatgttattgtaaaggcacatacatatatatactagagtagtaatactaaataagtaagtaaaatatataaataagagacacacatcttgtaatcggacgcatgt

SEQ ID NO: 110591 - DNA, 608 bp, Zea Mays
ttggagtgccagacaagcatatctggaaattctccccgacaggccaatactcttcaaagtcggcttatgatatgttatttcttggttccacttctttgggagcatatgagcgcatttgggaatcttgggcaccttcaaagtgcagtttcttcctttggcttgtcatgcacaacagttgctggaccgcagaccgtcttgctagaagggggctaccccaccccagtgtgtgccccctttgcgaccaagaagaggaaacaatacaacatcttctcatctcttgcgtctttgcacgacagttctggtattccttgttaagcaggtctgggttgcctaacctttcaccagataatgctagttgcggccttgatgactggtggagcagagctgtggagaagattccccgtgatctccaatccggcttcaattctctagttattcttggcgcttggagcctttggcgtcatcgcaacgactgcgtgtttaatgggagatcggcaagcctggcgagtgctctcaccctcgctggcgatgagctcaggatgtggtgtagtgccggggcaaaagggttgaacctgctttcaactcttatgtttatgcttgacccaggg

SEQ ID NO: 110592 - DNA, 480 bp, Zea Mays
ctcggaagcctttgtttccttggaaaaaatgtggtcccccagttggatttgatgactgatctcctgggtactcatacagttcctagagtatgctttctcattcatgcttaatgttcaactaaactgttccaaatggcaagcattgatccttttgctactatatgttcggaatgagagggcaaggaggtacttgagtagcatgaggaaaaacaaccattattataccttaaaattcacaagtgatgtttctgttgccattgatgtacaatcaggcactggctgatccatattttaaaggtcttgcaaaagcagagagagaaccctcgtgccagccaataacataaatggagttagagtttgagcgaacaaaggtgaccaaagagggtgccaaggaacttatactgatggagattggagtatcatcgtcctcaacttctcaaggatcacatgaatggaactgagaaaacaaactttatatat

SEQ ID NO: 110593 - DNA, 2585 bp, Zea Mays
gtcctcgtctctctcacagctgctttcttccttcctgttcctgctcgtcgcctctcgaaagccaggaggagtctcgcctccccctcctcgcgcgcgtgggcagctatggcgatggacgacctcgcgggcgcctcctcctcctcctccatggcggcggccgcctcctccgacccctcgcacggctggcagacggtgtcgtatcccaagcgcaaccgcaagcaggcgcagccgccccgcaccacggcgcccgatctggcgctgcagtccaacggcaagcctggcggcgtcttcgacgccgtcgagaagcgctcccaggagcgccaccgcgcgctgcagcagcagctcgcctccagggcggccgacctcgacgacgcgcggatcgccgttgccacgggcgccgcctactccgacgacgacgactccgacgaggccgctgccccgcgccaggagggagaggtcaagaagcctaagaagcccaaggtgaagaagccgaaggtgacggtcgccgaggccgccgtcctgatcgacgccgagaacctcgcagcgcacctcttcgagatctcggcatcgtacgagaatcaacaggacattcagctcatgaggtttgctgattactttggccgggcatttgcagctgtgagcgcatctcaatttccatgggcaaagatgttcaaagaatcaacagtgtccaagatggttgatatcccactgtgccatatatctgaggctgtgatcaagactgtgagtgattggatcagtcaaagatcttctgatgccctgggagactttgttttgtggtgcatagatagcatcatgtctgaattgtcaggtccatcagctggccctaagggttcaaagaaggttgcacaacagtctccaagggcccaggttgcaatctttgttgttcttgccatgactttaagaagaaagcctgatgtactggtaaatgttatgccaaagataatgggaaacaataaatatctgggacaggaaaagcttcccatcattgtctgggttattgctcaggcctctcaaggtgacctagtgtctggcatgttttgctgggctcattctctatttcccacattatgtgcgaagtcaagtgggaatccccttgcaagagatttggttttgcagttgcttgaaagaattttgtctgtcaccaaagctcgttctatattattgaatggtgctgttagaaagggagaacgcttagttccccctgtttcatttgacttgttcatgagagccacatttcctgtttctaatgctcgagtgaaggctacagaaaggtttgaagcagcctacccaataatcaaggagttggctcttgccggtcctcctggctcaaaaactgtgaaacaagcatcacaacagcttttacctttgtgtgcaaaagcaatgcaagaaaacaacgcagagctcaccagggaggctgttgatgttttcatttggtgcttaactcaaaatgcagagtcttacaagcagtgggaaagaatttatcttgaaaatattgaagccagtgttgctgtcctgagcaaagttgtgattgattggagggatgtgtctcctaagctcagttctgaagctctcaaggcaacagtgaagaactttaaggctaagaatgaggctgcgctggagtccacaacagatgctggaaagcaggcatctatcaaagaagcagacaagcactgcaaggcgatctttggaaagctgacccgtggcgccacctgcctgaagagcagcctggtggtcatcgcgctcgctgttgctgctagttacgtgctgtctcctggcatggacctcgagaaggtccaggcgatggtctcatcgcacctgtcgttctaaacatacctgtccagaatctccagacgtggatctaaattatacgagccatccaaaggggatggctcactcatcagtgaagagagctcagggggtgagaataagagggggataggcgctagaaccgaaagggtacagtttcctgagttgcctttttttatttttcccgcgtctcctcgagcagcagtgcgtgggaggagacgcagtcgactttgcagggagttggttaatcggtagactgatgggtgcgaagaaggtcaagtcaaacggctcaaccagaggattaacacctttgcttttctctttctgcatctgagatgattgcaaacagttttggtttaaaaattaagaatcttgaatcgtattcggtgctgtgtgcttgtcggctaaatgtatctgttgcgttgatatccgattaaattgcgtgtgatgctgtgctcgtgtcagtgtgctgttgtcgaagatctccctttttgcaggtgtgaatgtgatgcctgaaggccttttgaaacatgttccatttttttggacgccggaggtgtgatgtctgatgttggagcgtgaagatcttttgaaatatgttgcatttccagatggtttttggacgagggagatgctggttaatttctgggtttttttatttgaggattcgatctgaatctcaagggactgtatgttatctactgtctcttggtggtgtggatactgtggatgagaaggttttccttcatgcccgatta

SEQ ID NO: 110594 - DNA, 914 bp, Zea Mays
ggggactcccccgcgtccgcttccctcgcccccccagtccccagacatggcgccctgcgcgtccccgtccgccctcgcgctctccgccagcacgcgggtcagcatcctccggctcccgctggcgctgcggcagcgggcggaggcgcgcgtgcccggcgcccagttccgcccgtcgaccgcgtgctcctgggcgcgccccttgctgcccgagctcgcgggggcggtccctcgtgccggcgcccgcggcactggcaggaggacgcagccgctgttccggcctcgcgcattgacgacgacgtctcagattgccagctgcgccttcaccctgggcacggtcgccgtcctccccttctacaccctcatggtcgtcgcccccaacgccgacatcaccaaacgcaccgtggagagcggcgctccctacgtcgccctgggcctcctctacgcctacctgctctacctgtcctggacccccgacaccctgcgcgccatgttcgctagcaagtactggctccctgagttggcgggcatcgtgaggatgttcgcgagcgagatgaccgtcgcctccgcgtggatccacctcctagcagtcgacctcttcgcggcaaggtcaggcacgcaccactgaaccaaccaaccaaccaagtagcagtgctgggactgagggggacgcgtcgcgcgttttggtttgggtttgcaatgcaggcaggtgtaccacgacggcctcaggaacaacgtcgagaccaggcactctgtctcgctgtgcctgctcttctgcccggttgggatcctggctcatgtgctgaccaaggtactggcaggggcagttgcccgctcacactgatgattgcaattgggtggttgtattgtatctaggattcttccattgttaccatgtggagatgtggattgagcgg

SEQ ID NO: 110595 - DNA, 824 bp, Zea Mays
gggactcccccgcgtccgcttccctcgcccccccagtccccagacatggcgccctgcgcgtccccgtccgccctcgcgctctccgccagcacgcgggtcagcatcctccggctcccgctggcgctgcggcagcgggcggaggcgcgcgtgcccggcgcccagttccgcccgtcgaccgcgtgctcctgggcgcgccccttgctgcccgagctcgcgggggcggtccctcgtgccggcgcccgcggcactggcaggaggacgcagccgctgttccggcctcgcgcattgacgacgacgtctcagattgccagctgcgccttcaccctgggcacggtcgccgtcctccccttctacaccctcatggtcgtcgcccccaacgccgacatcaccaaacgcaccgtggagagcggcgctccctacgtcgccctgggcctcctctacgcctacctgctctacctgtcctggacccccgacaccctgcgcgccatgttcgctagcaagtactggctccctgagttggcgggcatcgtgaggatgttcgcgagcgagatgaccgtcgcctccgcgtggatccacctcctagcagtcgacctcttcgcggcaaggcaggtgtaccacgacggcctcaggaacaacgtcgagaccaggcactctgtctcgctgtgcctgctcttctgcccggttgggatcctggctcatgtgctgaccaaggtactggcaggggcagttgcccgctcacactgatgattgcaattgggtggttgtattgtatctaggattcttccattgttaccatgtggagatgtggattgagcggaattgat

SEQ ID NO: 110596 - DNA, 1235 bp, Zea Mays
aaacggacgcagattgccgttcatgatccggctctttaaaataacgcagtagaaacggagagcgatctgaacacggtctgcagatttcaacgaggtgtggtgtgagcgcgatgagcgttcatggcccgtaatccgacgggatatccgacatttgtgccgtatccagcgcatgccgacaatccgtccggagatccctctccctctctctcatggcattcatgttttaaaccaaccaagccgcctctgctgctccgatccgtctccctctgttccagcagtcaggatggaggccgccgcaacacttccgccgctgctgctcctcatcctccttgctgcgactgcggtgccggctccgtcgcacgcatggggagtcgacggccatctcatggtctgccagatcgcacagggccgtctgagtggcgcggcggccgcggcggtgaaggacctgctgccgtcctacgccggcaacaacctgagcagcctctgctcctgggcggacgacgtcaagttcaggtacccctggtcgtcgccgctccactacatcgacacccccgacggcctctgcacctaccgctacgacagggactgcaaggacgaggacggcgtcgagggccggtgcgtcgcgggcgccatcaacaactacacctcccagctcctcgcctaccggagatcttcacccactgagtataacctaacgcaagcgctcctcttcctctcgcacttcatcggagacatacaccagccacttcacgtggggttcacctccgacaaaggagggaacaccattgacgtccactggtacacaaggaagactgttctacaccatgtttgggacgccagcatcatccagacggccgaagatgacttctacggcgacagcgtagccgggtatatcgacaccctgaagaaaaatataacgcagggagaatggtcggagcaagtgtctagctgggaagcgtgcggtacgaaccagactgcatgtccagacatatatgcgtctgagagcgtcgctgcagcatgcgactgggcgtacaagggagtcgaggaagactcaaccctagaagatccctatttctccagcaggctgccggtagtcagcctgaggctagcgcaaggcggcgtcagattagccgccactctgaacaggatttttggataatggtggagtacatttactatacatggaactattatggaattaaatgatatatataactattggtttctcagcaaaa

SEQ ID NO: 110597 - DNA, 1655 bp, Zea Mays
ctcctctcatcaactcatcgtgttcttcttttccaatccctacactgcttgctagttgctacacacacccactgatgacccacaactttaaaggtgtagctgtgatatctagtgctagtgcatggctatatatatacgcgtctataagtagtaggttgcaccctccaaggggttcatcattcattccctcacccccttcccttagaagctgcaggtgcagtgcatgcaaggagacaggccacgatactgtctgagatggaaggggccatgacgacgagaagcaagcatcgtcgtcatgaggaggaccaggagatgacgatggtggagctgaggagaggcccctggacgctcgaggaagacaacctcctcatgaactacattgcttgccacggcgagggccgctggaatctcctggcccgctgctccgggctgaagaggaccggcaagagctgccggctgaggtggctcaactacctcaagccggacatcaagcgcggcaacctggcgccggaggagcagctcctcatcctggagctccactccaagtgggggaaccggtggtccaggatagcgcagcacctgccggggcggaccgacaacgagatcaagaactactggcggacgcgggtgcagaagcaggcgcggcagctgcgcgtggacgccaacagcgccgtgttccgcgacgccgtccgctgctactggatgccgcgcctgctcgagaagacgatggccgccgccgcggcatccacgtccggcgaagtgctgctgccgccgctaccgccgccgccgcaactgcacccctcgcgcgtcgccggcttattggcctcttcctcctcgtcgccagtccagcgggacaccagcgacagcgactacctgccgcagcggtaccaccaccaccccgtcgacccgagcccgagcgcgtcgtcgacggtttcctcgtcggccgcgctcgcgccggtgccctgcttctccgaactgagctgggtcgaccagtacgggtacggcccttattacagttacggcgccaacctcgacgacggcgccggcgtgttcgacgactcggcagcgctggaggaaggcctcggcctggacgcgctggacctgggtccggccgacgacagcgacgtcgcccactcggacgcgacgctgctggactacctcaactccgcgtgcgccggcggcggcaccatgatgatggctgtgacgggcggcggcggcggcgtccaaagcagcggctgcggcgccacgggaggtgccgacgccgactaccggccgtcgccgtgcacgtggcggacggacgagctcggcgatcctcgtcagcatcaatggggaggaggaatctagaagcaatcaaagagagcttgcttctcggcacgtctctctctctctctccctctccctctccctcccaaagcgacgatcgatcgatcgagatgtcacactagttaattagtggatcggagctagatagcaggtagcaagatgcgtgagtggcgataaaaaaacattaggggccgggggcggggccgggcatattctgctgttaattcgaccgatcattcgttcgatcgtgtagtagagatgtgtggtttgatgtcgtataattcgcgtacgtacaatcgtactacatgcatgttcatttgggtattaatcca

SEQ ID NO: 110598 - DNA, 535 bp, Zea Mays
caaggcatctttacagtaaatcatcaagatatgaaagtaaccagtttattcttttatcagcacgtagccctccctatacattagtatatgagaccttttgctaactaatcatttcatttcacgtatatttcttagctgggaaaacttccctacaattacagtgtagtccactttacgacaactgcaaaaatcctcattccctacaattacagtgttagctgaagaatctgctgtttaccccagccctgtacagctgcacagactcggggccacacgcagagatcttaacctcggtgtacgcggggacgaagaaaacatcaccttcctctgctttctccccatctgacataaaatccaattgaatctcgccttccccggtgattacgagaaagatggatggacctggtaccggggatatgacgaccagtccacctggaggcaccaagcaccaatccacctcaaactcattaaatggaggtgtgtagcgccttacgtgtggctgcacaggaactcctcgcaaaatttcagggaaacc

SEQ ID NO: 110599 - DNA, 90 bp, Zea Mays
ctgcttgtatgttagcattgagcagagagtttgcacatctctgtatttaggtgtcaaaccagcacgtacaacattatctgaagtggccat

SEQ ID NO: 110600 - DNA, 143 bp, Zea Mays
gtaaactaatctcgtgccataaagaccaaaccaaacacgtagtaaatttttacactataaagtttaaggatcggatcagattaaaatcaagttttatttctattaatttttaaactaaaatttatttagagctccaaaaaaaa

SEQ ID NO: 110601 - DNA, 847 bp, Zea Mays
tggccgccttttttggtattagggcgccgaccgccctgctggtgctgctgctgcgaaccaccaacattagctaggagggcagcagcagcacgcgtcttctcgtcgttccgcagccgcagctctttgaggagtagctgatggcgtgcggtggcgagggtgaggggctgctgtccggcgatgttgtcggcgacgccggagtagacctcgttaagtccacgcagcaggttgaggacgaggttgggctcagatacgggctgcccaacgtcgcgtagttcgtcggccttctccttcatgcgaacgcagtaggcgtcaatggacaggtcccctgagtcatcgagtgaaactcgtgattcaggaagatggcgcggggagctttgtttgcctggaacacctcgccgatggccttccaaagggcgctcgcagtctgggtgctgtcggtcatggcgaggttgaggacggcgtcggaggtggtgctgtacatccatccgcggacgcagaagtcagcctgtgcccatgccgcatcggtggggcgcgaggtggagaggtgatgcagcagcccaaatttcccacacgtggcctgaaacgtcgtcgaccacttggtgtagttggaaggtttcaactccagggtcatggggacgtggagcttgatgttgatggtggcaaaggggcagaggacaggagcagaatcggcagcatcggagatggtgctcatggcgcagggaaggggaaggagagggcagacggcgcggtctggttaaggcggcgcggctggaggagagaaggtgagggggggggggttgggaaattagatcgatgcctgggtctctgataccatgtagagaaacag

SEQ ID NO: 110602 - DNA, 161 bp, Zea Mays
ttctttatatatcttcatttatagtctcttttaaaagttctcttctttatatctcgtttttcccaataagaagactgtatcgtccaaaagtaaagacatattttattttattttgtatacctaagtaatctatagtaaattaaacataggtctgaagtcgt

SEQ ID NO: 110603 - DNA, 138 bp, Zea Mays
ttttcttatttctattttgttattaatttctttcgttttttattttaaattcaaatacaatttgatcaccaatattaaatgcacaatcttaaaaaaatactcaacatgaaatacatggttcattatattttatatatc

SEQ ID NO: 110604 - DNA, 252 bp, Zea Mays
gggttaaaggtgattgggccaatgggaagatggatctgagcggatcgggatcccctgcagtactgcatgggccactgccgcgtgggctccgcgtgcgacagggcccacgcgcagtgacccaactgcacggtgcagtacgtcagaggatccgtgtccgatctgagcgcatgtggtttctgtttttttaattcttttctaattcaatccaaattacaaatttaaatctgttttgaaatttacacaaaagttaac

SEQ ID NO: 110605 - DNA, 796 bp, Zea Mays
tgtggagggacacccaatgcaacatgcaaaacaacaacaaaatcttgcttattggcgcctgatgatttattttattccatctcgactgggaagggacacccaatcaaacatacaaaacaacaacaagagctagcttattggtgtggctgcctgcttgtagcaaggcggacggacggaggaacatggaaggatccatcggctgtgccgctgtggcgcgcggccatggtggaattggatgagtctctagtggatcttgcagccgcagttttcggggaggaagtcgcggcacctgtacttgatggcccccttgtccgtggacacggggacgcagttcttgcaggtggcggcgcacttggtgaggaggtcgtcgcaggtccacacgcccgaccagctggtgcactcgccgcaccagcactgcttcttcgtcgtcggccctgcgcgcagcagcatgatgcgtacttgctttatttcgtcacaccccgcacacatatatatacgcgaagatgaactgtatacaaacgagctagcagcgtccaatcaagctagtagccagctagatgaaatctcggcaagcacgacgtacctgcaggtcctttggccacggccgcagagaccagaagggcctggagaactaggatcgccaacagagtgctgctcttcatcttctcgacctctcgctctaccaccgcttgctgccgacctctactacaagaacgcaagcttcgagttcgtcactgctgagatgagaagcacacgtaactaggtactcaatatataggccgggtgtgtcctgatc

SEQ ID NO: 110606 - DNA, 719 bp, Zea Mays
gcaaaacaacaacaaaatcttgcttattggcgcctgatgatttattttattccatctcgactgggaagggacacccaatcaaacatacaaaacaacaacaagagctagcttattggtgtggctgcctgcttgtagcaaggcggacggacggaggaacatggaaggatccatcggctgtgccgctgtggcgcgcggccatggtggaattggatgagtctctagtggatcttgcagccgcagttttcggggaggaagtcgcggcacctgtacttgatggcccccttgtccgtggacacggggacgcagttcttgcaggtggcggcgcacttggtgaggaggtcgtcgcaggtccacacgcccgaccagctggtgcactcgccgcaccagcactgcttcttcgtcgtcggccctgcgcgcagcagcatgatgcgtacttgctttatttcgtcacaccccgcacacatatatatacgcgaagatgaactgtatacaaacgagctagcagcgtccaatcaagctagtagccagctagatgaaatctcggcaagcacgacgtacctgcaggtcctttggccacggccgcagagaccagaagggcctggagaactaggatcgccaacagagtgctgctcttcatcttctcgacctctcgctctaccaccgcttgctgccgacctctactacaagaacgcaagcttcgagttcgtcactgctgagat

SEQ ID NO: 110607 - DNA, 670 bp, Zea Mays
ctctctattgatttatctgtacacaagcttctagagccgatccacacgtctccctaatcctctccccacacaaacattatcttcatcccacacgtcaccctctcttcttgagagcatgccgccccatctcctttcccccatggcacccatctcttccctgctgcttctcctggccgagctgctccaccatccgctactgctccaaaactcagtgccgaccaccatctcccatggcgcaggagctccccatcctcctcttgccagggcgccgttgctgagctcgccctgcccccagccatggacgtcgtcaggccacctgtttcctatcttccatggacgccaatagcagcagcccactccttttgttctccatggatgaaagcccaagcatctgcgcctcccctaggtttttgtacaatcgcagcagcacgtcggacctttgcaaccccggtgagaccagctgcttgcgctatgtttattccccaccaattcctatatttgattatttactgtgtatgtttgtgtgtttgtggtggaggtaaatcctaggaaatttagatgagaagaaagctttagcgagacgcttgccaagtgcttggtgaatcgcctcaaccggatgtggttgtcgatctcgcggagtcgagtcgagtttagtcgtggtaagtcgatc

SEQ ID NO: 110608 - DNA, 247 bp, Zea Mays
atggatggtaatgatgatgacaccatgtctattgattggagtagctttattattgagaatgctgaaaataaggataatggggagacgggtgatatgtttagaatctgtgatgaggatgagatgtatgcgttcttgggacttggagatgaggatgaggagatgaaccgaacccacccggaaccaagttaccatcctagtgaatgagcataaatgtgcttcaagcagccggattagttatgggaatgcc

SEQ ID NO: 110609 - DNA, 248 bp, Zea Mays
cggtgtcagcggcttcccttcccgcctctcgctggtcgcctcgcgccctcgcctccggtcctccgcgcaccggccggtgaccctacgtgcgtgcctctctctctttctcctctcgcctctggtggatcgtcaatggctcccggccgcggcggctgcgccacacgccgcgcgcggcctgagggcagcgggagccagcagccgctactccaccaaggcggtcgcgccgctttgggggcgcttatgcccca

SEQ ID NO: 110610 - DNA, 270 bp, Zea Mays
aatgaggacaaacactatgtggacatgcagtgggctttgttcttctatgagtgcggtgtacctttcaatgctgcagcacctaggcagtttcagattgcaattgaggccacaacacagtttggttcagggtataagcctccaacaccttaccaactaggcgagccattgctacaagaggctgtgaagtcaacaaatacaatgagggaggaacatgagcatgcatggaaacactatggttgcacactcatgtctgatggatggtctgatagg

SEQ ID NO: 110611 - DNA, 1260 bp, Zea Mays
ctggacaaagcatgtttctgtatgaggtttcttgcttacatattattaaacaatgttctggcagggtacaggtggaaaaaagtgggtcaaaaaggtacaacaggaatggagcatacttgagaagaacctaccagactatatttatgtcagggtatttgaggatcgcatggatctcttgagagccgtgattgttggagcaagtggaacaccctaccaagatggccttttcttctttgatttccaccttccacttgagtatccgctagtccctccgtcagcatactatcattctggtggtttgcgtgtaaatccaaacctgtatgtggacgggaaggtttgcttgagtctcttaaatacctggactggcagagggaacgaagtttgggatccatcatcatcaagtattctccaagtactagtttcacttcagggattggttctcaatgaaaaaccctattttaatgaggctgggtatgagaagcaagttggtactgttgaaggggagaagaatgcagtgccgtataatgagaatacgtacctgctgagcgtgaaatccatgctgtatatattgagacggcctcctttgcattttgaggattttgtgaagagccacttccgcaagcgtggtcactacatccttaaagcttgccacgcctatttgcaaggaaatgttgttggcactctcaccgacgacgcgtgcaccaccgacagaagcaaagagcactcgagctctgttggcttcaagcttgtactagcaaagattttaccacggttgattacagccctgaaggacactggagctgactgcgaccaatacgagcacctcgggagaacagaaaccgttacagaaagctgatcattgagtgatttgtacttgattcttttgctttttctctgttttttggggtttcagaaagatggtgacttcaccaccaggctgttttcctataaatgtacattcaaagtttgttgtttcagtcaaacatttggaaaatttggcccaaatgatttagggggggggggggggggggtttgaagtcactagagataatagttagttagctaaaaattgttagtgttattagctagctaactattaccaaatttgctaaaagtatctaatatctaaactattagttagactgtttggatgtcttggctaattttagcagctaactaatagttttagtgcatttaaacacctcttattcgttacatggaactgaactacactgtacagctgatgtttggttaaacttg

SEQ ID NO: 110612 - DNA, 631 bp, Zea Mays
agccttttgtcccaagcacgttggggtaggctagagatgaaaccccgtatgaaaacctcagagctcaacccccaaagaaaacaggggagacaaaggcaaaggagaaccgaaaatgacgaaacgggggaacacataaaagagataaaacccacaataaccagcaaggtctaaatgggcacaagaaaaggtcaaacgattaaggaggaaaagcggaactataaatcaaggttctggcacgtgaattgcacacttccaccccttcctatccacgacgagctctttatcaatattccactccttcaggtccctcttcactgcctctgtccacgtcaaggttggtcgacctctacctctcttcacattctcgggactcctaattattccgatatgcactggtgcctcttcaggtcttcgttggatatgtccaaaccatctcaaacgatgttgcataagcttctcctcaattggcgccactcctactctctctcgtatgtcatcattccggactcggtctctccttgtgtggccacatatccagcgcaacatacgcatctctgccacacacagttgttggacatgtcgtcttttagtgggccaacattctgctccatacaacatagccggccggata

SEQ ID NO: 110613 - DNA, 2074 bp, Zea Mays
agccggccgggcgacatggtagccgccagagcacaactcgccgctcttctcctcctcgtcgccgccgtctgctctgccaccgggttcaggccgggcgggggcggcccgccgtcggtaacggaggacacccttgagaaggtggccgcctcgctggaaatgtacgtcgacgcgctccctcagatgcctaaggtcctcggctactccatcaagcacggccgccccacgccgactcacctcaccatcgggatgtaccagaaaaagtggaaattccaccgggacctgccgccgacgaccgtgttcgtgttcggcacgtcggtggagagcgcgaccttcccagggcccaccatcgaggcgctgcagggggtcccgctgcaggtgacgtgggacaaccacctccccgaccgccacatcctgccgtgggaccccacggtgcccaccgccatccccaggggcggcggcgtccccacggccgtccacctccacggcggcgtccacccgccgcagtccgacggccacgcctacgcctggttcaccgcgggcttccgggagaggggccccgcgtggacgacgcccacgtacgcgtacccgaacgtgcagtcgcccggcggcgcgctctggtaccacgaccacgcgctcggcctcacgcgcgccaacctcctcgcgggcctcctcggcgcctacgtcgtccggaacccggcggcggaggcgccgctcggcctcccccgcggcgacgccttcgaccgggtgctcgtgctcgcagaccgcagcttctacgccgacggctcgctctacatgaaccgcaccggcgacaacccgggcgtccacccgcagtggcagcccgagtacttcggggaggccgtcaccgtcaacggcaaggcctggccgttcctccgcgtcgcgcgccgccgctaccgcttccgcgtcatcaacgccagcaacgcgcgcttcttcaacctctccctgtccgcctcctccgacggcctgagcctgagcctgatcccgctccacgtcgtcggctccgacaccagctacctgccccggccggtcgccgtgacgcacctcctcgtcgccgcggccgaggcgttcgacgtcgtcgtcgatttctccgagtgcgcggcccccgaggcggagctcgtcaacacggcgccgtacccgtaccccgacggcgacgcgccgaaccacctcaacggcaaggtgatgaagttcgtcgtcgagccggcgagggtgcgggacgacgacgacgactcgagggtgccggcgcggctgctggactacgtcaaggtcgccgaggaggacgcggcgcggaggcggtacatcgtgttgtacgagtacgaggacgaggcgacgggcgacccgacgcacctgtacatcaacgggaagcggctggaggacccggcgacggagacgcctcggccgggctccacggaggtgtgggaggtgatcaacctcacgcaggacaaccacccgctgcacctccacctggccacgttccaagccgtgcgcgcgcgggagctcgacggcctggaggagttcaagcactgcatggagaggctcaacgacgcggtccgctgcgacgtgggccggcacgccgtgggggaggaggtggccgtgccggagcacgagaggacgtggaagaacgtcgtcaagatcgcgccggggttcatgaccacggtggtcgtcaagttcctcatggtagacaccggcaggagctacccgttcgacgccacggccgagccaggatacgtctaccattgccacattttggatcatgaggacaacgccatgattcggccgttgaaactgatcaaatgatcgatgattcgtccactacttgggctacagaatttcactggaaatagctcattcgtttcaagagaaaaaatgcggttagccaaacactaagttaagcaaccgaaatgtaaaatggcttcagctgttatcagactatacaaaaggcaacaatgttctttaaatctttagagatgtaaaaagctaaagtagaggaaatacatacaaaggccaacatacactgttgttatatatttggattcctaaatgcaatccaaatgaagga

SEQ ID NO: 110614 - DNA, 370 bp, Zea Mays
attttatgaagaaataatggtcgaagcccttttctaagtcacataaaataatgataataagaatttgacacattttacttagcaagacaaatgtttgatgtattatttattgcattttttgctagaggaagcagtgaccgacgttccagaagccttagctccaaagaagggcaggagcccgacctctcggagatagaaccttcgtgttacgagagcttcgacgaaggcaagttcattctacccttttttgaaaggtcaagagggggaacccctactgtaaaattttaataataatgtaaaattacaatgcgacgtgagtacaagagatagatatgagctgggaaggtctagctaggaagctaagaagaag

SEQ ID NO: 110615 - DNA, 1127 bp, Zea Mays
gcgtgcgctggctgcttttggccaccgatacgctgcgtcggcgctccaaagttccaggaaatcaaaatgccatagtttcacgggatagacggatcagcttggtctggggatgtcgtcaggttcctgtgcttttttcccaatatctttgcttccgccagatcctagatccagtgtctttcgtcggctggctttgtttgcgccgctgaagaacaacaatagtcagccaatatctagtccaaagtccaagcgccgccttaagtttagttggttcaccatgcagcgtggatggacggtcaatttcttcgtccgtcgcccaaccggcagcaacacatacgcgatgatttgattggttccttgtgtcctaaatgaaggtcaggagaggctagagttccaaatcgtagttcgtgtgaaccagtgtgaaccagttgaatctcatcaatcttatcaagtcatctaataaaaaaaggtttcattttttcccaaaaaatagtgcatctgatctttccattaatatatagtgttgtatttagacgttcatatagttccctactgcatttaactcatccataagctagatgcatctatgaatctatttataaattgctgctactatttttttccattgcataaatataaagatgctttcttcatatttacccatgtctgtcatcatgcggtaattgactaattccttatgtacaggtttcttcgtatttacccatacctctcatcacatgatcattttattactctgatgtatgtcctgtttattacaaaggaatagataaatattaggtcagtagtaactatttccttcagcaatttcatttacaacatcagccacaaatttctgaaattgtgtgcaagcatcccaagtgagaataactgttttaggatgcctaggctcttatgaaaattagtttgtctgaacatgcattcataaatgatgttcagtgaagtatctgcacaatacatatagagactttagcctgacgtgaaaaggctaaatcagttttgttagttgcatgtatgcttcaaagttctataagctataactaaagagatttggacagcaagctgtcgtactaaataaactcacatgttttctgtttgccggaactattctc

SEQ ID NO: 110616 - DNA, 613 bp, Zea Mays
ctccaccacctggccgcccaccctccacctctcgtgcttcccggacgccgcggccgccgagacgagggccaggagcaggagccaccgagcagtcgtcgccaccgccataaaccaaactaactaaggcagctagaatctctgctttgagttcttccccgtcaccgcacgggctgcgatctctgctttttttggttccccaatcccattccgtgtcctcatgctgccattttggggttcaaggaaatcaaaatgccatagtttcacgggatagacggatcagcttggtctggggatgtcgtcagcgtggatggacggtcaatttcttcgtccgtcgcccaaccggcagcaacacatacgcgatgatttgattggttccttgtgtcctaaatgaaggcaggtcaggagaggctagagttccaaatcgtagttcgtgtgaaccagtgtgaaccagttgaatctcatcaatcttatcaagtcatctaataaaaaaaggttcgacgcgtcttagagttctacgatgcatccaagaattcagagaacgttgacaaatatatagatcagctgaccaacaatgaattgtcatcaccacccaaaaagatgaagcacacccagg

SEQ ID NO: 110617 - DNA, 740 bp, Zea Mays
atcagcctccggatcaattcttcttcccctttcctcgatcccctttgtgcactgttcactttcttgcctgagagatcagctcctgagccgaccccatccccatggctgcttcttcttccctctccctcccagcaacgccggccgcgctccggcacggggcgtgccacggacgaccagcgctaccgaggaggtcgccggtggcgacgacgacaacgcggtgcgccgcgttacgccgggacgcgagcggcggccgggaccagtacggaggcgcgctggtggacgagggcatgtccgtgctgaggcggcggatccgggaggcgcggatggcggagaccaactacgaggctcccgccgagtgggcgccgtgggagaagcgctactaccccgcctacgtctccgacgtgtccagcctcgtcggcgcgctgcagctgatactcatgggcaccaggcccggcgtcgccgtggccgtcgtcgcgctggtgctcgccagcgtgcccgtgtccgccttcgccgcgctgcaccagctgacgctggtggtcgaggccgtcctccagtccgtgtccgtccatcacatttcttgatccagtcagaccatctttttgcttttattttagccttgaggcagcctgccacgtgtatagtagtggaggcttgtagttgtagcagttcgtcttcagctgatatcaagattctttagtgttgacacataataacagttcattttacaatgctcaattttt

SEQ ID NO: 110618 - DNA, 136 bp, Zea Mays
gtatttcccatggtagacgaaccatttaaggttagtttgagagccacaaaaccggaggggttaaaggggctaaaatctccttattcaattttgaataagaaatggattttaactcctccaaccccctctgatattt

SEQ ID NO: 110619 - DNA, 106 bp, Zea Mays
gtacatccactcacggtcctccatcctataacaggaaatttcggcagcacctcccctgcacggggaggtttcgaaatcctgcaaattaaattttcagcacgatggc

SEQ ID NO: 110620 - DNA, 2188 bp, Zea Mays
cgcaggcactagtggcgtggcgcgccgcgacagtgtcactagtagcggtggaccggtggtctctcccctccccggctccccctcgtccgtctccctcccacccttccgcgctcccgccgtttcccaggggccagggccgacccacaccgcgccgggatccctagatgcggccggggcggcgccgcgagccgtgagcgcggttcctgccgtggcgatgggtttccgcgccgcctccgccgccgccgctgccgcggtggccgtgtttgcggcggcggggctggcggtcaccgccgcttcctccggtgactcgctcgccgacctcggaggcgcggcgagggagatcgaaagcgcaccagaggtcaagaatctgggaccatgggcaaaggggctgctgaaaggcatgccgcaggcagcggcgggaccggcagccatggcgcctgttgcgaagtatccgctggttctggcagaggaccggacgcggcggccggatgttctcaggcatctcaaagtgtatgaaggagggtggaacgtcaccaataagcactactgggcgtctgtttcattcacaggtgtttctggatttcttctcggtgctttgtggttcatatttttcgggatagctgtggctggacgatgctattttggaacaagaatgtccaaaagaaaggtttcttatgcagatgtagtaggtcctgtgttgcttggggtcttcacacttgctataatagctgggtgcattctccttctgtatgggcagagtaaattccatgaagaagctacgcggaccgtcgattttgttgtgaaccaatctgatttcactattcagacactaaggaatgttacagaatacttgtcatttgcacagacgatcactgtggcagcactctatcttccatcagaagttcaaggtcaaattgacagtttgaaaggggatttgaacaaagcagctgacacaatatctgtgaagacagcagaaaattacaaaatgataagaaaagttctccatatcatgtcagttgtattgatttgcatagccgtggtgctgcttgttcttgtgttccttggatacggcctagagaagtatggaccgagatatacagtttacatatttgttaccttatgctggaaagctgtggcggctctctttatccttctagggattttcctgatactaaacagcgctgcgcaggatacctgcgaagcaatggaccagtgggcccagcaccctcaggcagagacagctctgagcagcatccttccgtgtgtggatgagagcacgaccaaccgaacgctgtaccagagcaaagaggtggtggtgaggcttgtggggatagtgaacagagctatctccgctctttcaaatcgaaggccgcatcacaagcacccaggacagttcatgccttacctgtgctcgccctacgactcaaacctcaacgaccgaccgtgcaagtatagggaggccacgtttgaaaacgcgacgacagcatggttgaactacacgtgcatggctcaagacacggacttgtgctcaggcaacaagaccttaacctacgacatctacggccaactcgtgctggctgcaaacgtgagctacgcgctgtaccactacgcccccttcctgctgaacctccaggactgcaagttcgtccgggccaccttcagcgccatcgcctcgcggtactgccctcctctggggcacgacctcgtgctggtctccgcgggtctggcgctcattgcctcggcctttgttctctgcctcgtctggatgctcttcgcggaccgcccccgaagggaggaggtgtccgatctggcgtcggggtcgaggatcgcgccggtagacagctctccgtcgtagaagcaagcaagcaagcaagcggcgcaacgggatgtctatgactatgagtgaggctgcttggtcgcatggtgaccagagtttagtacagttcccttccatggctatgtaaaatagtttcggtatagcgagttccgggagacgtcgttgaagtgcggagaggagggggagaaaccggaagcacttcgggtgggggacaaaaggccccattttgcagtggagagagttaggtggaaacgagtgctctgcttccttctatcgtatgtcagatcgatgcacccatggtgtatgttgctgcaaggacaaacggaataatcgatcagggttcccatgacc

SEQ ID NO: 110621 - DNA, 700 bp, Zea Mays
tccgccgcgtcacggaacctcctcgatggtgtccagcaccggctgccacgaccggtggcgcctcaacccgccgccgctcgacttgcctgcggggcctgcgcgtacttcatgtttcttagtactatccgcgccctgcagaccggcggtctcgagcagcccgagcatcgggtacaccctggcgccatcgctgctgcaggcctcgtccttcgcgtggccccggccccggcccccggtcgcgctccggctgccgcggcgggtggacgtggtgatcctcttccaggaggaggcggcgtgggagtgggactcggagagcgcggccatctcgtcgtcggtgagcacggagtagagcatgtccatgggcaggaggaagtaggcgtggcgcgggcggaggagctcggcggcggccacgccggggacgcggcagccgaccgcgaggcggctggagtcgcagacgaaccggcccgggtggtggagcatgagctccgacgcgcgcaccgggcgcgccagccgggtgacggtgccgtccgcgtggatcacctcggtggctgcgctggtcgccgccgccgaggcgccgccccccgcgggcgccagcggtatgcacgacggcgtgttccccatggacacgcacgcacgcacaccaactggaacgcgcgcagccaggggcagagggggtgggggtggggaggggtcgagaggtcgg

SEQ ID NO: 110622 - DNA, 2398 bp, Zea Mays
gacgccacgccctgcccgccggggctgcttgccactcctctctcttcctcatccatcctcgccccggccccgcccccagaaccaaaccagcctccctccccagcagctcacgagagagcgcaagcaagtattactgcgcaccgcctcgcccgcgggcgtcagcgtgaagctgccgcacagctaccccgcgaggcatggggatggacgccggcggcgggaagctgccgtacagctaccccgcccaccaggacggcaagctggtgaagagcttcagccgcgtggagccccgcaagttcggcctcgccctcgtcgcgggcttcctgctcgtcacctgcgcctacttctccaccgccaagttcgacgccatccacgtcgccatgatcagccccgtctccggcaatgcggctgggatcggcccgctagtgggcgccgccaacgccgacacctccgactccaagcagcgattagatttgggcaagcaagacccggacgacgcgctgtccaggtccgaggaggaggaggggagcagggccgacgaggtgctggagaaggacgacggcaaggcatcctcgtcgtcggggacagattccggcagcaatgcgccgctggaggacacgaggagagacgagacctttgtgggggacagcggtggtgcatcttccgcggcgggcgccaggagtgaggcggttcctgccaggcacgagcacgacgatgacgcccccgctgccgccctgcttcctcccgtgacgtcagagggagccgcgaacagcacgcaaggatcaggagttcttgaggacgaggagctgcaggtgcaggacgctgtcgccaatccttccaagaggagcaacgattcagccgccacgcgcagcagcagcagtggccgctcgccctctgtggttcactctgatcctgccatcctccctgctccctcgcagcagattgctcctgctgctcctcaagaggcagataaggctcttgctgttcagcatattccagcgatacctgaggttaagcaatcagattcggagacgccggcgcgggagtggaagccgctgtgcgacatcacctcgaaccgccgcatcgactggtgcgagctcgacggcgacgtccgcgtgctgggcgccaacgcgagcgtcacgctggtggcgccgcccggcggggcggacggccgcaccttccgcgcggagtcgtggcgcatcaagccgtacccgcgcaaggcggacccgaacgcgatgcgcgtcgtccgcgtgctgacggtgcggtcggtgcccggcgaggcgcccgcgtgcacggaccggcacggcgtcccggcgctggtgttctcggaccgcgggtacacggggaactacttccacgcgttcacggacgtgatcctgccgctgttcctgacggcgcggcagtacgccggcgaggtgcggctgctggtgacggacctccaggcgtggtgggtgggcaagttcgcgccggtgttcaggagcatctccaactacgagctggtggacctggaccgcgacccgcgcgtgcactgcttccgccacgtccaggtggggctcaccagccacgacgacttcagcatcgacccgcgccgcgcccccaacggctactccatgctggacttcaccgggttcatgcgcgccgcctacgggctcccgcgcggcgacgtcgccgccgccgctggcccgtcgtcgaagcggcggccgaggctgctgctgatcgcgcgcgcgcggacgcggcggttcgtgaacgcggaggagatcgtgcgcggcgcggagaagctcgggttcgaggtggtggtgtcggaggggacgcacgaggtggcgcccttcgcggagctggccaacagctgcgacgccatcatgggcgtgcacggcgccgggctgaccaacatggtgttcgtgccgacgggcggggtggtcatccaggtggtgccgctgggcgggctggagttcgtggcgggctacttccggggtccgtccagggacatggggctgcgctacctcgagtaccggatcacgccggaggagagcaccctgatcaaccagtacccgcgcgaccaccccatcttcacggaccccaacgggatcaagagcaagggctgggagtccctcaaggatgcctacctcgacaagcaggacgtgtcgttggacatgaagaggttccggcccacgctcaagaaggccatcgcgcacatcaggaaggccagggccaaggccaacgccggcggcggcggcaacaactaggcatcgccgtacatgtgctcattcatcctcctcttactctacttttgtttttcctcccctccttttcggattatggcagtacttgtatgtagcaagcagaaatcgatcaaatgtataatatggcagggaaagaagttagagcaaatcatatattctct

SEQ ID NO: 110623 - DNA, 2451 bp, Zea Mays
gacgccacgccctgcccgccggggctgcttgccactcctctctcttcctcatccatcctcgccccggccccgcccccagaaccaaaccagcctccctccccagcagctcacgagagagcgcaagcaagtattactgcgcaccgcctcgcccgcgggcgtcagcgtgaagctgccgcacagctaccccgcgaggcatggggatggacgccggcggcgggaagctgccgtacagctaccccgcccaccaggacggcaagctggtgaagagcttcagccgcgtggagccccgcaagttcggcctcgccctcgtcgcgggcttcctgctcgtcacctgcgcctacttctccaccgccaagttcgacgccatccacgtcgccatgacagtcagccccgtctccggcaatgcggctgggatcggcccgctagtgggcgccgccaacgccgacacctccgactccaagcagcgattagatttgggcaagcaagacccggacgacgcgctgtccaggtccgaggaggaggaggggagcagggccgacgaggtgctggagaaggacgacggcaaggcatcctcgtcgtcggggacagattccggcagcaatgcgccgctggaggacacgaggagagacgagacctttgtgggggacagcggtggtgcatcttccgcggcgggcgccaggagtgaggcggttcctgccaggcacgagcacgacgatgacgcccccgctgccgccctgcttcctcccgtgacgtcagagggagccgcgaacagcacgcaaggatcaggagttcttgaggacgaggagctgcaggtgcaggacgctgtcgccaatccttccaagaggagcaacgattcagccgccacgcgcagcagcagcagtggccgctcgccctctgtggttcactctgatcctgccatcctccctgctccctcgcagcagattgctcctgctgctcctcaagaggcagataaggctcttgctgttcagcatattccagcgatacctgaggttaagcaatcagattcggagacgccggcgcgggagtggaagccgctgtgcgacatcacctcgaaccgccgcatcgactggtgcgagctcgacggcgacgtccgcgtgctgggcgccaacgcgagcgtcacgctggtggcgccgcccggcggggcggacggccgcaccttccgcgcggagtcgtggcgcatcaagccgtacccgcgcaaggcggacccgaacgcgatgcgcgtcgtccgcgtgctgacggtgcggtcggtgcccggcgaggcgcccgcgtgcacggaccggcacggcgtcccggcgctggtgttctcggaccgcgggtacacggggaactacttccacgcgttcacggacgtgatcctgccgctgttcctgacggcgcggcagtacgccggcgaggtgcggctgctggtgacggacctccaggcgtggtgggtgggcaagttcgcgccggtgttcaggagcatctccaactacgagctggtggacctggaccgcgacccgcgcgtgcactgcttccgccacgtccaggtggggctcaccagccacgacgacttcagcatcgacccgcgccgcgcccccaacggctactccatgctggacttcaccgggttcatgcgcgccgcctacgggctcccgcgcggcgacgtcgccgccgccgctggcccgtcgtcgaagcggcggccgaggctgctgctgatcgcgcgcgcgcggacgcggcggttcgtgaacgcggaggagatcgtgcgcggcgcggagaagctcgggttcgaggtggtggtgtcggaggggacgcacgaggtggcgcccttcgcggagctggccaacagctgcgacgccatcatgggcgtgcacggcgccgggctgaccaacatggtgttcgtgccgacgggcggggtggtcatccaggtggtgccgctgggcgggctggagttcgtggcgggctacttccggggtccgtccagggacatggggctgcgctacctcgagtaccggatcacgccggaggagagcaccctgatcaaccagtacccgcgcgaccaccccatcttcacggaccccaacgggatcaagagcaagggctgggagtccctcaaggatgcctacctcgacaagcaggacgtgtcgttggacatgaagaggttccggcccacgctcaagaaggccatcgcgcacatcaggaaggccagggccaaggccaacgccggcggcggcggcaacaactaggcatcgccgtacatgtgctcattcatcctcctcttactctacttttgtttttcctcccctccttttcggattatggcagtacttgtatgtagcaagcagaaatcgatcaaatgtataatatggcagggaaagaagttagagcaaatcatatattctcttttccccccacttttcggtgagggtcaatggtggatggagagtatgatca

SEQ ID NO: 110624 - DNA, 882 bp, Zea Mays
gccacgccctgcccgccggggctgcttgccactcctctctcttcctcatccatcctcgccccggccccgcccccagaaccaaaccagcctccctccccagcagctcacgagagagcgcaagcaagtattactgcgcaccgcctcgcccgcgggcgtcagcgtgaagctgccgcacagctaccccgcgaggcatggggatggacgccggcggcgggaagctgccgtacagctaccccgcccaccaggacggcaagctggtgaagagcttcagccgcgtggagccccgcaagttcggcctcgccctcgtcgcgggcttcctgctcgtcacctgcgcctacttctccaccgccaagttcgacgccatccacgtcgccatgatcagccccgtctccggcaatgcggctgggatcggcccgctagtgggcgccgccaacgccgacacctccgactccaagcagcgattagatttgggcaagcaagacccggacgacgcgctgtccaggtccgaggaggaggaggggagcagggccgacgaggtgctggagaaggacgacggcaaggcatcctcgtcgtcggggacaggtacaccgcgcttccgtcaccggcaaggcatcgcctgttgttttttcgagattgagtggccgtccgtgcttgcccttcccttccatggaggcgtcaagctggccgccgcggccggactcgtgtgcccccgcccgccgtactcccaacgtcctgcaccgctgcacgcaaagccagccccaaaaatcagataaaaggaccggccggttttttcctccgcttccctttcccccactctataatcaatcgctttttttttcttttccctgtcatcaccagattccggcagcaatgcgccgctgg

SEQ ID NO: 110625 - DNA, 1793 bp, Zea Mays
gttcttcgcctttcttgagatgagagcaacgtgctactactaggcagcatcatcccgttccaatagctgatggattgctccatctctaggcatctcgtccgatcatactatacttttccgtagggtccggtggacggtggtctaccatgaaccttgttcaccctccgtcaagctctttttcctgctattgaaaacacacgcacgcacgcactctctcttttggagctgccttttcttgtccagccggtcattccatgattagctgacaagcaacgtgctaaactgaaattttttttaatggtcgcaagattcggagacgccggcgcgggagtggaagccgctgtgcgacatcacctcgaaccgccgcatcgactggtgcgagctcgacggcgacgtccgcgtgctgggcgccaacgcgagcgtcacgctggtggcgccgcccggcggggcggacggccgcaccttccgcgcggagtcgtggcgcatcaagccgtacccgcgcaaggcggacccgaacgcgatgcgcgtcgtccgcgtgctgacggtgcggtcggtgcccggcgaggcgcccgcgtgcacggaccggcacggcgtcccggcgctggtgttctcggaccgcgggtacacggggaactacttccacgcgttcacggacgtgatcctgccgctgttcctgacggcgcggcagtacgccggcgaggtgcggctgctggtgacggacctccaggcgtggtgggtgggcaagttcgcgccggtgttcaggagcatctccaactacgagctggtggacctggaccgcgacccgcgcgtgcactgcttccgccacgtccaggtggggctcaccagccacgacgacttcagcatcgacccgcgccgcgcccccaacggctactccatgctggacttcaccgggttcatgcgcgccgcctacgggctcccgcgcggcgacgtcgccgccgccgctggcccgtcgtcgaagcggcggccgaggctgctgctgatcgcgcgcgcgcggacgcggcggttcgtgaacgcggaggagatcgtgcgcggcgcggagaagctcgggttcgaggtggtggtgtcggaggggacgcacgaggtggcgcccttcgcggagctggccaacagctgcgacgccatcatgggcgtgcacggcgccgggctgaccaacatggtgttcgtgccgacgggcggggtggtcatccaggtggtgccgctgggcgggctggagttcgtggcgggctacttccggggtccgtccagggacatggggctgcgctacctcgagtaccggatcacgccggaggagagcaccctgatcaaccagtacccgcgcgaccaccccatcttcacggaccccaacgggatcaagagcaagggctgggagtccctcaaggatgcctacctcgacaagcaggacgtgtcgttggacatgaagaggttccggcccacgctcaagaaggccatcgcgcacatcaggaaggccagggccaaggccaacgccggcggcggcggcaacaactaggcatcgccgtacatgtgctcattcatcctcctcttactctacttttgtttttcctcccctccttttcggattatggcagtacttgtatgtagcaagcagaaatcgatcaaatgtataatatggcagggaaagaagttagagcaaatcatatattctcttttccccccacttttcggtgagggtcaatggtggatggagagtatgatcaggactgagattctcctataaacattttagatttagtttctctcgaggaaaaaaaaaa

SEQ ID NO: 110626 - DNA, 1303 bp, Zea Mays
ccatctctaggcatctcgtccgatcatactatacttttccgtagggtccggtggacggtggtctaccatgaaccttgttcaccctccgtcaagctctttttcctgctattgaaaacacacgcacgcacgcactctctcttttggagctgccttttcttgtccagccggtcattccatgattagctgacaagcaacgtgctaaactgaaattttttttaatggtcgcaagattcggagacgccggcgcgggagtggaagccgctgtgcgacatcacctcgaaccgccgcatcgactggtgcgagctcgacggcgacgtccgcgtgctgggcgccaacgcgagcgtcacgctggtggcgccgcccggcggggcggacggccgcaccttccgcgcggagtcgtggcgcatcaagccgtacccgcgcaaggcggacccgaacgcgatgcgcgtcgtccgcgtgctgacggtgcggtcggtgcccggcgaggcgcccgcgtgcacggaccggcacggcgtcccggcgctggtgttctcggaccgcgggtacacggggaactacttccacgcgttcacggacgtgatcctgccgctgttcctgacggcgcggcagtacgccggcgaggtgcggctgctgatcgcgcgcgcgcggacgcggcggttcgtgaacgcggaggagatcgtgcgcggcgcggagaagctcgggttcgaggtggtggtgtcggaggggacgcacgaggtggcgcccttcgcggagctggccaacagctgcgacgccatcatgggcgtgcacggcgccgggctgaccaacatggtgttcgtgccgacgggcggggtggtcatccaggtggtgccgctgggcgggctggagttcgtggcgggctacttccggggtccgtccagggacatggggctgcgctacctcgagtaccggatcacgccggaggagagcaccctgatcaaccagtacccgcgcgaccaccccatcttcacggaccccaacgggatcaagagcaagggctgggagtccctcaaggatgcctacctcgacaagcaggacgtgtcgttggacatgaagaggttccggcccacgctcaagaaggccatcgcgcacatcaggaaggccagggccaaggccaacgccggcggcggcggcaacaactaggcatcgccgtacatgtgctcattcatcctcctcttactctacttttgtttttcctcccctccttttcggattatggcagtacttgtatgtagcaagcagaaatcgatcaaatgtataatatggcagggaaagaagttagagc

SEQ ID NO: 110627 - DNA, 315 bp, Zea Mays
atggagaaaaagcagccagcattgcatgcatggggctccgctgctggactcgtgatcgtgaccgcctgtggtggctgtggctgtgtgggaagatccggaaccggaagtagcagtcggcctctcatcagggaaatatttcatttgctggacctgatcatgggcttgttcgctgcggctttaatccgactgcggctgcggcttctacagtattttatctctagggattgcagctgcaacagtattttgcagctgcaacagtgctcctacatggtcttcttccggatgatggcggtgggaagtggatccctgacctga

SEQ ID NO: 110628 - DNA, 1416 bp, Zea Mays
agctccccagggaagagcatgaaaagcttggttcagagccacatcaacgtcggcgtcatcgccggcgtgctcttcgtgctcctcacctacctcgtcgtctcgcagcagactgccatcagccgccccaacgttgtcactacggtagcacaatggctctcgaataagcagcagatcggaggaggtcccggtgaaaaagttgtcactacgggagagcaacagatcgcggataaacagctgattcaaggcccaagtaaaacagagaaggccaacaaggtagtgtgcagcacggaggagcggttgtctgactactgcgaggttgatggcgacgtccgcgtcaacggcaaagcctggtcggtggacatcgtgccgccctcgggctggtcggagcggcgggagtggaagatccggccgtactcgcgccggagcgcggccaacgtcgacaggctcaacgtgacgcagctgcaggacccggcggccgccccgccgtgcacggtgacccaccacgtcccaggcgtcgtgttcgcgctcggcgggtactcgggcaacgccttccacgaccatgccgacgtgctgctgccgctgttcctcgcgtcgctgcggtacggccgcgaggtccagttcctcgtcatcaaccgggtgcagccgtggtggctgggcaagtacaggctcgcgctgcggcggctgtccaggtacgacgtcgtgaacctcgacggcgacgcccacgtccggtgcttcccgcacctcaccgtgggcctccgcctgcacaaagacttcggcgtcgtccccgagtgggtgccgggaaagcggcgcgtctccatgcccgacttcaccaggttcctgcgcgaggcgtacgcgctcccacgcggcgcgccggtcagccgggagccgggcaagaggccgcggctgatgctgatccagcggcagcgctcccggaggttcctgaacggggaggagatggcgcgggcggcggaggcggcggggttcgaagtcgtggtgacggagctgatgttagacgcggccgtggacgagcaggcgcgggtggtgaactcgttcgacgtgatggtgggcatccacggcgccgggatgacgaacgaggtgttcctgccgcccggcggggtgctcatccaggtggtgccgtggggaaagctggacctgatggctaggatcgagtacggcgagccggccacggacatggggctcaagtacctctgctacaacgtcaccctggaggagagctcgctgctggagctgctggggcgcgaccacccggcgatcaaggacccggattccgtgcaccgcagcggctgggctgccatgtacgacatctacatgaccaagcaggacgttcgcctcgacatcacacgcttcgcgctcacgctcgcggaagccatggaccacctacgccgcctgcagtag

SEQ ID NO: 110629 - DNA, 1362 bp, Zea Mays
cgtgtctaattcttcttcgcttctactccagtcctgcattacaccataaactgcagtgcttccagagagcctgaccgaccatccaccagcagctagcgtagcgagcgatggccaccgaactccggtcgccgctcctcccgccgccaccgccacagcgccgactaagcccgcgggcagccgcgtgggcggcgctcgccgtctcggcgacggtcctgctcctccccttcctgatcggcagcaccaccaggaccaccagcagcagcagcacgagacaccctcggccccgatcctccccaccatccaaccccgtggagctgaccctcctgaccggcgcccgcgacaagggcgcggtgtgcctggacgggagccccccgggctaccacctgcaggcggggtccggcgccgggtccggcagctggctcatccatctcatggggggcggctggtgcgacaccgtccgcagctgctccgaccgcaggacgacctacctcggctcgtccctcttcatgcagaaagtcatggacttcactggcattctcagcaacgacccggcacagaatcctgatttctacagctggaacagagtgttcgttaggtactgcgacggggcatcgttttcgggggattcccagcgcgaggctgggcctgggaacggcacgctcttcttcagaggcctgcgcatctgggaggcagtcctcgacgagctcatgcacaagggcctcgcgcattccaaacaggccttgctcacaggttgttccgctggtggtctggccacgctgctgcactgcgacgattttcgcgcacggtttccccctgaggttcctgtgaaatgcctctccgatgccgggttctttgttgacgcgaaggatttgtcagggcagcgctccatgcgttctgtgtacagcggagttgttcatcttcagaacgttactaaagttttgcccaaggactgcctcctcgcaaacaaggacgatcccacgcagtgtttcttcccggcggagcttattaagagcatcagcacgcccacgttgatcgtaaactctgcttacgactcttggcaggtacggtttgttgttgcgccagacagctcgtctcccgacgagtcatggcgcggctgcagagacgacgttcgcagatgcaattcctcccagatccaagtcctcaatgcatttaggaagacgatggtagatgacctcgtcgaggctgccgacggcaccaacagcagctggttcatcgactcttgcttcacacattgtcagactatcttcgacacctcaggatggaactcagcggccgcgccgaggatcggaaacaaggtgaggaggcgtggatgcatgtggatggaatgaaaatatcatatcc

SEQ ID NO: 110630 - DNA, 1535 bp, Zea Mays
gtcacagtcactgtcactgcccgtccttttgttcactacggctgccagctgcggcggccaggttgcagcgctgagctgctgcgaggagacgacgactgggaagagcatgaagagctgggcgccgatcaacctcaacgtcggcctcgtcgtcggcgtcctcttcgtgctgcttacttatctcgtcctctcgcagcaagctgcaagcagtggcctcagcgttgccgccacggtcgcgcaatggatcatggacaaacatctcacgacgactaacggtccggctgaaaccttcgtcgcttcagacttgcagcggaccgcggaagaacaactggttcatggttcaggtgagaagggcaaggtggtgtacaacacgaagggatcctactccgaaacctgcgaagtcgatggcgacgtccgcatcaacagcacggccctgtcggtgaccctggtgccggcgatcgatctcttcggagcgccgcgagtggaggatctggccatactctcgcaagaacatgcccgacatcaagatggtcaccgtgacgcagctggaggacaagtcctcggccccgccgtgcacggtgacgtacaacataccggcggtcctgttcgcgctcggcgggctgacgggcaacttctggcacgacttcggcgacgtgctggtgcctctgttcatcgcgtcgcggcggtacgacggcgaggtccagttcctgatcagcaacatgaagccgtggtggccggcagcgtacaagaccatcctgcagcggctgtccaagtacgacgccgtggacctggacggcgacggcgacggcgacgcgcacgtcgtgcggtgcttcccgcacgtcaccgtggggatccacatgcacaacggcctgagcatcgtcccggagtgggcgccgggaccgccgggcggccgcggcctcaccatggccgacttcaccaggttcatgcgcgaggtctacgcgctcccgcgcgacgcgccggccagcctggtccgggaggagccgggcaagcagagcccgccgccgcggctgctgctgatccaccgagagcacagccgccggttcatgaacgagcgggagatactgcaggcggcggaggcggcggggttcgaggctgtggcgctggacctgcggcgcgacgtgaccgtggacgcgcaggcgcgggtggtgaactcgttcgacgtgctgctgggcgtgcacggcgcggggctgaccaactcggtgttcctgccgccgggcgcggtgctcgtccaggtggtgccgtacgggaagatggatgtcatcgcgacgctggagttcggcctgccggcgaaggagatggggctcaagtacctcgactacgtggtgagcgcggaggagagcacgctgctggagatgctggggccggagcacccggcgatcaaggacccggactccatccaccgcagcgggtgggacaagatgaccgagttctacctcaatatgcaggacgtgcgcatcgacgtcgcccgcttcgcgcccgtcctcacccaagcgttcgaccacctacgccagcaataa

SEQ ID NO: 110631 - DNA, 1957 bp, Zea Mays
cccagcacacctccctttacccttccttctctcccatgcaagcaaggaatcgagggagggagggaggaagcaaaaggggaaaagctcgtgcaagacaagccgccctgccctgggaccattcccacccacatcgatcgtcagccagagagaggttcgttagttccagaaggacactggacagttggagacagcgagcgagcgagcgagcgagcgggaggagaggaagaagagctagggggcgatgggcggcgagatgaagcccgggaggggcctcaggacctgggcgcagcgccacctcaacgtcaccttcgccgtcggcttcctcctcgtgctgctcacctacctcgtcgtctcgcggcagctcgccgtcgccgcgcccggcggtgcagcgtcgagggtggtggcgggtaagcaggtggtcgtcagagacgccggagacaacgcagagggcgcgagcaaaaggcggcaggaatggcagccaaaacaggcggcggcggaggaggaggagacgtccggtgccgtcccaacggaggaggaggagtcgtatccgaaaagagatgaggccgacggcaaaccgtctgaggcagagacgacgacgacgacgacgagcaaggccgtgtgcaacacggacggccccgtgtccgagacgtgcgacctggacggcgacgtccgcaccaacggcagcgccctatctgtgacgttcgtcccggcgagcccgtcggagcggcgggagtggaaggtccggccgtactcgcgccggaccatggtgggcgtcgacagggtcaccgtgacgcggctggggtccccggatgacccggcggcgccgtgcgcggtggcgcacagcgtgccgggcgtgctgttcgcgctcggcgggctcacgggcaactactggcacgacttcagcgacgtgctgatgccgctgtacgccgcgtcgcggcggtacggcggggaggtcctgttcctggtcagcaacatgcagccgtggtggctgggcaagtacgaggccgtggtgcggcggctgtccaggtacgacgccgtggacctggaccgggacgcgcgggtgcgctgcttccgccgcctcaccgtgggcctgcgcctgcacaaggagctcggcgtcgcgccggagctcacggcgccggaccggctgaccacggccgacttcacggcgttcctgcgcgagacgtacgcgctccagcgcggcgcgccggcggcggtcccgacgacggaggggagaaagccgcggctaatgctgatccaccgcgcgcactaccgccggttcgtgaacgtgccggagatcacgcgcgcagcggaggcggcggggttcgaggtggcggtggcgagcccgcgcggcgacgcgcccgtggaggagacggcgcgggcggtgaactcgtgcgacgcgctgctgggcgtgcacggcgccgggctgacgaacgccgtgttcctgccccccggcgcggtgctgatccaggtggtgccgtacgggcggctggagcgcatggcgcgccgggacttcggggaccccgcggaggacatgggcctgcgctacctggagtacagcgtgtccgcggaggagagcaccctgctggagatgctggggccggagcacccggtgatcagggacccggactccgtgcaccgcagcggctgggacaaggtcgccgagtactacctcggcaagcaggacgtgcgcatcgacgtggaccgcttcgcgcccacgctcgcgcaggcgatggaccacctgcggcaccgccaccagtgagccttcattggtcgaacgagctgcacatggagggaggatacgtacatcataacacatctcactcacataagggacgcacatgcaaacttgcgtttggcggataggttagctccaaactgtaagtcatcgattgtttggtacagaatcgagcggcgtatacgtattctttatcgtctttgtctgaaccatatacatgta

SEQ ID NO: 110632 - DNA, 2192 bp, Zea Mays
cccagcacacctccctttacccttccttctctcccatgcaagcaaggaatcgagggagggagggaggaagcaaaaggggaaaagctcgtgcaagacaagccgccctgccctgggaccattcccacccacatcgatcgtcagccagagagaggttcgttagttccagaaggacactggacagttggagacagcgagcgagcgagcgagcgagcgggaggagaggaagaagagctagggggcgatgggcggcgagatgaagcccgggaggggcctcaggacctgggcgcagcgccacctcaacgtcaccttcgccgtcggcttcctcctcgtgctgctcacctacctcgtcgtctcgcggcagctcgccgtcgccgcgcccggcggtgcagcgtcgagggtggtggcgggtaagcaggtggtcgtcagagacgccggagacaacgcagagggcgcgagcaaaaggcggcaggaatggcagccaaaacaggcggcggcggaggaggaggagacgtccggtgccgtcccaacggaggaggaggagtcgtatccgaaaagagatgaggccgacggcaaaccgtctgcagaggcagagacgacgacgacgacgacgagcaaggccgtgtgcaacacggacggccccgtgtccgagacgtgcgacctggacggcgacgtccgcaccaacggcagcgccctatctgtgacgttcgtcccggcgagcccgtcggagcggcgggagtggaaggtccggccgtactcgcgccggaccatggtgggcgtcgacagggtcaccgtgacgcggctggggtccccggatgacccggcggcgccgtgcgcggtggcgcacagcgtgccgggcgtgctgttcgcgctcggcgggctcacgggcaactactggcacgacttcagcgacgtgctgatgccgctgtacgccgcgtcgcggcggtacggcggggaggtcctgttcctggtcagcaacatgcagccgtggtggctgggcaagtacgaggccgtggtgcggcggctgtccaggtacgacgccgtggacctggaccgggacgcgcgggtgcgctgcttccgccgcctcaccgtgggcctgcgcctgcacaaggagctcggcgtcgcgccggagctcacggcgccggaccggctgaccacggccgacttcacggcgttcctgcgcgagacgtacgcgctccagcgcggcgcgccggcggcggtcccgacgacggaggggagaaagccgcggctaatgctgatccaccgcgcgcactaccgccggttcgtgaacgtgccggagatcacgcgcgcagcggaggcggcggggttcgaggtggcggtggcgagcccgcgcggcgacgcgcccgtggaggagacggcgcgggcggtgaactcgtgcgacgcgctgctgggcgtgcacggcgccgggctgacgaacgccgtgttcctgccccccggcgcggtgctgatccaggtggtgccgtacgggcggctggagcgcatggcgcgccgggacttcggggaccccgcggaggacatgggcctgcgctacctggagtacagcgtgtccgcggaggagagcaccctgctggagatgctggggccggagcacccggtgatcagggacccggactccgtgcaccgcagcggctgggacaaggtcgccgagtactacctcggcaagcaggacgtgcgcatcgacgtggaccgcttcgcgcccacgctcgcgcaggcgatggaccacctgcggcaccgccaccagtgagccttcattggtcgaacgagctgcacatggagggaggatacgtacatcataacacatctcactcacataagggacgcacatgcaaacttgcgtttggcggataggttagctccaaactgtaagtcatcgattgtttggtacagaatcgagcggcgtatacgtattctttatcgtctttgtctgaaccatatacatgtatgtactgtttcattcagtcgctagattagctgcgaaatgaagtcattttgtttgttcgtttccgttttgccgtcagttgttatggcacggattggtaaaccaccttgtacttgcctactcgctccgtctcgaaaagagatgaatctgttaggccttattcggctattcatatcttatttagattggatcatattgaaaaaaattataaaagattttgatttgtttgagattt

SEQ ID NO: 110633 - DNA, 2011 bp, Zea Mays
aaactcatcacgcaccaccaagaaccggtccattgaagagagttctcggaaggttctcctcccgtgtccgcgtagctaaggtgtcccggggagacctgctgcacacgcggcggcgaggcctccatatctctctatcatcacggcgcgggggaggaagccagcgagtaagctgaaaggggagagggagccaggggttcacgcgctcgccggagacgacgacgacgacgacgacggaagatgggcggcgacccggggaaggtcatcaggaacgtgaagggcgccgcgcagaagtacctcggcgttggcttcctgctcggcttcttcctcgtgctcctcacctacttcaccgtctccgagcagttcgcgatcacggcgcccaacgctgttcggaggacatcgccgggccacgcgcacaccacgaggtcgccgatcacctcggccgtcgaagagaagaggcagcagcctcctgccatagaggagaagccacccaagccagaggttgcaccggaggagaagcctccgaaggaagagaagccgccacgcgttgatgttgaagggccccatgctgaaacagatgaggaccagaagaagcctgtccctgacgatgatggtaggagcagtggtatcagcggcggcgatggcgtcgccacggagagtgctccggccaagaagccggcgtgcgacatccagggcccgtgggcgtccgacgtgtgcgacatcgacggcgacgtgcggatccacgggtcggcgggcaccgtgctgatcgcgccgtccatcgagagcggcggcaacccgaacccgcaggagtggcgcgtccgcccctactcccggaagcaccagggcgggatcaaggaggtgacggtgcgcgagctggcgtccagcgccgacgcgccggcgtgcgacgtgcggtcccccgtgccggcgatggtgctggccatgggcggactgactggcaactactggcacgacttcagcgacatcatgatcccgctctacctccaggcggcgcggttcgagggcgaggtgcagctggtggtggagaacatccagccgtggtacgtgggcaagtaccgggccatcctgcggcggctgtcgcggcacgacatcgtggacatggaccgggacgaccgcgtgcgctgcttcccgggcgcggtggtgggcatccgcatgcacaaggagttcagcatcgacccggcgcgggagccgctgggccactccatgccggagttcaccgcgttcctccgcgagacctactcgctcccgcgggccgcgccggcgaggctggcgggcgccgacggcgaggaggacgagcgggcgcggccccgcatgatggtcatctcgcgccgccacccgcggaagctggtgaacttggacgccgtggtggctctggcgcggcgcgtcgggttcgaggtcgtcatcggggacccgcccttcaacgtcgacgtcggggagttcgccaaggaggtgaacgccgtggacgtgctggtgggcgtgcacggcgccgggctcaccaactcgctgttcctccccacgggcgccgtgttcatccagatcaacccgtacggcaagatggagcacatcggggaggtggacttcggcatccccgccgtggacatggggctcaagtacatcgcctactccgccggcgtcgaggagaccaccctggtggacacgctggggcgcgaccacccggccgtcaaggacccggagtccatccaccggagtgggtgggggaaggtggccgagtactacctcggcaagcaggacgtccggctcgacctccagcggttcgagcccgtgctccgcaaggccatgcagctcctcagggagtagcagcgtcgtagagagcagcagatgaaagtacagtttttttccaaatgacttttagagttttcttccctccctatacctccttaattatatatatttctcaattcttttccattttttggtgttcttttataaagtaaaaaaaaaagacaaaccaaagattgacatgcttactccattt

SEQ ID NO: 110634 - DNA, 2009 bp, Zea Mays
aaactcatcacgcaccaccaagaaccggtccattgaagagagttctcggaaggttctcctcccgtgtccgcgtagctaaggtgtcccggggagacctgctgcacacgcggcggcgaggcctccatatctctctatcatcacggcgcgggggaggaagccagcgagtaagctgaaaggggagagggagccaggggttcacgcgctcgccggagacgacgacgacgacgacgacggaagatgggcggcgacccggggaaggtcatcaggaacgtgaagggcgccgcgcagaagtacctcggcgttggcttcctgctcggcttcttcctcgtgctcctcacctacttcaccgtctccgagcagttcgcgatcacggcgcccaacgctgttcggaggacatcgccgggccacgcgcacaccacgaggtcgccgatcacctcggccgtcgaagagaagaggcagcagcctcctgccataggagaagccacccaagccagaggttgcaccggaggagaagcctccgaaggaagagaagccgccacgcgttgatgttgaagggccccatgctgaaacagatgaggaccagaagaagcctgtccctgacgatgatggtaggagcagtggtatcagcggcggcgatggcgtcgccacggagagtgctccggccaagaagccggcgtgcgacatccagggcccgtgggcgtccgacgtgtgcgacatcgacggcgacgtgcggatccacgggtcggcgggcaccgtgctgatcgcgccgtccatcgagagcggcggcaacccgaacccgcaggagtggcgcgtccgcccctactcccggaagcaccagggcgggatcaaggaggtgacggtgcgcgagctggcgtccagcgccgacgcgccggcgtgcgacgtgcggtcccccgtgccggcgatggtgctggccatgggcggactgactggcaactactggcacgacttcagcgacatcatgatcccgctctacctccaggcggcgcggttcgagggcgaggtgcagctggtggtggagaacatccagccgtggtacgtgggcaagtaccgggccatcctgcggcggctgtcgcggcacgacatcgtggacatggaccgggacgaccgcgtgcgctgcttcccgggcgcggtggtgggcatccgcatgcacaaggagttcagcatcgacccggcgcgggagccgctgggccactccatgccggagttcaccgcgttcctccgcgagacctactcgctcccgcgggccgcgccggcgaggctggcgggcgccgacggcgaggaggacgagcgggcgcggccccgcatgatggtcatctcgcgccgccacccgcggaagctggtgaacttggacgccgtggtggctctggcgcggcgcgtcgggttcgaggtcgtcatcggggacccgcccttcaacgtcgacgtcggggagttcgccaaggaggtgaacgccgtggacgtgctggtgggcgtgcacggcgccgggctcaccaactcgctgttcctccccacgggcgccgtgttcatccagatcaacccgtacggcaagatggagcacatcggggaggtggacttcggcatccccgccgtggacatggggctcaagtacatcgcctactccgccggcgtcgaggagaccaccctggtggacacgctggggcgcgaccacccggccgtcaaggacccggagtccatccaccggagtgggtgggggaaggtggccgagtactacctcggcaagcaggacgtccggctcgacctccagcggttcgagcccgtgctccgcaaggccatgcagctcctcagggagtagcagcgtcgtagagagcagcagatgaaagtacagtttttttccaaatgacttttagagttttcttccctccctatacctccttaattatatatatttctcaattcttttccattttttggtgttcttttataaagtaaaaaaaaaagacaaaccaaagattgacatgcttactccattt

SEQ ID NO: 110635 - DNA, 1515 bp, Zea Mays
tgggtccaccacgatgaattcggaggcagtggcattcaagcggatgtcgccggtgaggtcacacacgtcagctcgtgagcccgaaaggtcgcacagcggttgccgctgctgcttcacggaggctgctgcagctgcacgtgtcatgatgtctcctgttgatgaagacgcaagtacaaaattactgcggagtacgtacactactactactacatgccgtcttgaaagaaaaaaaatagatttagattgacctaaataaaaaatatatttcatggcgattattgtatctattttttaggctacaagcatgccgttaatacaatatgtatcgggattagaaaagtatactgtgaactctagaattttgcgtgcatgacttgaagtgatggccagccagcagaaacctgggtgttggtgctgaggagacgtcgcttgcacggttgttccggcggctgcggtccgcggttaatttgtctcggtccgggtccgcatcctcggcggctttaaggagttgcagacttgcaggtcaagcttttagagcgcaagccgtgcatttatggactagcttcgttacgcagcttttggaaaggcgtactactactacctggccttgctcggtcgtcgtcggagttagatgtcgcgtcggcggcggcggcggcggcggcgctgctctctggcgccgcctcctccatctccgcttgccccccggccccgacgacgttgatgctgatctttcctctgatccctgattcctccagctccgcttccgtgaccgccttgtcgtcgtcgtcgttgctccgctgagcaacaagcagatgcttgaggtcaccctcgccgccgccgccgccgtggctgcccccctgcagctgcgacgggtggaagtcacctcggcctgaaagaacaagtgcgtacaaatcagtgggtgtaagtggctcgtgatcatcagttcattgatcgattgagagccgatgcatgcacgaggatatgatgcccacaaaatcatatatgtatagcataacggtgcaggtacacacgcacgcgcgcacgacagtacgtgggtcgctcagatcggaagcagatcgagaaggcagaagcgcactcacgatcacgagcgtcgaggacgagggtggcgtagcgtcgggaggagagcgtgaagacgacgacgacgaagaggaggaagcagccgacggcgacgacggacagcaacctgccacctgccgccaccttcttattcttgtcgccgccgcctttcatggccgcgccgcgggccagcgcagccatatctagcttctcgtcttcggaaggtctccgagcctaagacaagagagagaggtggatcccaagaactagaggcggatcattcttcctcgatgtactcacttgttgagctcctcaagtgatcactcgctgctgggccaactctcgtagctcttgcctccaccaccaccacctaagacatatataaaatggagaccagaggagagcggattataaactcttttgctctcccatagtccc

SEQ ID NO: 110636 - DNA, 2153 bp, Zea Mays
gcgtgcgacacttgcgagcagaacaggccaacacagctagctagcaggccgtccggccggcaaggcatgaagggcgacaaggcgggcgggagggacaggggcggcgccagcaggccgctgcgcctcgagtcgcagcggttcaggctgctgtccatcgtcgtcggctgcttcgtcatctgcctcgtcttcctcctctcctcccgccccgacgccgccgccgccttcggcaccgtgagtgtgagccccaaggcgtcgctggtggccgcgcgccgtccggtggcggtcaagaccgtgcgggcttcctcctccgccgacggagccttaggtggagatttccacgtggacatcctgccgcagcatcgtcaggagcagagcctcgagcggaccggcgacaagacggccacagaatgggtcagagacacggtgatcgtggaggagaggagcggcgccgagaccagcgaggcggagacggaggagaccgagcccgaccgtcacgacagtgccactgccactgccgcggcgtccaacaccgacgaccagcctgcagtaccaggtgcggagaaggcagtccaagacaccgccgcgatcaccgggcagccggctgccgaaacaacgtcggcgactgcgccggacgggacagaaaagacgggagctgctactggtggtggtagtggtcagagcaaggtccaggagcagccagctcggcaacggccacaagaggagcggcacgacgagccagcacaatctggcggggaccagcagcagcagcagccgcggccgccgctgtgcgacttctccgacttccgcagcgacatctgcgacttggccggcgatgtccggatggacgccaacgtgtcggcgttcgtcgtcgtcgtcgacccggcgacgagcggttccgatcaggaggagcacaaggtccggccttacccgcggaagggcgacgagacgtgcatggggcgcatcacggaggtcacggtgcgcgcgacgggcgacgcggcgggggcgccgcggtgcacggagacgcacggcgcgccggcggtggtgttctccatcggcgggtacacgggcaacatcttccacgacttctccgacgtgctcgtgccgctctacaacacggcgcggcggtaccgcggcgacgtgcagctggtgatggccaacgcggcgccctggtggctggtcaagtacgacaggctcctccgggcgctgtcgcgccacgcgccgctggacctggccagggcaggcgcggcgcgggaggtgcactgtttcccgcgcgccgtggtcagcctgcgcgcgcacaaggagctcatcatcgagcgcgaccgcagcctggacgggctcgccacgccggacttcacgcggttcctccggcgcgcgctctcgctgccccgggacgcgcccacgcgcctcggcgacggcacggggaggaagccccggctgctggtcatctcgcgccaccgcactcgcctgctcctcaacctcgacgccgtggtccgggccgcggaggaggtggggttcgaggccgtcgtcaacgagtcggacgtggccaacgacatctcgcaggtcgggggactcatcaactcgtgcgacgcgatggtgggcgtgcacggcgcggggctcaccaacatgatgttcctgccgccgggcgccgcgctggtgcagatcgtgccgtggggcgggctgcagtggatggcgcgggccgactacggcgaccccgcggaggccatgggcctcaagtacatccagtacgagatcggtgtcgccgagagcacgctcaaggacaagttccccagcgggcacaagatcttcaccaacccgacggcgctacacaagaaggggttcatgttcatcaggcagacgctcatggacggccaggacatcaccgttgacgtcggccgcttcagggaggtgctgctccaggtgctcaacagcctcgcacagtagccgtctgcgtgctcactgctcagcacggtgctacccccaccttagtagtactcctgaagtatatacacacagctacgcactacacagccatgtatacgtacaatactttagttgcaactttgtactggagtatcattgttacggatgtacactctacagagagacctttgcgtggtcaacggtccatgggggcataatactgtactacaatg

SEQ ID NO: 110637 - DNA, 734 bp, Zea Mays
gcgtgcgacacttgcgagcagaacaggccaacatgatgttcctgccgccgggcgccgcgctggtgcagatcgtgccgtggggcgggctgcagtggatggcgcgggccgactacggcgaccccgcggaggccatgggcctcaagtacatccagtacgagatcggtgtcgccgagagcacgctcaaggacaagttccccagcgggcacaagatcttcaccaacccgacggcgctacacaagaaggggttcatgttcatcaggcagacgctcatggacggccaggacatcaccgttgacgtcggccgcttcagggaggtgctgctccaggtgctcaacagcctcgcacagtagccgtctgcgtgctcactgctcagcacggtgctacccccaccttagtagtactcctgaagtatatacacacagctacgcactacacagccatgtatacgtacaatactttagttgcaactttgtactggagtatcattgttacggatgtacactctacagagagacctttgcgtggtcaacggtccatgggggcataatactgtactacaatgagagagggaaatcttagggtgtgtttggtttgcccctgctaaaatttagcccctatcacatcgaatgtttgaacctccgttcggagtattaaatgtagtcggattataaaactaatttctcagccgaagattaaaaagtgagacgaatctagtacagttggttgggtctata

SEQ ID NO: 110638 - DNA, 1540 bp, Zea Mays
cacacctcgtctgccaccaacccacctcctagttcctgtttcaggacgcttattattctccgccgttggcgtcgtgaagcccgaagacaccgatctcacggacaaacttacaacatatggctatggcgacggcgaagctgaactccccggctaccagcttggtcgctggcggccgcacgcgccgatctgcgcccgcccgctgcacgacggtgatccgcgccgccgcaggctcctactcggacgagctcatctccaccgcgaaatctgttgcttcccctgggcgtggtattctggcaattgatgagtcaaatgcaacatgtggaaagaggttatcatctattggtttggacaacacagaagtgaaccgccaggcttacaggcagcttttgctgacaactgctggtcttggtgaatatatttctggcgctattcttttcgaggagaccctttatcaatcaactacagacggcaagaagtttgttgactgcttgaaggatcagaatatcatgcctggcatcaaggttgacaagggtttggttccattgcctggatccaacaatgaatcatggtgccaaggtcttgatggtttggcttcaaggtgtgctgagtactataagcagggggcgcgcttcgcaaagtggaggactgttgttagcatcccttgtggtccatctgcattagcagtcaaggaagcagcatggggacttgctcgatatgctgctattgctcaggataatggtttagtgccaattgtggagccagagattcttcttgatggagaccatgggatcgagggagctcttgaggtggcagagaaagtgtggtctgaggtgtttttctacttagccgagaacaatgttctgtttgagggtatcctgctgaagcctagcatggtcacccctggagctgagcacaaggagaaggcttctccagaagccattgcaaagtacacgctaacaatgctcagaaggagagtacctcccgctgttcctggaatcatgttcctttctggtggacagtccgaggtggaggcaactctgaacctgaatgcaatgaaccagtctctgaacccatggcatgtgtcgttctcctatgcccgggctctgcagaactcggtgctgaagacatggcaagggcgccctgagaacgtggaggcagcgcagaaggccctgctggtgcgcgcaaaggccaactcgctggcccagctcggtcgctacactggtgagggcgagagcgatgatgccaagaaaggcatgttccagaagggctacacctactaatgtgccagcgagatgtttccatgacataataataattgtagcgttttggtgttattattattattattttggtacgctctggtgaataataaccaaattgttggtgccaacgacatctagcagcaaattggtctttagaactcatgtagaaccttgagaacgaacatgtaatctggtgaattctattcctatatttgaggcgatggatgctaagttgccatatgcgacaagcacaacaggtgatttatgttcttttatgt

SEQ ID NO: 110639 - DNA, 1313 bp, Zea Mays
tttttctgttggtttttgtgaatgctaatctaatggttgtaactttcgtcggcagaaatctgttgcttcccctgggcgtggtattctggcaattgatgagtcaaatgcaacatgtggaaagaggttatcatctattggtttggacaacacagaagtgaaccgccaggcttacaggcagcttttgctgacaactgctggtcttggtgaatatatttctggcgctattcttttcgaggagaccctttatcaatcaactacagacggcaagaagtttgttgactgcttgaaggatcagaatatcatgcctggcatcaaggttgacaagggtttggttccattgcctggatccaacaatgaatcatggtgccaaggtcttgatggtttggcttcaaggtgtgctgagtactataagcagggggcgcgcttcgcaaagtggaggactgttgttagcatcccttgtggtccatctgcattagcagtcaaggaagcagcatggggacttgctcgatatgctgctattgctcaggataatggtttagtgccaattgtggagccagagattcttcttgatggagaccatgggatcgagggagctcttgaggtggcagagaaagtgtggtctgaggtgtttttctacttagccgagaacaatgttctgtttgagggtatcctgctgaagcctagcatggtcacccctggagctgagcacaaggagaaggcttctccagaagccattgcaaagtacacgctaacaatgctcagaaggagagtacctcccgctgttcctggaatcatgttcctttctggtggacagtccgaggtggaggcaactctgaacctgaatgcaatgaaccagtctctgaacccatggcatgtgtcgttctcctatgcccgggctctgcagaactcggtgctgaagacatggcaagggcgccctgagaacgtggaggcagcgcagaaggccctgctggtgcgcgcaaaggccaactcgctggcccagctcggtcgctacactggtgagggcgagagcgatgatgccaagaaaggcatgttccagaagggctacacctactaatgtgccagcgagatgtttccatgacataataataattgtagcgttttggtgttattattattattattttggtacgctctggtgaataataaccaaattgttggtgccaacgacatctagcagcaaattggtctttagaactcatgtagaaccttgagaacgaacatgtaatctggtgaattctattcctatatttgaggcgatggatgctaagttgccatatgcgacaagcacaaca

SEQ ID NO: 110640 - DNA, 118 bp, Zea Mays
gcttttctatttttttttgtttggttgcacatggaattgagatttagaattagagaaccaatttcctggtattggactataactagaagctccctctcccagtacagagtgttacccc

SEQ ID NO: 110641 - DNA, 3294 bp, Zea Mays
cgactccctgtgcccgtctcgtcgtctcctctcctcacctcccctccacccccacttgctattttgaccctcctcccgttcctttctttaatccatcatccgcctcgctatccctccctccctccctccctgcccgccgtggagggtttgggattttgcggacctcagcagctccatatctcagtcacacactcacgcgcgcgcgggggccgggggccgctggacccgccgttctccttctcctccccccctcgttcctctcgtctcaccactactaccctacacgcgccgcggctaggattccgccgaggagacgctgcgcgcgtggatctccggtgctgtcctgctagcgtgcgacgaggccaggcaggcgcgcggccggcgccatgagcttcgggagcctattcgacggcgggtccggcggcggcggaggaggaggagggatgcagttcccgttctcgaccgggttctcgtcctcgccggccctctccctcggtctggagaaccccggcggcggcatggtcggccggatgctccccgtgggcggcgcccccgcggccggcgggatggcgagggacgccgccgacgccgagaacgacagccgctccgggagcgaccacctggacgccatgtccgccggcgccggcgccgaggacgaggacgacgctgagccgggcaacccgcgcaagcgcaagaagcgctaccaccgccacacgccgcagcagatccaggagctcgaagcgctgttcaaggagtgccctcacccggacgagaagcagcgcggcgagctcagcaagaggctcggcctcgacccgcgccaggtcaagttctggttccagaaccgccgcacgcagatgaagacgcaactggagcggcacgagaacgcgcttctcaagcaagagaacgacaagctgcgggccgagaacatggcgatccgggaggcgatgcgcagcccgatgtgcggcagctgcgggagccccgccatgctcggggaggtgtccctggaggagcagcacctgtgcatcgagaatgcgcggctcaaggacgagctcaaccgcgtctacgccctcgccaccaagttcctcggcaagcccatgcccgtcctctcggggcccatgctgcagccgaacctgtcgctgcccatgccgagctcgtcgctggagctggcagtaggcggcctccgtggcctagggtctatcccttccttggacgagtttgctggcggtgtgtctagcccgttgggcacggtgatcacgcctgcacgggcgaccggatctgctccgccgcctatggtgggcgtcgacaggtccatgctgctggagcttgcgatcagcgccatggatgaactagttaagctggcacaggttgacgagcccttgtggcttcccagcctcagtggctctcccgacaagaagctgctcaactttgaggagtatgcccactcgttctctccgtccgtcggcgccgtgaagcctgtgggctatgtatccgaggcctctagggagtctggcctcgtcatcattgacaacagccttgctcttgtagagacccttatggacgtgagacggtggtctgatatgttctcgtgcatgattgctaaggccacagtcctagaggaggtgacatctggcattgcaggaagtaggaatggtgcgctgctgctgatgaaggctgagctacaggtgctctcacctctagtgcccatcagggaggtcacatttctcaggttttgcaagcagctggctgagggtgcatgggcagtagtggatgtgtccattgacggattggtgagagatcacaactctggaacagcatccaacgccggaaatatacggtgcaggaggttgccttctggctgtgtgatgcaggacactcccaatggctactgcaaggtcacatgggtagagtatacggaatacgacgaggcgtcagtacaccagctctatagaccactcatccggtccgggctggcctttggggccaggcggtggcttgcaatgctgcagcgccagtgcgaatgcctggccatactcatgtcccctgatacagtttcagctaatgactcgtcagtcataacacaggagggcaagcgaagcatgctgaagctggcacggcggatgacggagaacttctgcgccggggtcagcgcgtcatctgcacgtgaatggagtaagctggacggcgctgcaggcagcatcggggaggatgtgcgggtcatggcacggaaaagcgtggacgagcctggggagccgccgggcgtggtcctaagcgcagccacatcggtgtgggtgcccgtggctccggagaagctcttcaacttcctccgtgacgagcagctgcgtgcggagtgggacatcctcagcaacggaggcccgatgcaggagatggccaacatcgccaaggggcaggagcacgggaactcggtgtccctcctcagagccagtgccatgagtgccaaccagagcagcatgctgatcctccaggagacttgcactgatgcatcaggctcgatggtcgtgtatgctccagtggacatcccggcgatgcagctcgtcatgaacggcggggactccacctacgttgctctgctgccgtctgggttcgccatcctgcctgatggcccaagcagtgtcggcgccgagcacaagacaggcggctcgctgctcaccgtcgccttccagatcctcgtcaacagccagccgaccgccaaactcaccgtggagtcagtagagaccgtgaacaacctcatattctgcaccatcaagaagatcaagacagcgctgcagtgtgacgcttgactgtcgcgtgtcgccgcagggggggtggtcggtgatgacgagcctgagtcaagaacgaacctcgtgcgggaaagaaacctttgctaggtgataaggatccagcttggacgggtctttagcacggagcaatggtggtggttcgggtattgactcggtctctgtcatctgcttcttctccatggaccatggcaacctgttgtctgatacgggatcttgaatagtgcgtggacaatgatgtggttagatggttaaaatcttttgtttcagtcccatcgtttcatcagggaatcaaactttgagttttggccgcctcgttgttagttgtaatatacagttcattttatattgtgaggtaagctatatgccatgtgtaaacatgagagctcaggaatgttgggtagcatcatgagtgtagctaggcatcgaactatcggccaataaaatgtctgatcgataaagtggtatagttgtttacctggaaatgcttatttagcta

SEQ ID NO: 110642 - DNA, 3303 bp, Zea Mays
cgactccctgtgcccgtctcgtcgtctcctctcctcacctcccctccacccccacttgctattttgaccctcctcccgttcctttctttaatccatcatccgcctcgctatccctccctccctccctccctgcccgccgtggagggtttgggattttgcggacctcagcagctccatatctcagtcacacactcacgcgcgcgcgggggccgggggccgctggacccgccgttctccttctcctccccccctcgttcctctcgtctcaccactactaccctacacgcgccgcggctaggattccgccgaggagacgctgcgcgcgtggatctccggtgctgtcctgctagcgtgcgacgaggccaggcaggcgcgcggccggcgccatgagcttcgggagcctattcgacggcgggtccggcggcggcggaggaggaggagggatgcagttcccgttctcgaccgggttctcgtcctcgccggccctctccctcggtctggagaaccccggcggcggcatggtcggccggatgctccccgtgggcggcgcccccgcggccggcgggatggcgagggacgccgccgacgccgagaacgacagccgctccgggagcgaccacctggacgccatgtccgccggcgccggcgccgaggacgaggacgacgctgagccgggcaacccgcgcaagcgcaagaagcgctaccaccgccacacgccgcagcagatccaggagctcgaagcgctgttcaaggagtgccctcacccggacgagaagcagcgcggcgagctcagcaagaggctcggcctcgacccgcgccaggtcaagttctggttccagaaccgccgcacgcagatgaagacgcaactggagcggcacgagaacgcgcttctcaagcaagagaacgacaagctgcgggccgagaacatggcgatccgggaggcgatgcgcagcccgatgtgcggcagctgcgggagccccgccatgctcggggaggtgtccctggaggagcagcacctgtgcatcgagaatgcgcggctcaaggacgagctcaaccgcgtctacgccctcgccaccaagttcctcggcaagcccatgcccgtcctctcggggcccatgctgcagccgaacctgtcgctgcccatgccgagctcgtcgctggagctggcagtaggcggcctccgtggcctagggtctatcccttccttggacgagtttgctggcggtgtgtctagcccgttgggcacggtgatcacgcctgcacgggcgaccggatctgctccgccgcctatggtgggcgtcgacaggtccatgctgctggagcttgcgatcagcgccatggatgaactagttaagctggcacaggttgacgagcccttgtggcttcccagcctcagtggctctcccgacaagaagctgctcaactttgaggagtatgcccactcgttctctccgtccgtcggcgccgtgaagcctgtgggctatgtatccgaggcctctagggagtctggcctcgtcatcattgacaacagccttgctcttgtagagacccttatggacgtgagacggtggtctgatatgttctcgtgcatgattgctaaggccacagtcctagaggaggtgacatctggcattgcaggaagtaggaatggtgcgctgctgctgatgaaggctgagctacaggtgctctcacctctagtgcccatcagggaggtcacatttctcaggttttgcaagcagctggctgagggtgcatgggcagtagtggatgtgtccattgacggattggtgagagatcacaactctggaacagcatccaacgccggaaatatacggtgcaggaggttgccttctggctgtgtgatgcaggacactcccaatggctactgcaaggtcacatgggtagagtatacggaatacgacgaggcgtcagtacaccagctctatagaccactcatccggtccgggctggcctttggggccaggcggtggcttgcaatgctgcagcgccagtgcgaatgcctggccatactcatgtcccctgatacagtttcagctaatgactcgtcagtcataacacaggagggcaagcgaagcatgctgaagctggcacggcggatgacggagaacttctgcgccggggtcagcgcgtcatctgcacgtgaatggagtaagctggacggcgctgcaggcagcatcggggaggatgtgcgggtcatggcacggaaaagcgtggacgagcctggggagccgccgggcgtggtcctaagcgcagccacatcggtgtgggtgcccgtggctccggagaagctcttcaacttcctccgtgacgagcagctgcgtgcggagtgggacatcctcagcaacggaggcccgatgcaggagatggccaacatcgccaaggggcaggagcacgggaactcggtgtccctcctcagagccagccatgagtgccaaccagagcagcatgctgatcctccaggagacttgcactgatgcatcaggctcgatggtcgtgtatgctccagtggacatcccggcgatgcagctcgtcatgaacggcggggactccacctacgttgctctgctgccgtctgggttcgccatcctgcctgatggcccaagcagtgtcggcgccgagcacaagacaggcggctcgctgctcaccgtcgccttccagatcctcgtcaacagccagccgaccgccaaactcaccgtggagtcagtagagaccgtgaacaacctcatattctgcaccatcaagaagatcaagacagcgctgcagtgtgacgcttgactgtcgcgtgtcgccgcagggggggtggtcggtgatgacgagcctgagtcaagaacgaacctcgtgcgggaaagaaacctttgctaggtgataaggatccagcttggacgggtctttagcacggagcaatggtggtggttcgggtattgactcggtctctgtcatctgcttcttctccatggaccatggcaacctgttgtctgatacgggatcttgaatagtgcgtggacaatgatgtggttagatggttaaaatcttttgtttcagtcccatcgtttcatcagggaatcaaactttgagttttggccgcctcgttgttagttgtaatatacagttcattttatattgtgaggtaagctatatgccatgtgtaaacatgagagctcaggaatgttgggtagcatcatgagtgtagctaggcatcgaactatcggccaataaaatgtctgatcgataaagtggtatagttgtttacctggaaatgcttatttagctacgtgatgggcc

SEQ ID NO: 110643 - DNA, 117 bp, Zea Mays
tttttattcttttttgtgttatatggagatgagggaaacgtaatacatataatgaaagtgttgaacaacgtagttgtcgcagatccccgatccggactccaaaccctcccaacagca

SEQ ID NO: 110644 - DNA, 3014 bp, Zea Mays
acttatttgaaaagacagccatgttaaacagattaggaagccaattgaaagctggagctttggtgagctgcaaaaggactcatcccaaagcatccgctggccaactcatataactacgacttgcctcagcaacatgagttccttacatctgggcatgagaaaaagaaaaaaaaactcattgagaactgagatgagcagaggttgaagcatgtttgcaacgaatgaaggtagaaggcaaagatacgaagatatgcctgcaaaagtgagtttccttgtattgattgaagaaattcgttgataaatcttctatgatcatcaaatactgacacgattgacacccttgcattgtgtgcatcacagggatctataagtggaagttcatgtcagctttactaacagataggatccgaggcttgagtgcttgacttctcttcctcttccctcctgtatggatcaagccacagataattagccttctcctttactcttgcttcaactttctagtctgactctgatcttgcctttgctgagcttcaatggttagctctcatggatttcttctctccctgcaagcattaaccatggtttccacaattatgacaaacactggagtgatagccactcaagggcaagccttctgtccttcttcctcctgtgggcatcttcaagacatccgatctcctttccgtatgcaaggtgacccacaaggttgtggtttcccagaatacgagctggtttgtattgatagcaaggctataattcacatcaataatggacgatactttgtgactagcatctcctatagcaactctactttctgggtcgttgatgctaatttagataacagcagctgccccattcctgcgagcaaccaacgtccctatgtaaatggtttgccatccgaaggtcgcaccctgctggatcctgacacagtaacttgggcggcctttgtgagttgttcagagatgctaagtgacgtttcttccccgttcctcagttgctgtagtggtatttaccagcctgtcaactgccgaagtacgaagaattcttttgcttatgtcttcactaccacattctttcctatggttggagacatcaagccgtcatgtagatacttgtccatgattccttttggaagtcggcatgtcaagcgaccagataatgcaagctatgatgatattgtaaagtttatgaagaatggctttgctgtaaattttccttatcgcaatggacggtcgtatcatttggtcatcaacacatgcttgaaagatgcaaatggttacttcaacgataaaatatctaactcaagcattgtggaccagacattggctgcggtttttgggatcgaccttcgtttcttaagatgtgtaaatgattactcgtacagaagtaaattgttttgggctatggtcgccatgatatctactgtagtcattgtgaagttcgtgatagtatttggaatactatcgaggtttgtgtttgcaccattaactgtactgaccttcctcgcctacaagtactggaaaacaaggatatccattgacgcagtcgagaagtttctccagatgcaacaagctcttagcccagcaaggtatgcctacactgacatcaccgcaatcacaggacacttcagagagaagctgggccaaggaggctacggatccgtgtacagaggcgtgcttccaggtgacgtcagcgttgctgtcaaaatgctgagcaactcgctgtgcaacggagatgaattcatcagcgaagtgtccaccatcggaagcatccaccatgtcaacgtggtgcgtctggtggggttctgttcggaagaaaccaagagggcgctcatctacgagtacatgcctcgtggatctctcgataagcacatcttctcttccgagcaaagcttttcgtgggataagctcaatggaatagctttaggcatcgccagagggatcaactacttgcaccaaggctgtgagatgcagattctgcactttgacatcaaaccacacaacatccttttggacaacagcttcactcctaaagttgccgactttgggctagccaagctgtacccaagggacaacagctttgtgccggtgagtgccgcgcggggaaccattgggtacatagctccggagatgatctcccgtaatttcggcgtcgtttcgtgcaagtcagacgtctacagcttcgggatgctgttgctggagatggctggtggacggaggaacctagaccagcatgcagagaggagaagccagacgtactacccagcttgggtgtatagccatctaactcggcaggaggtgggcgagatctgcgaagctttcgatgtccacgaggtggagaggaagctgtgcgttgttgggctatggtgcattcagatgaagccacatgatcggccaacgatggctgaggtcgttgggatgcttgaagctggcgctgacggtctgcagatacctccccagccattcttctgtgggggtgagcttactggtagcacttcgtatttctcctcggagttgagcgcaatctcggagaatggatgaggttactggttccacaagatgaactgccaatgtgctacaagtagctagaatctgaaaaaaaatctgttgtacttggacgatgctcaatatttagtcggttgcagtgcactgtaattcgattctatgctgtaatgcgtctgcatcaggcaccagcagcttcttggatcaaagggatgagcatgtactcgtatgatgaattaaaaaatttggtggatttcatatggataatccgtgttgctcgtacacgagttcatcttttgttcttaacacattcattgataccagcaactatttgatcacgacaatttgcggatggtataagtggccatcgttgggggaccagttagccgcgtttcgagatttttttttttggtttttttttctgccaacgcactactccagtccactttgactaccagcacccattcgtcttgtcaaagccaaccattgttgaccaagcatgttcaggaa

SEQ ID NO: 110645 - DNA, 1192 bp, Zea Mays
atgggttctagaattgagttgataaggaaacatttgaaacaggaggaggaggatgatgatgagttatttttttgtgttagttccagctatatatgcttccctttattctaaaaagaggctagtacacacttcttgtcgtagtggtgcacgaaaaattagagaaatgctcgatggtcatgagagctggtgcaaatttgagtttcgaatggagccagagatctttagagctatagcaagctatcttagaagggaaggattattgcaagacacttcaaatatgagcattgaggagcatcttgggatattcatgtacatgatatctcaaaatgctagcaacgcgatcttacaaaaagaatttcagcatagcggggaaaccatacatagaaagacaagcgagttctttggtataatccctgctctaactcaaagatttgtgaagctcccaagtgtaaaccagccacatgtgaagattacatccaatcctcggttttggccttactttcaaaattgcattggtgcaattgatgggacacatgtccccataactattagtgaagagagagcccctccatttagaaatcgaaaaggaaccctttctcaaaacgtgatgttggcgtgcgacttcgatttgaatttcacattcatctcatgtgggtgggaaggatccgcatctgatgcgggggttcttcaatcagctttaagaaagggtttcagagtgccagatggtaaatactatcttgtagatgggggatatgcaaacactccttcttttattgccccatatcgaggagtttcttaccatctcagtgaatatcggaggcgagggttgagtactgtatatgctaattataaggagttatttaatcattctcatgccctacttcgcaaccacatagaaaggtccatcggtgtcttgaagaagcgatttcccatcctcaaagtgggcaccttttatcccatagagactcaggttttgattccatcagcagcagtttcatttcataacatgattagaggtttaaatggtgaagatggatggttggatcagcacccaactaacatcaattctagtcaatttgttgaattaccagagggagatagcaattatcagtatagtagtcagtccaatgctggaaatgctcttagagatcaaattgctatgcagatgtggaatgattataataatcattag

SEQ ID NO: 110646 - DNA, 815 bp, Zea Mays
ataaaaagacgattaagacttggagcaagacagagcagccgaagaagggaaggaggccgggtaacatccccctacacagggccactattgttaatactagctaggtttattaccatggtgatgaagaagttactctcttccctaccagcgatggtagcgatcatgctggccatcgccatgctcttttgctccgtcgtcgtcgtccactcctcggaggtcaaacaagcaaacgatgcaactagagctcatctggagggaagccatcagggcgtaccgccaccggcgccgcagggcggccgtgtgcatgcatacggcgatgtcccgccgccgccacagctgagcagcctctcgaacagcacccgcactggaagaacagaccgactgggtggtgacatcaatagttatgttaccgatcgccatgtttaggtttagccaggtttagccccaccatgcatgaacccatgatgtgtttgggcttggttggaccaatcatctatctatctacactagtagagatatggttttaaggcttgtttggatccttgtggcacagtttttcagttaattttagtaccttaacctccaaacaggtccgaaggactgcaaactgtttgctcattagacatttgaccttgctaataggtgctaatagatcgtataaagagaaaaagatatctattaagtctccaaccatatcctgagtaatttttgctagctaattatttgtcggatgattatcagacactgacaaacaataagcgagaaggatccacacatgggccttagcccggattaaaattaaaccaactccctgt

SEQ ID NO: 110647 - DNA, 580 bp, Zea Mays
tttgatgagcttctttgcacctgtggagagccaggacgggcaactgaaatcctctttgaagatctgcattaaaaataggatgtgtcaagcaaccattaagaacaaaaggaagggaaactatgtgcttcttgagttgttgtcatgccagagactgacaaaccttcttgtaaagcgacatcaggtttgaatcttcaaatgggaggtaccccgccatgaggacaaagaaaatcactccacatgaccacatatcacccttagcaccatcatagcatttattgtttataaccagtacacgcaagagcactgtacatgagaacaaaatactttattgagtgaaaataagaacataacttaaagcatagtcgtggtcagcacctcaagagcaacataattgggagttccacaggttctatgcagcaggccatcctcctgcaagtccacaaaagggtattgaaaaaagtcttattaacgtactaaattcttctgagtaaaatgtatcatgtgatttcatataaattagtaagtagcttttaaatatacgatcctacagagtccagacaaggaaccgcttcagaaaaat

SEQ ID NO: 110648 - DNA, 870 bp, Zea Mays
atgttgacctcacgttcctccaggactcgtaccaacttgtggctgtacctaaaggtgaagttagacagaaataaaaccaagatagtggatgctggtgcacttgagcccctgcttggttatttgcgatcaagcgatccaaatttgcaggagtacgcaactgctgctctccttacactttcagcctcatccaccactaagcctgtcataagtgcctcaggagcaatccctctacttgtggaagtcctcaaaggagggaatccccaagccaagaatgatgctgtgatggccctgtacaacctctccacaatcgcagacaaccttcaagctatcctttccgcccagccgatcccccctttaatagagctactgaagggtggcaagaggtcctccaagacagccgacaaatgctgtgctctcctcgagtcgttgctcgcttttgaccagtgtcgggtggccttgacatccgaggaaggcgcagtgctcgccgtcgtagaggtgcttgaggagggctcccttcagggcagagaacacgccgtgggagcgctcctgacaatgtgcgagagcgaccgcagcaggtatagggacctcatcctgaacgaaggggcgattcctggtcttctcgagcttacggtccacggcacgcccaagtcccggatgaaggcccacgtccttcttgacctgctgcggaactcgccgtactcgagaccaaagctgccggcagacacgctggaaaacatcgtgaccaacattgcctcccagatagatggcgaagaccgcggcggcaaagccaagaagatgcttgctgagatggtgaaggtgagcatggagcagagcctgaggcacttgcagcgtcgggcctccttcgcctga

SEQ ID NO: 110649 - DNA, 342 bp, Zea Mays
atggagtcagctgtagaagggaaggggactgattcagaaagtaattcatttgacaagagggatgacatgtctgaagatgaactgacagtgctaggtggaaaaattggtgatgcggacaatgtcacaattgatgaatttgatgatagcaaaagtaaaaaggggggtcaaaagaaggcgcaagaaggtactatcgtttgtcgacatgacagtcactcgctgcttgctgcttggagccttggatggctgtcgcatggtgctctggagtctggtcactggtcaggagaggacacaggacaatggactggactactcactactggacttagtctcttactctcttag

SEQ ID NO: 110650 - DNA, 1681 bp, Zea Mays
ccccgacgtcccctaatccccgggacccctccccattcctctcctcttctctccctcgcccctccctccccaaaaccctaacccatcgtcgaccggtccccgctctcgtggcgccggcaagatgaccctcctcgcagccatcaccaaccccgccgccgactcccgctccggctccagcgagagggctcaccctatcgtgctcacgccgggtgtcacgccgccgccgccgccatcctccacgctccccaccccaataccgtcttccacctggtcgctctccccagccgaccccaccctcgccaccgccgcttcctacctcgcggcctcgcttgcctcctgctcctccctcccgcagctccgcgcccttctcaccacctttatcaccactctgtcacgatccctcgcactcccaaccccgccggcggccctccccgccgccatccgcgctgtcgccccttacttccccgccgcaatcgcctcccttgtggcctccaaggcggtaagcctcgccgggcacgacatcctccttgctctcgcggaatcccgcctcctcccgcacccgccaccggaactcatctcgtcgctctgcgacaacgactgggtcgaccttgtctgcgtcttgctccgccaggccgccgacatacgttcctccgagatcctcgccgcgctccgttgcttcctctcgccggcctccgataaggcttacgacgccatgatggacgtcaagtgccgatggaaggacgccgcggtgcttgctgtcaacaggtgtcgggagaagagcgccgtgaagaggaagaaagttgacgctgcggcgaggctcgcggcgctgctgctcatgatggggcacgatgggttcacctccccagaggtgtgtctgcattacctatttgcatcagggaatgtggattccgtggtgcttggagcggctctggctgaacttgatggcggggaggtagtcaggttgatgagatatctcaacaagtggattcggaagtactggagcttctcggaagcgcacacttgcccggaggctgtggaaaacctcagattggagcagtgtgacagcgtgccatcgtttggagcagtggctagggcgctaggagtgctgctggataatcatttttcacatcttgtgttgaatgctgatgtgagggaggacttgagggctgcggacttgatggtgagggagctcgctgccgaagcagagtcttctgggccaatcctagacttgctgcataggtttcaactggataagtgagaggttgatcttattctgtcgaaactatttacttttttgtacttccaaagccgatgcatggaaacttttaactgttttattgcattgcagtgatgagatacgtgttgcagcattgaatattgaagaactttgcaaattgtgatatgcttgtttagttgttgtgaaattctaacgtctatctatgatccaaccatccagatccaaacaagtctggtatcaactagcctcttggattttgtaggaaataatgagtggccttaaatatgaactggtctgaggcccaagcaaaaatcctgcattcagctgctatctcactatggctgttttcttctaaagtccttcgacatgtaagtatttgcttgttaatggtccctgcaactgctgccccccttttgattaatgcaacttatgtgattaagattg

SEQ ID NO: 110651 - DNA, 1584 bp, Zea Mays
ccctccccaaaaccctaacccatcgtcgaccggtccccgctctcgtggcgccggcaagatgaccctcctcgcagccatcaccaaccccgccgccgactcccgctccggctccagcgagagggctcaccctatcgtgctcacgccgggtgtcacgccgccgccgccgccatcctccacgctccccaccccaataccgtcttccacctggtcgctctccccagccgaccccaccctcgccaccgccgcttcctacctcgcggcctcgcttgcctcctgctcctccctcccgcagctccgcgcccttctcaccacctttatcaccactctgtcacgatccctcgcactcccaaccccgccggcggccctccccgccgccatccgcgctgtcgccccttacttccccgccgcaatcgcctcccttgtggcctccaaggcggtaagcctcgccgggcacgacatcctccttgctctcgcggaatcccgcctcctcccgcacccgccaccggaactcatctcgtcgctctgcgacaacgactgggtcgaccttgtctgcgtcttgctccgccaggccgccgacatacgttcctccgagatcctcgccgcgctccgttgcttcctctcgccggcctccgataaggcttacgacgccatgatggacgtcaagtgccgatggaaggacgccgcggtgcttgctgtcaacaggtgtcgggagaagagcgccgtgaagaggaagaaagttgacgctgcggcgaggctcgcggcgctgctgctcatgatggggcacgatgggttcacctccccagaggtgtgtctgcattacctatttgcatcagggaatgtggattccgtggtgcttggagcggctctggctgaacttgatggcggggaggtagtcaggttgatgagatatctcaacaagtggattcggaagtactggagcttctcggaagcgcacacttgcccggaggctgtggaaaacctcagattggagcagtgtgacagcgtgccatcgtttggagcagtggctagggcgctaggagtgctgctggataatcatttttcacatcttgtgttgaatgctgatgtgagggaggacttgagggctgcggacttgatggaaataatgagtggccttaaatatgaactggtctgaggcccaagcaaaaatcctgcattcagctgctatctcactatggctgttttcttctaaagtccttcgacatgcatgttccttcctcctgaggtttaaacagttctgccaaggattggcaagtgattgggatatgatcaacagactaaggaagcatggattcccaaaaaaaagataaccaaccaaatgggcctgattttctagtagctatagagctaaagtgtgaaactttggcaagagagatgggtctcagatatcccatgccactaggagtaccatttgcaggagcagtcgagcggtccaaattcctatcggatgctcttctactttcttttattgggccttcgtatgaaggggtaatattcgaactaacaaaagattggttatgtacaacagcattatttcaagaagcattattaatattattattattc

SEQ ID NO: 110652 - DNA, 838 bp, Zea Mays
cttttatagccccaaatggcctaggagccgtcagagttcatttggaagctcccagccttccctggttgcgggtgcaccggactgtccggtggcgcaccggacagtgaacagtaacggatctgattgacagtttccttctctggaacagctagccgttggtgcaccggacaggttactattcactgtcctgtgcaccggacaggtcactattcactgtcctgtgcaccggacacagctactattcactgtcctgtgcaccggacgctgcgactattcactgtcctgtgcaccggacgctacgactattcactgtcctgtgcaccagacacagttactattcactgtcctgtgcaccggacagagttactattcactgtcctgtgcaccggacagctactattcactgtcctgtgcaccagccaacagcacactaagtgctttttcctccgttctttctccgtttgacttcaacttttgggaggattttcctgagacttaaacaaacacatttagagtataatccaattgatttagtcctagaaacttacatctttcttgttcttctcctagcttttttgtttctcctccagcagagctcagaatggtactttctctacagaaagagttagagagcaaaccaaagcaccaaacttgtagtaagaggtgtatgcaaaatggttgaacactcaaaccttacatacttaacctttttcatcgttttacccaatttggcttgtttgaggtcgatgttggactctaaaccatcaagtcaacttgacttgatctagattgacatatctgagccccaacccccgttcacttctcgagcttgatcttg

SEQ ID NO: 110653 - DNA, 1948 bp, Zea Mays
gaacgtaaatcaatatttaatgaatttgtagatgatgtatctccaccaaacagagcctcgtgatgggcagcccaatctgttgacatcccaaaacggcccatgttgaagtaccatgtaggcctcataaccataccgcaccaaactcactctcaatcccccaacccaacaagacacgaacgaccacgacggagggcagcgatctcggtttttacccaaagacgaagccgacgataaggagaacagagactccggcgagccccagccacggtgaagccgcgcgaattgcaggagcgaagcaaaggagatgcttctcgaggagctgctccggtgccaaatccacgagtggtacccggccttccgtcgccactccatccccaccgtcatcatcccgctccccgccgccttcctccgctacctcgccggccagcgggcctaccccaacgccgacgccgacgctgaagatggcgctgatgaggagccactaccgttcctccttccggcgataacttccggccgccagcccttcgcgcccatccacgcgcaccaccccgaccccgactctctcctcaactccgacttgttcttcggctccagcagcgaagacgtcttcgaccccgacgccgaccacccgctccggccggaattcccggagctggaggtggccatcgacgccgccatcgccgagctaggcggcgccgcgctccccaagctcaactggagcgcgcccaaggatgccaccttcatgtctgccgatggcacgagtcggtgcacgtgcttcgccgaggttgccatgctgctccgctcctccgactgtgtagcccacgaccttgcctccgcgcgacaatcatgcaaggatttcgtgcgcccggagggtgctcgacggaatgcccaaaaagttagtgccggttctgaggaaggtgctcgaccaaatgccgatgggattcgtggctgcgaaggcaccaatggagcaccaagtaattcaagcaagacaggtgcggagggaggcaagacaaatgatggggactgtgatgttgaagatgcaaccgaagaagaacataacgagaatacttgggtggacgatgggttccaatactaccttgccctccgcaagtggtacccaggcctacgccctgagtcagagttccgatgcttcgttcgggagcagaagctggttgctgtgtcccagagagacccatcagcttactacccatcactgcctggatggagttccgaggtgcaaccgaaaattgaggctttcttcaacgaagtgattgagccacagtttgcttcaaacaattatacgtttgatgtgtatgtgaggacagatgggcgagtcaagctcatagatttcaatccatggggtggttataccttgccgctgctgtttacttgggaggagcttgaggagaaggggagagggtctgagctggagtttcgggtggtcatgcagcagggtgcagtgaggccaggattgatgacagctgtgccatatgatatgctggattggggtgaggggagtggctgggatgtttttctgaagaaggctgacgaggagcttgacagacagatatgaactccctggatggtgattcatgattgtggttcgaaaaaaaagtcttaattatgctgtaggcacacaatttaaagtgatgactgctgttttttttacctgctactgtgctacatactagcagtcacctcctttcttaaaattgctatgcagtctcttgccatttatacttttctctttttttttgttactattatggtgctacttagctgtcaatgcagatcacctcttagtctgattgcgtcatgtgttagttggaacctcccagataattcgtatgtggtttttagtggagctgatgttaagtaaaaatctgcagaaatgcatttgcagtgaaacttgtagcccttttgcccagctgtaatgaatatcccttat

SEQ ID NO: 110654 - DNA, 127 bp, Zea Mays
ctcttcatctacaacaataaacatgcatgtcttttctccatttttccaaaatttcttcgaaaccgtatgcgctttcccctaaaaccctaataaaccctaaaccctataccctatacccagtatgttg

SEQ ID NO: 110655 - DNA, 594 bp, Zea Mays
atggggaacacgccgtcgtgcataccgctggggggcggcggcggcggcgcctcgtcgtcgtcgtcggcgaccgacgccaccacggtgatccacgcggacggcaccgtcacccggctggcgcgccccgtgcgcgcgtcggagctcatgctggaccacccgggccggttcgtctgcgactccggccgcctcgcggtcggctgccgcgtccccggcgtggccgccgacgagctcctccggccgcgccacgcctacttcctcctgcccatggacatgctctactccgtgctcaccgacgacgagatggccgcgctctccgagtcccacgccgccacggccgccgccgcctcctggaagaggatcgccacgtccacccaccggagcgcgaccggggcccacgccaaggacgacgactgcagcagcgatggcgccagggtgtacccgatgctcgggctgctcgagaccgcaagtctcgccgcggataataatagtaaacatgaattacgcgccggccccgcaggcaagtcgagcggcgccgggttcaggcggcatcggtcgtggcagccggtgctggacaccatcgaggaggttccttga

SEQ ID NO: 110656 - DNA, 593 bp, Zea Mays
cgaggcattccatggcctgccccatggcgtcaaggcgagcaaacccaaaaacctcgcaggcagaaggcaaacgcagctgcgagcgtggcgcccctctcccactcccactccccagcctccgccagcccgcacacccatccctcgcgtgctcagggtttcggaatggaagccgaggccgcgaccaaaaggacgcgggagagcggggaggatgccgccgtggcggggatctccgcagtcatcccgggatggttctccgagatcagccccatgtggcccggtgaggcacactctttgaaggtggcgaaggtgctgttccaagggaagtcagactaccaaaacgttatggtctttcagtcctctacgtacgggaaggtgctcgtcctcgatggagttattcaggttacggagagggatgagtgtgcgtaccaagagattatcactcacctcccctttgctccatcaaagaccccaagaaggtgctggttattggagggggtgacagtggtgttctgcctgaggtttcacgacattcttctgtggaacaaattgacatctgtgaaattgacaagatggtggtagatgtcttcaattga

SEQ ID NO: 110657 - DNA, 248 bp, Zea Mays
gggaacatttggaaacggtatggatcagattgaccagagcgccagcagaatggaccgacctctcgctcttgaagtcgcgcatgacctcgaggaactcctcgtacttctcccgtttgtcctgaaacttatccttaactgccttaaggtagacgagcgcatcatttgtcgtcagcttctggttggtaaaggccgcaccggacggctgctgcggctgcgccggcggagcagcgccagcctgaggcggcggt

SEQ ID NO: 110658 - DNA, 198 bp, Zea Mays
atttccttatctttcaggtatgccatcacaaaagcttttgttatagcttttgtgatgactttcttctcagtgtttgacgttcctgtcttctggcctatactcctctgctactggattgttctctttgtccttacaatgaagcgccagattatacatatgatcaaatacaaatatgtgcctttcagtatcgggaagcag

SEQ ID NO: 110659 - DNA, 784 bp, Zea Mays
ggcgcgggagttcttcgcgcgcctggacgcgcagctcaacaaggtgaaccagttctacaggggcaaggagcaggagttcctggagcggggccggtccctgcggcggcagatggacatactcgccgacctcagggcggccagggccagggaggacccctccgtcgcctccgcttccgccgcctccgaggatgagtacacaaggtatgcgatgacgtcagcatcagacacggacgcgctgcagctgagcgagcaagaagaacaagccacgccgctgccgaccgacggccccggcgtcacggctcaggaggaccaccagcagcagcaggatctagaaggctccggaaccttcgcggtgaggccgcccttgagcgggtgcgggaggaagagcctgaagatcaccatcccactgaccaccccctccaggacgatctccgcgctgacggacatcctgtgggacgagctcgccatcagccacttctcctcctcctccaagaaatgcatcccggacgggaagcagagcgtcagcaagaccaagctccggcacgcggagaagatgatcaagcgcgccttcgtcgagctctacaaggggctgggctacctcgccacctaccggagcctgaacatgatggcattcgtgaagattctgaagaagttcgagaagatcaccgggaaggaggtcctgtccatatatctcaaggtggtcgagacctcctacttcaacagctctgatgaggcgctgaagctgatggacgaggtcgaggacatcttcgtccggcacttcgcc

SEQ ID NO: 110660 - DNA, 2342 bp, Zea Mays
ggcgcgggagttcttcgcgcgcctggacgcgcagctcaacaaggtgaaccagttctacaggggcaaggagcaggagttcctggagcggggccggtccctgcggcggcagatggacatactcgccgacctcagggcggccagggccagggaggacccctccgtcgcctccgcttccgccgcctccgaggatgagtacacaaggtatgcgatgacgtcagcatcagacacggacgcgctgcagctgagcgagcaagaagaacaagccacgccgctgccgaccgacggccccggcgtcacggctcaggaggaccaccagcagcagcaggatctagaaggctccggaaccttcgcggtgaggccgcccttgagcgggtgcgggaggaagagcctgaagatcaccatcccactgaccaccccctccaggacgatctccgcgctgacggacatcctgtgggacgagctcgccatcagccacttctcctcctcctccaagaaatgcatcccggacgggaagcagagcgtcagcaagaccaagctccggcacgcggagaagatgatcaagcgcgccttcgtcgagctctacaaggggctgggctacctcgccacctaccggagcctgaacatgatggcattcgtgaagattctgaagaagttcgagaagatcaccgggaaggaggtcctgtccatatatctcaagcactgaagctgacgacgctgctcttccgtccgattcgctgcgccgcgccgcgctgcactgcaggcgctgaagctgatggacgaggtcgaggacatcttcgtccggcacttcgccggcgacaaccggcgcaaggccatgaagtacctgaggcccgcgcagcgcagggactcgcacgccgccaccttcttcacggggctcatggccggctgcttcgccgcgctgttcgtgggctactgcgtcatggcgcacatggcggggatgtactactactactccaccccggcgccgccttctcgcgcccgcggtaccggcggcggctcggtatctgtgtcggtgtcggtgtccgtgtacatggagaccgcgtacccggtgctgagcatgttcgcgctgctgttcctgcacctgctcctctacgggtgcaacatggtggcgtggcgcaggtgccgcgtcaactacggcttcatcttcgagtcgtcgccgtcgcccgccggcggggagctcgggccccgggacgtgttcctcgtctgcgccgcgtccatggccgccgtcgccggcgtcatgttcgcgcacctcgccctcgtgctcaggtggggctaccacgcgtcgccgcacgtggaagccatccccgcgttcttgctcctggtgttcctgctgctgctgttctgcccgatcaacgtcgtgtaccggtccagtcggtttcagttcctcaggatactgaggaacattgtactgtcaccgctctacaaggttgtaatggtagacttcttcatggccgatcagctttgcagccaggtgcctatgctacggagcctggagtacctggcgtgctattacatcagtgggagctactggacgcaggagtacggctactgcaccaacaccaagcacatcagagacctggcctacgccgtctccttcctgccgtactactggagagccatgcagtgcgcacggaggtggttcgacgagggggacacgagccacctggtgaacctgggcaagtacgtctccgccatgctcgccgccggcgccaaagtggcgtacgagaaggacaggagcctggcgtcgctgtcgctcctcgtcgccgtgtccagcggcgcgacggtgtaccagctgtactgggacttcgtcaaggactggggcctgctccagcccaactccaagaacccctggctcaggaacgacctcatcctcaggaggaaatccatatactacctgtcaatgggactgaaccttgtgctgaggctcgcttggctgcagaccatcatccatccaaattttgggagcttggattctagggtcacttccttcttcctagcggccctcgaggtgatccggcgagggcattggaacttctataggctggagaatgagcatctgaacaacgctggcaagttccgtgcggtgaagacggttccactgccttttcatgaagtggacgacgactaaatgcacatctactgaaccatctgaccgtcactgctactgctagatcgaacagctttgttccttcaacactctgctgaaattttttttgaactcaagacgtggagaattgttcagatccttagctgttcgcctgttcttgcgtgtaattcgttccttcagggagtggcgtctctatgtaaccgaagatgcttgaatc

SEQ ID NO: 110661 - DNA, 1184 bp, Zea Mays
atggcaacgactgcaccaatgcctgcctttgcacctgaagacattccgccactgtctactggggagccgctgctctgtgaggctggactagacgacttgtttgaacccccagtcgttaccgggcgaactggatcggctgccattgctggggctggcaccgatggagtgctaccagagcctggcgttgtcgtccctggaggtgaggggctagagggagtggggatcaaaggatctgcggatgtcggtgagggactgctcgtagagggtttgacaggaattccagaaggtggtggtgccaggggtggaggtggctgcgctaatgtcggcggcgttgggtcagccggcgggttgggcgttggcagaatggttgggggtggcgacgcggccgcagggggccttatatgtataggcgacgcctttggcggggcagcaggtgtaggtggtgggggcactgcaaccggcgccggcggcgagggtgggggcactacggctgctggggcgggtggcggagaggcaacaagtggcggtggtggcacggcgtctggaggaggcggaggcaaggagggcggtggagaagtgagctgtggcggtggcgtggatgcggaggggacggggggaggcgcgaccggcgacgagggagggtcggccggggtagcattgggctgcgtcaccggggccggggaggccggcgtgggcgtggtggttgccggtgacggggttgcgctggaaggcggcaagggggccctgatggtgcccggggaaggcgaaggtgaggacgccattggagcccagcagcaggctagaaagcactacagtgccggctgtgacagctgagctgctgccttgttggtgggattggaggagagaaccatggcacacgctgcaatccaagggaggatcgacctgccaaccccgcggattcgcgcttcaaccaatcgaaattcctcttgggcctttggcggtgaagaagaacgcggaggaggtgaaaactcacctccagcaacacgcgcagcactgcattcgcaaacaaagatagcctctcttcaacaccaaaacctgctggatggaaagaattcaaaccatctagaaactgagccaagatcccgaccttgttccacgcggattctgctgcgaaggagaggctgcaaaggaatgacggaattccgaaagaacaagagaatctt

SEQ ID NO: 110662 - DNA, 93 bp, Zea Mays
ctcccatgcatggaataatcgaactaaacgatccatctacagtaattcagccaaaacatcaatctcagtcaatagcgacgtatataatcacta

SEQ ID NO: 110663 - DNA, 111 bp, Zea Mays
cacccggcttcagctcacgtcatttttgcacaatagctctcccaccagtccaaattattttttttggtcctgcccgcaatccctagccacgtacaggagagataaactata

SEQ ID NO: 110664 - DNA, 801 bp, Zea Mays
atggccgcgcagagcagcgccaccgccgagatgctcgttgccatcgtcattgccgtgttgggattggaagattcgagacttgtctgtgtgcagatgctgcgtatggcctgtgtaattgttgtcgataaaatgtcgcatagtattttattagtatcaaaatatgtttgcaaattcacatgcttctaccgtttcgcatgcgtcgccatgtgtttgagcacctggttcatgatgtgcaacaagtcgatccctacttcgttcaacgaccaaactgtgccggttactgaagaaaacctcgcaacactatttataaattgtggacaggttgtggagtgtcgcatgtgtggggacccaaattcagtccttaggtttgctttcatagagttcactgatgaggtcaacgaaacattcctacccagggtatgcaaaccttccggaaccaacatgcttgtcttaagttcatggctcaatgttcatgctctatctgatatgtctgacgatgaacgtgaaatgtgtgcaaggactatctactacacaaacattgacaagaaggtcactcaagcagatctaaagttattctttgagtccatatgtggtgagctaaaagtttgcagaaatggcaccatcaagatcgatctagagactaacaagatcatggacttcatcaagtttgacgtcggcaacgcggtcatggtgaccggcgggaggaacaccgtgcgtgtaggagtgatcaagaacatggagaagcacaagggcagcttcgagaccatccacgtgctgcttggagctttttgctatgtctag

SEQ ID NO: 110665 - DNA, 661 bp, Zea Mays
gcacacacacgtccaggacttccagggtctcttttcagttttaaggtccacggtccatcaggggccacggcaatggccgcttcaacgagcagaacatcacccggaaaccacaaggttctcctcgccgctctgctcggcatcgccgccgcagcctccttcctccccggatcgtccgcctgcacgtccctggtcgcccagacctgtggcaggacgtccaaccagcgcctctgcgtgtccctgctcgagtccagcaaccagagccgcagcgccacgacgctacggggcgcgaggccgcgagggacgccagcggaccgcctggtggctaggtgcaacgcgctgtacttggactgcctccgcgccgcggcgagcgcgctggccagggtgacctacatgccggcgtacgacaaccgcgtggccgacgctgtgagctccctgcgcgtgttccccgagaagtgccagggcctcttcgacgcgcaggggatcgcgtcgccgctggagaaggtgaaccgggtgactgaggagaagctgggcatcgcgtcggagatcgttcacttgttgcgctagaaccgggtctcgctccctcatggctcatggctcatggcatggtgatgagcgcacgcacaaatagaggacacgctactgggtggagctgataagtgcg

SEQ ID NO: 110666 - DNA, 1940 bp, Zea Mays
accaacgggatctgagcatctgaccagccgcttgctagggtttcgtcccccctctccctcggccagcaccacctcgcatccctagctctagccttgctcgccccgggatcctgtagcggccatggcggcggaagcgccaccgtcggcttcggcgtcttcttcctcggccccgcggccgcctgccgcggcggcctctgcctccggcggcggggcggccgggtccgcggagtcgtacatcgggagcctcattagcctgacttcgaagagcgagatcaggtacgagggcgtcctttacaaaatcaacaccgaggagtccagcatcggcctgcgcaatgtgcggtcctttgggaccgaaggtcggaagaaagatggaatgcagattcctgctagcgacaaagtatacgagtatatcctctttcggggaactgatatcaaggatttgcaagttaagtcatcaccaccgccgccgccacctcaagcagcttccctgcacaatgaccctgccataatccagtcacattattctcaaccagcatcaacatcgtcaaatttgccttccgctgggggtgcagttttaccagacctcagctcccaggcagttcaatatgggcttcagaggccaacttttcagagtaaccttcctctataccaaccagggaatgctccacggggctcttcagcggcacctccagcaggaaatgctccgtggggctcttcagcagaacctccagcaggaacgacactttcggttccctcaatgtactggcatggatactatgcgccttcaagtgggctgccacctcatttgcagcaacctctgctgcttcagccaacaccaggattgtcagttccccagaatcttcaatatccaggactaaatccttctttgccatctgggatgcaaaagctgtcagaactccaaccttcattgatgccacctattaatagtcaaggttcttcaggtatcctgcctactacaacagctcctgcttctgctaccttattagctccagaaagctcaaagcctcaggtgccaaacatgggatctttgtttactcctgcaacatctcttggtgcaacttttccttatccaagccagccaacaccggtggctgaaactagtgcaacagtgtcacagaacataacttcatttagtagcaacaaggctactgctcttccaggctcaacactgtcataccaaactgcatctcagtctgtttcttcgactattgccccatctagctcagcacaagtggagatggctgtgcctttgttggcatcatcaggtcaactattgcagaacacatcatccatgctttcatcatcacactcgatgcaggcaccattacaggtagctagcaaagaagtcaagccggttgagccaaaggctaaggttgcagaaccattactgcctgaccctttgctaccagacccaccatcacagtctctgcctgaaaataaggagcctatattgccattgcccaaacagacacctcagaagtacaatggatctggtttgcacaaccatcacaactttaggggccgtggaaggggtagagggagtgcgttttcacagtcagtaacaacattcactgaagaatttgatttcacggccatgaatgagaagtttaacaaagatgaagtctggggtcatcttggaaagaaatcgcagtcaagggacaaggatggtgaggtgggagatgatgtgtttgatgaagacctggaggttgaggaaactgataacccagagctatctgttaagcctgtttatgtcaaggatgatttttttgattccctctctagtggaacatttggacgtggaggaccaaatggaaggggtagaccttctgaacggcgcagagtagatacagaggtttaggaactaccctttccctcccttgatttttctgctagtgctttacccatttttattggcgtgc

SEQ ID NO: 110667 - DNA, 2764 bp, Zea Mays
accaacgggatctgagcatctgaccagccgcttgctagggtttcgtcccccctctccctcggccagcaccacctcgcatccctagctctagccttgctcgccccgggatcctgtagcggccatggcggcggaagcgccaccgtcggcttcggcgtcttcttcctcggccccgcggccgcctgccgcggcggcctctgcctccggcggcggggcggccgggtccgcggagtcgtacatcgggagcctcattagcctgacttcgaagagcgagatcaggtacgagggcgtcctttacaaaatcaacaccgaggagtccagcatcggcctgcgcaatgtgcggtcctttgggaccgaaggtcggaagaaagatggaatgcagattcctgctagcgacaaagtatacgagtatatcctctttcggggaactgatatcaaggatttgcaagttaagtcatcaccaccgccgccgccacctcaagcagcttccctgcacaatgaccctgccataatccagtcacattattctcaaccagcatcaacatcgtcaaatttgccttccgctgggggtgcagttttaccagacctcagctcccaggcagttcaatatgggcttcagaggccaacttttcagagtaaccttcctctataccaaccagggaatgctccacggggctcttcagcggcacctccagcaggaaatgctccgtggggctcttcagcagaacctccagcaggaacgacactttcggttccctcaatgtactggcatggatactatgcgccttcaagtgggctgccacctcatttgcagcaacctctgctgcttcagccaacaccaggattgtcagttccccagaatcttcaatatccaggactaaatccttctttgccatctgggatgcaaaagctgtcagaactccaaccttcattgatgccacctattaatagtcaaggttcttcaggtatcctgcctactacaacagctcctgcttctgctaccttattagctccagaaagctcaaagcctcaggtgccaaacatgggatctttgtttactcctgcaacatctcttggtgcaacttttccttatccaagccagccaacaccggtggctgaaactagtgcaacagtgtcacagaacataacttcatttagtagcaacaaggctactgctcttccaggctcaacactgtcataccaaactgcatctcagtctgtttcttcgactattgccccatctagctcagcacaagtggagatggctgtgcctttgttggcatcatcaggtcaactattgcagaacacatcatccatgctttcatcatcacactcgatgcaggcaccattacaggtagctagcaaagaagtcaagccggttgagccaaaggctaaggttgcagaaccattactgcctgaccctttgctaccagacccaccatcacagtctctgcctgaaaataaggagcctatattgccattgcccaaacagacacctcagaagtacaatggatctggtttgcacaaccatcacaactttaggggccgtggaaggggtagagggagtgcgttttcacagtcagtaacaacattcactgaagaatttgatttcacggccatgaatgagaagtttaacaaagatgaagtctggggtcatcttggaaagaaatcgcagtcaagggacaaggatggtgaggtgggagatgatgtgtttgatgaagacctggaggttgaggaaactgataacccagagctatctgttaagcctgtttatgtcaaggatgatttttttgattccctctctagtggaacatttggacgtggaggaccaaatggaaggggtagaccttctgaacggcgcagagtagatacagagacttttggcgaatttccacggcacaggcaaccctaccgtggtggcgcccgaggttaccgtggcggtggacgttcccgaggttcatattatggtggcagaggctatggaaacacagggaccggaggctatggaaacacagggacaggtggccctggaaattcttattctcaccggggctatgggagagattgattatagcagaaatgtgcaggcaaccatacttgtgggtgttgtagtcttttaccacatgtatgatgtatcccttactactggtgcagcggtgagaagtcgttttcccactgagccgagccaaaggtttaatgggctctaaattttacactataagatttaaggattggattaggatcggactctatttctattcatttttaactaaaatttatttagggccctaccattctgtgaagaatcatttggatcctaatcaattaccacccctaggttttagattcaacgcagcaaaagaatgtagatgtaagacttaccttgttattcccttggagagtgcactcgtgggagtcgccagcactaggtctgcgagtctgtccattatgcatcccttaatattcaacaaataaatggagcttaccagcatgtcacttgggtgtgccttgtccagacaaggcgtgtagcgtttggtcattgacgtggtacacccgtgttctgtaggagagttaccagtagatgagcggatgatgctggataggtataagcttgtggcccttgatgtgtataccttacgcttgggatttagttgtataggccgatctcgatgcaggcatgcaacgcctggcctagctcagtaactttttcctttaacaaagttctgccatgttgtcttttgtattggtgatagtgtaacttaaaaat

SEQ ID NO: 110668 - DNA, 933 bp, Zea Mays
atggcggagcaggatggcgacgcggggcagaggccacccgactccgttccggtcccgctggaggcggaagcttgcgagaaagggggcagtgatgaggttgtcgttttctttgttcaaatcgtctcaattgctaatggaatggtcaacccagttcgggaacattcctcggtgctaatgaagactcaactagaacccttgcagaaatcgagaagaagattgcaagggctaccgtgttacccagaaatcatggggaggtctcctattcttcagctgaagatcatacttgctgtggagcctttgaccccttcagagggaccaaggattggagagaacattttcggttacacgatagtggacatcttcagtagcagctgccgtggccaccataagaatcctccttcagagccatatgtccttgaggttaacagggacgtatcattttataatttcagaacaaagcaggttcatgaatttaccgcaaggttgctagatattcatgataagatgatgttgataaataataaagagacattagatttttcgtttcaggtggttggcaatgcagtgatgctcggtgaaatcataaactacgtgcagtccctacaacgacaagttgagtttatgtccatgaaactggccaccgtgaatccccaggtggacttaaatagcctgcctaacgtcctccctaaagattcttgtggtccgccacatttctcgctggagacctcaggcgcttcgttgtcgtacctcagccagcctcaccatggaagccctcttggctgcatggacaaccagagttgtatgcatccacttgacacgacgttttgcctggcgataaatctgcagtatcatttcctcaacggtgttagcgatgcatcgtctcagacctccatggaatccaaggaagaacattacccaagcatgaccaactaa

SEQ ID NO: 110669 - DNA, 3172 bp, Zea Mays
tttaacaccaatgtaagcaaaactgtagttatttctggtaaaacaattaacactggatccgagcatagactgatagacacaagtagtagcagtagtagtctactggttcgaagaggtgggagagacaaaaacaaaaacaaaaaggcagcctgtgtttactttgctcgctcctaaatatgcacaactgcaaagaaaccagcaagaatgcgccggcggtttatagttccccgctactgcaccgctctctgctgcaggctgcagctttgactaccaactcatacagtactagtactatactagagtactactacgccattagcacggtggttgcataggccgtggtctggaggtctctctcagctcagacgaggatcgtcggagcaagcagcagcgcgtgcagcctctgggagaccctggcggcgtcgacgccgatcctggggctgagcgcctgcgagtggacggtgtagaatatcttgtccccgatgacggagaagctggcgctgaccacctcggcgccctcctgctccagcacggtgatgacctcgtgcagcttgaagggcctggcggcctcgctgatgagcaccacgtccagcgtcccgtcctggcaccgcacctcgatgaccggcatgcgcacgcctccgccgccgccggtggacccggccgccgcccccgccttccgctgcttcagcgcctcgatccgctccttgagctgcttgatgtacgccgccgcgctgtccagctggtccagctgcgtcaccgcgtcctgcgatgggaacatcgagctactgtcagtgtcactgtgccggggacaggacaggaggttctctgtctcgccagaaatcccataatttccttacttttatttaaaaagctttgatgaaaagattagcaggtgcaggggcgaagctaggttgaatgcggtggatgcagatgcaacctccacaaaatgcaaatcctataaatttaattaaaattttactatatatgcacccctaaaaaattcttatgcacctaaatacacaatgctcaattttgctctagcttggccattgagcaggagcatgccatgctatatatattgctatttctgactgtctccttttttttactataattggagcaacatgtcagtgcatgtataaacagagtaccagtatactgtagaaggagacaccacgccagtgctcgctgttcagctacagctcagccgatggagactgtagtttggtttcccttgcgcacaaggggcatggcacaggatggtacctattttctgactgtagtttggtttcccgtttggtaggtggatcgaggaatcgtggcgtagcacaggaataatcaggcgagtgcgggtattgtttattatccgaccgaatggtccctattttctattgcgcccacgagttcctcctctcgggcatccggcacgtgcgcctaagccaaataatgacgtgacgtgtgacccccgagcaaacccgcgtggctgtcacctgtcaccggagaggagggccccaccacgtattcattcattcacgtgaagtggaacgtgggtgaatggagtggacctcgagggagagggaatctcagtatggtctactatttcagtgatgtgtgtgtggtctatacgccctccgtccaaaacaaatgtcgttgttctcgctttggctctcaagagagttgagacttctcgcgttggctctcaagagagttgagactagctaaataactcggcaaaccaaattttggctacttaatagtaaaataactctccaacagattagctatctgattggccaaactatctggctcttcaaattgactctatcactagctaaatttggctagtcacttgaccagccaaactagatagatagtctattggagtgagatgctacatatagagtgcaatctttatgaaaagttaaatagataatcaaatatagagctaaaaatgaggagtctcttgaagacgctcttaaacgttttcagctttgaatttattatcagatactctatctttttttatttgttgcgttttagctcaaaataaattagtaagccacaaatatttaagaaacggatgtagtatattattaaatttacttttataataatttatctagatgtattgctgatatcgttttaaaatctacataaatttagaatagtgatcacgcggcccttttttttggacggagggaagcagtgttttctgcctcgtagaggaaacgtgactgaaaacgatggtgattggtggcttatgcctgattgcctggctcgatgcgcggccggtcgcggtggggtgtctggggtggggtgggggcatatactcacaaacaaaaacagcggacagctaatcagatcgaatcgattgggtgtggcaaatcgctgatccagagctgatgctttttgtcctttatttgtagtaataacagtaatcaaaacagtaaaaggcagtctcgttcccgctctttttgcacactcgttttgaccctttgtctgttttacacgtgctaggccgcgaatgacttgaaacaggggtactgtaaatgttttatgctaggcgagatggataatattattcttatactatggcttatccggctccaactataggcaggactgcaggaatatatggctcagtttcattgcaaacattattgtcacaggttgggagttgaagattttgacgctactagttattggttgtcttttagaggattggagggttttaaggaggggaactgattgcgacatgaagaggatattaaccgattgtatggatttgatgtgaacaattcgttttacagtgcattcattgctctccgacactgtgtaataacacgtcgttaagttggcttctggacttctcagtactatcatttacttactagtacctatttctaaaacttgtggcgaggaaggccatggatgcagtgattcggaatcggccagttcgttgcgcttgcgcccgatagagcaatgaatgtatggtccgaggagatctgatgggctcggaaccgccgtgggaagtggggggggagcgaggaatcgagggcgagaggttgctgttgcctttttacctgcttgttgccgggattggaggacaccgccgccgacgcggcgtcggagaggagggaggcgtgcgtggtggcggcggcgggagggatga

SEQ ID NO: 110670 - DNA, 602 bp, Zea Mays
ctcctaaatatgcacaactgcaaagaaaccagcaagaatgcgccggcggtttatagttccccgctactgcaccgctctctgctgcaggctgcagctttgactaccaactcatacagtactagtactatactagagtactactacgccattagcacggtggttgcataggccgtggtctggaggtctctctcagctcagacgaggatcgtcggagcaagcagcagcgcgtgcagcctctgggagaccctggcggcgtcgacgccgatcctggggctgagcgcctgcgagtggacggtgtagaatatcttgtccccgatgacggagaagctggcgctgaccacctcggcgccctcctgctccagcacggtgatgacctcgtgcagcttgaagggcctggcggcctcgctgatgagcaccacgtccagcgtcccgtcctggcaccgcacctcgatgaccggcatgcgcacgcctccgccgccgccggtggacccggccgccgcccccgccttccgctgcttcagcgcctcgatccgctccttgagctgcttgatgtacgccgccgcgctgtccagctggtccagctgcgtcaccgcgtcctgcga

SEQ ID NO: 110671 - DNA, 2544 bp, Zea Mays
atggctcgccccgcagaggcaggggacccttccaacgatggagcacctcgccccgcactggcagggggcccttccatccatgagagcaccgaggagccgtggagccgcgcccgaggaggaccgccgaggccgggcggccgggcacgcgccgggatgcacgggtgctggggccagaccgcgcccgcccctgcgccggatccgaggccgcgcccttgcctagaggaccgccgagaagccagccgtggagccgcgcccgaggaggaacgccgaggccgggcggccgggcacgcgccgcgccgggatgcacgatttggggccagatttgggggaagaggagaggagaacggggtagtatggcaatgccgtcgtccccgccggcaatgtcgtcgtccccgccgctgcggacgagcggaaagcggagaaggcgaagaagcaggacagcgtcgatgccgcggcgagcgatgtcggcagctgcgtgtcgctctcactcgccaccgacgaacggtccgaggcggcgtcggagtcgtcggtcgcgaccagctcggtggtcgggccggagcgctcaccaaggacgaaaccggccaggaggcgcccagcatccgccgatctggggtcagcgcggcgcgagcgcgaccgcgaccgcgccgtcgcggcctcctacggcgtccgctcccgcagcgcgcgggcgtgggcgtccccgccgccgaggcaggtgccgcgggaccgctccgtccgacgttcgccctcgccggcagcgaagcggcgggcgttgtctgagccccgccgcgccgccagcccaactccgtccgtacagcgcaagccgcctgtcccggcaaggccggccggccgcgtctcgccgcggcggcgggcacaatttaaaggcgacatcctccgccccggatcccgcgtccgcgacatcctccaccctggatcgcggcgcccggctctctccgcgtggatgtgtgccgccgcgccggaggagcccggcgacggcggcttcgcctctagcatccccctgtgctccactcccccccgcccccttcctcctccgccggtggggcagcggtggacaccggatcgcgccgcgtgggcaacttaattagagggccggcgacggttggtgctcgaatgcgatgtggcgtggcgaggttaccgcgggcgccgcggaggtggagggggaaggggaggacgggggtacaggcaagagagcgcgtcgcgatggacgatctcgtgacctacctctctctctctctgcctgcgttctcctggtgctgctctccctctcctcccctgctttgacctccccgcctttccctaccgtttcttggatttctaggatccagacaaccgccgattgtgagcctgccttcctgcctacctgcgtacgtacaggagggaccttgggttatccgagtgcttggtttctcggttccgcggctttcgctgctgttggattcgccgagccggagctgccggagatgaccgtctatgagctgaagctgcaggcgagggccagcggcggccacgacgccaaggaccagttccctgtcggcatgcgcatgctccaaatggaggcccctttcttgtcctgcgatagcgaggttgctgacaagggattctggacgaagctgaaagacgctatccaccagttcatcgaggagctgatggcaccgcccaccaaatctgcgataattgggttcgttgttggcctggtctcatggctgaaatccctaatcgtcggctacagagctcctttcaaagttatacaggattccctccagctgatgggcgacgacacgatcccttgcatcacccttatcctaggtggaaacctgactcaagggcttcggaagttggcgctgaagtgtgtggtgatcgtcgcgatcctgtgcgtccgcttcgtgctcctcccgctgatcggcatcgccgtcgtccgcgccacgtacgggctcggcttcctgtctcgggacccactgtaccgctacgtgctgatggtgcagttcgtcgtgcctcccgcaatgagcatcggaacgatgtctcagctgttcgacattggacgagaggaatgctccgtgatttttctctggatgtacctttttgtcgcggttgcgctgacggcgtggtcgacggtcttcatgtctgttctgtcttgattgaagtcggtcactggaaccaatgcacagtagcattttctgagcctattgttgctcaaggcattcagcttagcaacaggaaaggaggggatggtgatgggtctcatgtctcaatgagcaggagaaaagctaaaggtgacatacaacagtatatatacacataggcaatagtagactatgatcatataggtaattgtttattaatttattgtgttgggctgatgggtgatggctgacctattagtcggcaattattggcatagttcaaacaattcatggaagtagagggttccattttgtaccatgtatacacatgaagaaacaaggaatcatccctacagaaaaacaaatgaagaagggtactattattcttgagtatttgattagtaaa

SEQ ID NO: 110672 - DNA, 1861 bp, Zea Mays
atctcctttccgttcgccaattcgaaatcgaatccgttccctaattcgaaatcgaatggggtcggtcttgtcgtgcgtgcgtggctgcgcgagcgacttgactgcacccgacccccctcctcccagtccccacacactgcacgccgccgccgggtcctcctagggtttcgccgcgatgtcgctccggccgagcgagcgggagcagatgcggaagggcaactacaagcagacggtggacgcggaggagagccgccgccgccgcgagggccagatgatggacatgcgcaaggccaagcgcgaggaaagtctccagaagaagcgctgcgatgggtttcccgcctccgccgccggtgtgccgccgatgggccactccaccgcgctccagcagaaggtgcggtgccccctcccttgttcttcctggccccgatctgatccgctctctgtgttagggtatgggtgacgtggtggcactcgatctgctgggttcagatctgattttcttggtgacgggatggcttgccggcgatggtgcaggccgtccactccaacgacccctccgggcagcttgaggccaccacacagttcaggaagctgctttctatagttgagattgggatcttatgtgcagttagcattccagatggatagagtttaggggttgagatttgggccatgctcgaggtattaggccatacccaaacgtgagggtatggtcagttgtagctgtttcgggcaattgttgtatacaggacttgacttgtggattgtgagctatcaaaattagtcgttgcaccctctcattttcagattacttaatttactgtctcgtcagaaaaaaaacaaaccctatcctatggcctctgcaacatgcatatgaccatgtatgcccaaaagttctgaaaaaagttatactcctgaaagcatttgatttcatgaaccactattctattttttccagtagtgttctgcttgcagctggggcaattatcattgcatccatgtgtgtgtttgcgcatgcatgtgtgtgttatacattgttttattgtcttaaaatggtatatgcagactatgtgtgtgtttgcgcattagtgtgtgttatacattgttttattgtcttaaaaaggtcatggagagtctgcgtacctcttttcatattcttgtacatcgtagatagcagctttgatatcttgtgggattcttgtatttgttggtgaatccagatgagtgcatggtacttctttcttaattcccactacaactttatgtgaaagttaagtagtaacttgctgattgagtttccataaatttctctcgtagtcccccaatcgaagaggtgatcagcacaggagtggtgtcgcgattcattgagtttcttacacgtgaggaccatccccaactccagtttgaggctgcatgggcactcaccaacattgcatcaggcacatcagagaacactaaggtggtcgttgagagtggtgctgtgcgcctgtgcccatctttgtcaagctactcaactccctcaagcgaggatgttcgtgaataggcatgcactaaattacaagagatgtgtcttattatgacccggggcagatccagaatttttctatgacccaagccaaatctaccaaattttcttctttttattttatcttaactattttgtaccatattaaatagagacttatatagagttacatggatcaagccctgggccacagatcgggtggcctgtggtgtagatctgccactgattatgactatggatgagacttttgtgatgtaattgatgagactatggatttaaatattgttatgtgattgtgtgtgagatattttatgtgaaaatatgttgtgctatata

SEQ ID NO: 110673 - DNA, 951 bp, Zea Mays
cctaattcgaaatcgaatggggtcggtcttgtcgtgcgtgcgtggctgcgcgagcgacttgactgcacccgacccccctcctcccagtccccacacactgcacgccgccgccgggtcctcctagggtttcgccgcgatgtcgctccggccgagcgagcgggagcagatgcggaagggcaactacaagcagacggtggacgcggaggagagccgccgccgccgcgagggccagatgatggacatgcgcaaggccaagcgcgaggaaagtctccagaagaagcgctgcgatgggtttcccgcctccgccgccggtgtgccgccgatgggccactccaccgcgctccagcagaagtcccccaatcgaagaggtgatcagcacaggagtggtgtcgcgattcattgagtttcttacacgtgaggaccatccccaactccagtttgaggctgcatgggcactcaccaacattgcatcaggcacatcagagaacactaaggtggtcgttgagagtggtgctgtgcgcctgtgcccatctttgtcaagctactcaactccctcaagcgaggatgttcgtgaataggcatgcactaaattacaagagatgtgtcttattatgacccggggcagatccagaatttttctatgacccaagccaaatctaccaaattttcttctttttattttatcttaactattttgtaccatattaaatagagacttatatagagttacatggatcaagccctgggccacagatcgggtggcctgtggtgtagatctgccactgattatgactatggatgagacttttgtgatgtaattgatgagactatggatttaaatattgttatgtgattgtgtgtgagatattttatgtgaaaatatgttgtgctatatagttgttgatatatttgttatgttgtggaatgtggaataaaataaaaataaacaac

SEQ ID NO: 110674 - DNA, 1764 bp, Zea Mays
gacttgactgcacccgacccccctcctcccagtccccacacactgcacgccgccgccgggtcctcctagggtttcgccgcgatgtcgctccggccgagcgagcgggagcagatgcggaagggcaactacaagcagacggtggacgcggaggagagccgccgccgccgcgagggccagatgatggacatgcgcaaggccaagcgcgaggaaagtctccagaagaagcgctgcgatgggtttcccgcctccgccgccggtgtgccgccgatgggccactccaccgcgctccagcagaagggtatgggtgacgtggtggcactcgatctgctgggttcagatctgattttcttggtgacgggatggcttgccggcgatggtgcaggccgtccactccaacgacccctccgggcagcttgaggccaccacacagttcaggaagctgctttctatagttgagattgggatcttatgtgcagttagcattccagatggatagagtttaggggttgagatttgggccatgctcgaggtattaggccatacccaaacgtgagggtatggtcagttgtagctgtttcgggcaattgttgtatacaggacttgacttgtggattgtgagctatcaaaattagtcgttgcaccctctcattttcagattacttaatttactgtctcgtcagaaaaaaaacaaaccctatcctatggcctctgcaacatgcatatgaccatgtatgcccaaaagttctgaaaaaagttatactcctgaaagcatttgatttcatgaaccactattctattttttccagtagtgttctgcttgcagctggggcaattatcattgcatccatgtgtgtgtttgcgcatgcatgtgtgtgttatacattgttttattgtcttaaaatggtatatgcagactatgtgtgtgtttgcgcattagtgtgtgttatacattgttttattgtcttaaaaaggtcatggagagtctgcgtacctcttttcatattcttgtacatcgtagatagcagctttgatatcttgtgggattcttgtatttgttggtgaatccagatgagtgcatggtacttctttcttaattcccactacaactttatgtgaaagttaagtagtaacttgctgattgagtttccataaatttctctcgtagtcccccaatcgaagaggtgatcagcacaggagtggtgtcgcgattcattgagtttcttacacgtgaggaccatccccaactccagtttgaggctgcatgggcactcaccaacattgcatcaggcacatcagagaacactaaggtggtcgttgagagtggtgctgtgcgcctgtgcccatctttgtcaagctactcaactccctcaagcgaggatgttcgtgaataggcatgcactaaattacaagagatgtgtcttattatgacccggggcagatccagaatttttctatgacccaagccaaatctaccaaattttcttctttttattttatcttaactattttgtaccatattaaatagagacttatatagagttacatggatcaagccctgggccacagatcgggtggcctgtggtgtagatctgccactgattatgactatggatgagacttttgtgatgtaattgatgagactatggatttaaatattgttatgtgattgtgtgtgagatattttatgtgaaaatatgttgtgctatatagttgttgatatatttgttatgttgtggaatgtggaataaaataaaaataaacaac

SEQ ID NO: 110675 - DNA, 2292 bp, Zea Mays
cgctcggcactttccaatcaggccgccgtcctccttatctgaatcgcgtgccttccaggcttccagccctctgcccgctgtgccccacgcccggccccccgatccgacccacccagcgccatgtcccccgcgtgcgccacgccggcggcggcgcgcccgctcaacacggttccgacacgccgctcgccgccctctgccgcgcgcccgccatcggccatccccgcccgccgctccgccggctgctgcttctgcgcctcctcctcatcctcggcatcgtcgccctccacctgggactggacccgatggagccgccacttcgacgaggtcgaccaggccgagagctacgcatccctcctccagttccagctggaggaggcggtggagaacgaggatttcgcggaggccgccaagctcaagagggatatcatagcggccacaggaaacgacgccgtagcccacgtcatggccgaactcaagagtgctatagaggagcagcggtaccaggacgcctcgaggttgacaaggcttgctgggaccagcttggtaggttggtgggtgggatatgctaagggcattgatgattccattgggagaattgtacgaataagccctggtgttggcagatatgtggccaaaagctacagcccgaggcaattggtcactgcatcttcagggaccccattgtttgaaattttccttgtcagagaagatgacaagacatatacaatgaaggtagtacacttgcgaccaacaaaaggaactttaggtgcatcatccatatcatcagcaataacagaaagcccagcaacggtagagacaccagaaagtagtgctatatctgatagtattacagaggaggcaaatatagatactccagtaaaaggaaatggggatgctgaagagaaagagcaagatgttggtagcagcaaggatactagtgttgatggatttaaaagtcttttgaatttttttaagtctcgaattcctgaattcaaagttcaggtgataaatgttgatgtgtctgaggaaactgaattggctgcaaattcgtccgaagaatcagtgcaagacgatgtgaagagtactccagaaggctcattggaagagccaaccactgaggaacttgagcaggaggaggatgttccagaagaagatatggatgaagaaagtaaaagtacgaaagtgaagctttttatcagtggtgtggttcacaataaagaagatgctggaacaaaatcatacgttcgtgttccagctgaaataaataacatggaaaaagactcctttgacctgtacattcctggaaatggttctggtcatgatctgcctgaaacgaaggctgcaaaacagaaagttgcagatatggctgctaaattagcctcagagcttatgccgtctgatgttgccaaggcattatggggtacaaccaagagttcttcaaagataaataaagaagttcaggagcttttaaggcttaccttaagcaaggcccgagtcaagctgaccgatgataccttttttaaccggatcattatggacactaacagcatggatccatttaatgttggaatgctgggctaacataggtctctatgtgggagcatttagtccatatggaccagaaattgtgcagctccgtcggaagttcggccactggaatagttccgatgacgttgagtttttcgagtatgtcgaagcagtaaagttgactggtgatctgagtgtccctgctggccagataacattccgtgcgaagattgggaagggcaagcgacttgagaatcggggcgcgtatccagaggaattcggtgtgattgccagttataaaggtcagggtagaatagctcagcctggattcaaaaatcctcgatgggtggatggtgagctgttggtgctcaatggcaagagtacaatcccacaccttggaggcgcagagctcggtttcctgtacagtgtacctgagcagagttttctggttctcttcgatcggcttaaccttcccgagtgttgagactcctaaaaggagcagatttctcacatgtagattgcatgaacgcacagaggctggccccagttccaagtgttcgaacaagtctgtggcctgcgggcccttttttccgtcgtcctctgggctattttgctacctgagattagggatgaaagtggtaatccgaactgttagaacaaatttaatattttaaaatagatatgtataaaatttgatgttgatcttttcttatgttatcaagcacattagtacaaatatgaataaaatattatataagttgtttt

SEQ ID NO: 110676 - DNA, 2343 bp, Zea Mays
cgctcggcactttccaatcaggccgccgtcctccttatctgaatcgcgtgccttccaggcttccagccctctgcccgctgtgccccacgcccggccccccgatccgacccacccagcgccatgtcccccgcgtgcgccacgccggcggcggcgcgcccgctcaacacggttccgacacgccgctcgccgccctctgccgcgcgcccgccatcggccatccccgcccgccgctccgccggctgctgcttctgcgcctcctcctcatcctcggcatcgtcgccctccacctgggactggacccgatggagccgccacttcgacgaggtcgaccaggccgagagctacgcatccctcctccagttccagctggaggaggcggtggagaacgaggatttcgcggaggccgccaagctcaagagggatatcatagcggccacaggaaacgacgccgtagcccacgtcatggccgaactcaagagtgctatagaggagcagcggtaccaggacgcctcgaggttgacaaggcttgctgggaccagcttggtaggttggtgggtgggatatgctaagggcattgatgattccattgggagaattgtacgaataagccctggtgttggcagatatgtggccaaaagctacagcccgaggcaattggtcactgcatcttcagggaccccattgtttgaaattttccttgtcagagaagatgacaagacatatacaatgaaggtagtacacttgcgaccaacaaaaggaactttaggtgcatcatccatatcatcagcaataacagaaagcccagcaacggtagagacaccagaaagtagtgctatatctgatagtattacagaggaggcaaatatagatactccagtaaaaggaaatggggatgctgaagagaaagagcaagatgttggtagcagcaaggatactagtgttgatggatttaaaagtcttttgaatttttttaagtctcgaattcctgaattcaaagttcaggtgataaatgttgatgtgtctgaggaaactgaattggctgcaaattcgtccgaagaatcagtgcaagacgatgtgaagagtactccagaaggctcattggaagagccaaccactgaggaacttgagcaggaggaggatgttccagaagaagatatggatgaagaaagtaaaagtacgaaagtgaagctttttatcagtggtgtggttcacaataaagaagatgctggaacaaaatcatacgttcgtgttccagctgaaataaataacatggaaaaagactcctttgacctgtacattcctggaaatggttctggtcatgatctgcctgaaacgaaggctgcaaaacagaaagttgcagatatggctgctaaattagcctcagagcttatgccgtctgatgttgccaaggcattatggggtacaaccaagagttcttcaaagataaataaagaagttcaggagcttttaaggcttaccttaagcaaggcccgagtcaagctgaccgatgataccttttttaaccggatcattatggacactaacagcatggatccatttaatggtaaagtttccccagttaagttgatgagcatttcttgtatgatctaacagttggaatgctgggctaacataggtctctatgtgggagcatttagtccatatggaccagaaattgtgcagctccgtcggaagttcggccactggaatagttccgatgacgttgagtttttcgagtatgtcgaagcagtaaagttgactggtgatctgagtgtccctgctggccagataacattccgtgcgaagattgggaagggcaagcgacttgagaatcggggcgcgtatccagaggaattcggtgtgattgccagttataaaggtcagggtagaatagctcagcctggattcaaaaatcctcgatgggtggatggtgagctgttggtgctcaatggcaagagtacaatcccacaccttggaggcgcagagctcggtttcctgtacagtgtacctgagcagagttttctggttctcttcgatcggcttaaccttcccgagtgttgagactcctaaaaggagcagatttctcacatgtagattgcatgaacgcacagaggctggccccagttccaagtgttcgaacaagtctgtggcctgcgggcccttttttccgtcgtcctctgggctattttgctacctgagattagggatgaaagtggtaatccgaactgttagaacaaatttaatattttaaaatagatatgtataaaatttgatgttgatcttttcttatgttatcaagcacattagtacaaatatgaataaaatattatataagttgtttta

SEQ ID NO: 110677 - DNA, 2271 bp, Zea Mays
cgctcggcactttccaatcaggccgccgtcctccttatctgaatcgcgtgccttccaggcttccagccctctgcccgctgtgccccacgcccggccccccgatccgacccacccagcgccatgtcccccgcgtgcgccacgccggcggcggcgcgcccgctcaacacggttccgacacgccgctcgccgccctctgccgcgcgcccgccatcggccatccccgcccgccgctccgccggctgctgcttctgcgcctcctcctcatcctcggcatcgtcgccctccacctgggactggacccgatggagccgccacttcgacgaggtcgaccaggccgagagctacgcatccctcctccagttccagctggaggaggcggtggagaacgaggatttcgcggaggccgccaagctcaagagggatatcatagcggccacaggaaacgacgccgtagcccacgtcatggccgaactcaagagtgctatagaggagcagcggtaccaggacgcctcgaggttgacaaggcttgctgggaccagcttggtaggttggtgggtgggatatgctaagggcattgatgattccattgggagaattgtacgaataagccctggtgttggcagatatgtggccaaaagctacagcccgaggcaattggtcactgcatcttcagggaccccattgtttgaaattttccttgtcagagaagatgacaagacatatacaatgaaggtagtacacttgcgaccaacaaaaggaactttaggtgcatcatccatatcatcagcaataacagaaagcccagcaacggtagagacaccagaaagtagtgctatatctgatagtattacagaggaggcaaatatagatactccagtaaaaggaaatggggatgctgaagagaaagagcaagatgttggtagcagcaaggatactagtgttgatggatttaaaagtcttttgaatttttttaagtctcgaattcctgaattcaaagttcaggtgataaatgttgatgtgtctgaggaaactgaattggctgcaaattcgtccgaagaatcagtgcaagacgatgtgaagagtactccagaaggctcattggaagagccaaccactgaggaacttgagcaggaggaggatgttccagaagaagatatggatgaagaaagtaaaagtacgaaagtgaagctttttatcagtggtgtggttcacaataaagaagatgctggaacaaaatcatacgttcgtgttccagctgaaataaataacatggaaaaagactcctttgacctgtacattcctggaaatggttctggtcatgatctgcctgaaacgaaggctgcaaaacagaaagttgcagatatggctgctaaattagcctcagagcttatgccgtctgatgttgccaaggcattatggggtacaaccaagagttcttcaaagataaataaagaagttcaggagcttttaaggcttaccttaagcaaggcccgagtcaagctgaccgatgataccttttttaaccggatcattatggacactaacagcatggatccatttaatggtctctatgtgggagcatttagtccatatggaccagaaattgtgcagctccgtcggaagttcggccactggaatagttccgatgacgttgagtttttcgagtatgtcgaagcagtaaagttgactggtgatctgagtgtccctgctggccagataacattccgtgcgaagattgggaagggcaagcgacttgagaatcggggcgcgtatccagaggaattcggtgtgattgccagttataaaggtcagggtagaatagctcagcctggattcaaaaatcctcgatgggtggatggtgagctgttggtgctcaatggcaagagtacaatcccacaccttggaggcgcagagctcggtttcctgtacagtgtacctgagcagagttttctggttctcttcgatcggcttaaccttcccgagtgttgagactcctaaaaggagcagatttctcacatgtagattgcatgaacgcacagaggctggccccagttccaagtgttcgaacaagtctgtggcctgcgggcccttttttccgtcgtcctctgggctattttgctacctgagattagggatgaaagtggtaatccgaactgttagaacaaatttaatattttaaaatagatatgtataaaatttgatgttgatcttttcttatgttatcaagcacattagtacaaatatgaataaaatattatataagttgtttta

SEQ ID NO: 110678 - DNA, 2163 bp, Zea Mays
gcgtgccttccaggcttccagccctctgcccgctgtgccccacgcccggccccccgatccgacccacccagcgccatgtcccccgcgtgcgccacgccggcggcggcgcgcccgctcaacacggttccgacacgccgctcgccgccctctgccgcgcgcccgccatcggccatccccgcccgccgctccgccggctgctgcttctgcgcctcctcctcatcctcggcatcgtcgccctccacctgggactggacccgatggagccgccacttcgacgaggtcgaccaggccgagagctacgcatccctcctccagttccagctggaggaggcggtggagaacgaggatttcgcggaggccgccaagctcaagagggatatcatagcggccacaggaaacgacgccgtagcccacgtcatggccgaactcaagagtgctatagaggagcagcggtaccaggacgcctcgaggttgacaaggcttgctgggaccagcttggtaggttggtgggtgggatatgctaagggcattgatgattccattgggagaattgtacgaataagccctggtgttggcagatatgtggccaaaagctacagcccgaggcaattggtcactgcatcttcagggaccccattgtttgaaattttccttgtcagagaagatgacaagacatatacaatgaagacaggtagtacacttgcgaccaacaaaaggaactttaggtgcatcatccatatcatcagcaataacagaaagcccagcaacggtagagacaccagaaagtagtgctatatctgatagtattacagaggaggcaaatatagatactccagtaaaaggaaatggggatgctgaagagaaagagcaagatgttggtagcagcaaggatactagtgttgatggatttaaaagtcttttgaatttttttaagtctcgaattcctgaattcaaagttcaggtgataaatgttgatgtgtctgaggaaactgaattggctgcaaattcgtccgaagaatcagtgcaagacgatgtgaagagtactccagaaggctcattggaagagccaaccactgaggaacttgagcaggaggaggatgttccagaagaagatatggatgaagaaagtaaaagtacgaaagtgaagctttttatcagtggtgtggttcacaataaagaagatgctggaacaaaatcatacgttcgtgttccagctgaaataaataacatggaaaaagactcctttgacctgtacattcctggaaatggttctggtcatgatctgcctgaaacgaaggctgcaaaacagaaagttgcagatatggctgctaaattagcctcagagcttatgccgtctgatgttgccaaggcattatggggtacaaccaagagttcttcaaagataaataaagaagttcaggagcttttaaggcttaccttaagcaaggcccgagtcaagctgaccgatgataccttttttaaccggatcattatggacactaacagcatggatccatttaatggtctctatgtgggagcatttagtccatatggaccagaaattgtgcagctccgtcggaagttcggccactggaatagttccgatgacgttgagtttttcgagtatgtcgaagcagtaaagttgactggtgatctgagtgtccctgctggccagataacattccgtgcgaagattgggaagggcaagcgacttgagaatcggggcgcgtatccagaggaattcggtgtgattgccagttataaaggtcagggtagaatagctcagcctggattcaaaaatcctcgatgggtggatggtgagctgttggtgctcaatggcaagagtacaatcccacaccttggaggcgcagagctcggtttcctgtacagtgtacctgagcagagttttctggttctcttcgatcggcttaaccttcccgagtgttgagactcctaaaaggagcagatttctcacatgtagattgcatgaacgcacagaggctggccccagttccaagtgttcgaacaagtctgtggcctgcgggcccttttttccgtcgtcctctgggctattttgctacctgagattagggatgaaagtggtaatccgaactgttagaacaaatttaatattttaaaatagatatgtataaaatttgatgt

SEQ ID NO: 110679 - DNA, 399 bp, Zea Mays
atggcgttcagccgggcagaggtgaacgctggcgaggtcgcggcgctcacctgcagcactcagagttgcttagccgcggcgcgcgcacgtggttttgcggctgggcgtagaagaaaatggaagaatactagaggcaaggcaccaagttggccagattacccaggtcgatacaaattaaaaagtgtattagaacctctgaattggataccagctctccatgaggagcagcaactctccacgaacctgcaagtcaacaatcaaggcaacgatctaccacaaaactttgttgatctaccagatggcgatcaagacaacgatcaagaaaatgtacaaggcaataatcttagagatgcaatagcacaagaaacgtggaatgattaccaacaacataaaaattag

SEQ ID NO: 110680 - DNA, 2174 bp, Zea Mays
caccttcttgcaattgcagccgccagccggtagtggcagtacggcaatttcagcctcagctgaaggtcactgtctctcttccatctttttctctctcaacaaaactccctgaattgcaaactccaccaaaacaaactccaagcccatccatcaccagtcctctgtcccctccccgaccgcaacgatctgctttgcatcttccccttcctccaattccagtcccatgcgtaatcgtctttcggaattgaatctctccatgtcatggcgctctgagcaagtacagctgcagtcagtgagagaaatgtaggcaccacaaatcggtccagcaaatccctgctcgtgctctaccaaaaaatccagtctttttccagcccaaatccgcctcttccgctgctgccataaagtccggactttacgaggctttcacgacgtgcgagatttctgttatcgatctccacgaacccgatagcctgccataaagtctgcacagacgcttcgcattgcttcaaccaaagatccatccaaactctgcaccccagaaagctagtacgatctcggggggacatgaagcgcctgcagtgcttcaagcagagcagcggcggcggcaatggtggcgggccggggaagcgcctggagcggcggctgtcgctgggcgagtacaagaaggcagtgtcgtggtccaagtacctcgtagcgccgccgggggctaggatccggagcggcggcgaggagctgtggagcgccgacctgtccaagctggagatccggggcaagtttgcgtcaggccggcacagccgcgtctactccggcaggtacaccggccgcgaggtggccatcaagatggtcagtcagccggaggaggacgccgcgctcgccgctgagctagagcgccagttcgcctccgaggtcgcgctcctacttcgcctccaccacccaaacatcatctcgtttgttgcagcatgcaagaaaccaccagtattctgcatcatcactgagttcatggcagggggctcccttaggaagtatctacatcagcaggagcctcactcagttcccctcaacctagtgctgaaattagctctagatatcgctcgcggaatgagctacctacactcccagggtatactccatagagacctgaaatcagagaacatacttctgggagaagatatgtcagtcaaagtcgcagatttcgggatttcatgcttggaatcacagtgtggaagtggcaaggggtttacaggaacctacaggtggatggctccggagatgatcaaagaggaacatcatactaggaaagtggacgtgtacagctttggaatcgtcatgtgggagatcttgactgctttggtcccgttcagcgacatgactccagagcaggctgctgttgctgttgccctgaagaatgcaaggccgccactgcctgcttcatgccctgtggcaataagccacctgatcatgcagtgctgggcgaccaaccctgacaaaagacctcagtttgatgacatcgtggcgatcctcgagagctacaaggaagcccttgatgaggacccgtcgttcttcttgtcgtatataccacctccaccggaccacggccaccaccaccatcatcagagccttctccggtgcttccctcgctccatgcgaaggtctgcatctctgaaagtatgatcaggccgggatgttgcctctgctcatcgatgctgtgtacaatatgcaccccctttcgactttctttgttttctatgcgcgcgtcggccctctattatgcggcattagcatgctatatgagctagtttatgctctcattttctccttgttggttaattatttccgtcattgatgccttgagtaatgtagagatgacaggcaggcatgcagcttccggttattatctatggatgccatttgcttttggtgatgggaaacatgaaagagccccagtaaatgtaatataattaagctctccattcaattgtgtttgtgcttcttcctttcggctgttatcatactcgtcgcaaatgcgtaggcaggcagtagagtttgaatcggttggtgttttgtttctaaaatggaaaacttgaactgaaaacagtttgtgctttatagtatgtctgccttttggtcaacaacaaaagtcccctccaaaagacaaaaggatttggcaaaatagt

SEQ ID NO: 110681 - DNA, 1723 bp, Zea Mays
cggggatgttccagcgcgtcgtcgtcgtccgattctgtctccctcaggtcgagattcgagagttcccgtgttcgtccatccgcgctgtgaggttctccgatggccgagaagtcacccagctccgcgccgcagggtggttctggtgggaatgaatcattcgataatcttgtaattcaagctccacagcttatgagggaggattacatacagaatgctgtgaagtttctttcacatccgaaagtgaagggttctccagtatttcacaggcgttccttcctggaaaagaaaggccttacaagtgaagaaattgatgaggccttttgtagagttcctgaccctaagccaaatggaacagatgctgtagctgctggtaggcaacaagcaaacaatcccagtcaatctgttgtgctgcaaccttatacagaagttcaaccacaagcagctactgcctctgccactgctggaccaattgttccacatacaaaggcacagttgagctgggtaaacacactccttggtgcaggtctttttcttggtttaggggctagtgctgccataaccctaaagaaattggtcatccctagtctgaaatcttggactcgtagagtcgttgctgaaggagatgaaaatgcaaagagtgaacatacttccaaactttgtgaagaaattagggaagccataaaagtttctgcatcagccttttctgatattgctaaaataaaccaagaagtgcttgcttcaaaagatgaagataggaaggtactcatgaagttaacagaagcattcgagtcacaagaaaatgtgtttaaatcattgagtgagaccttaaatcgtatcagggagaatcagctttcacaacacagcctattggaagagcatgttcagccttcatcatggaacgggccaattgactatcaagggagagcttttcagcaaactaatatgtatgcaacaccaccaaacaacagttttgacacagggaggaactcattcatgccattagctgctgaatcttcttatggaccatttccaggatcctactctgagcgggtgcagaggcctggtggatacggattccagcaacagacaagcagcgaccgattgaatgttgttggcccacggagcagctaccaagggggttcttctaatcaccatgctggtagtaatgccatggatgacccggcagcggttgcagcagaattgcagcgccgctgggttcccccacagccaccaggcgtcatcatgccagaggctgcggccgccatccgacaggccaggtcggttccgaggcagctgccaagcggcgatgggcgcctgggcgctgatgtcccgagacagcctgagcctgccattgccatggcgacaacagagcacgtgaacgttgcccctgaagcacctggcggggagttgccaagcgatggtggtggtgccatgactgctgatgccagcaacggtggtgggagtggagagcagcaggagcaggaagcctcttgagtgaagctttttggacgccctttgatttggttctttgagaggatctagcttgcacctgtacctgtgtgtgtagcatatgcatatgcatctgcataggtttgtgacataatgtgcctcgtgttcgaaactgcagctgtattgtagatatataaactgatcaactttacacgtgtgttacctgtgtgttctgtcataagtgtatcagctatgaggacgtatttgcttcggc

SEQ ID NO: 110682 - DNA, 1822 bp, Zea Mays
cggggatgttccagcgcgtcgtcgtcgtccgattctgtctccctcaggtcgagattcgagagttcccgtgttcgtccatccgcgctgtgaggttctccgatggccgagaagtcacccagctccgcgccgcagggtggttctggtgggaatgaatcattcgataatcttgtaattcaagctccacagcttatgagggaggattacatacagaatgctgtgaagtttctttcacatccgaaagtgaagggttctccagtatttcacaggcgttccttcctggaaaagaaaggccttacaagtgaagaaattgatgaggccttttgtagagttcctgaccctaagccaaatggaacagatgctgtagctgctggtaggcaacaagcaaacaatcccagtcaatctgttgtgctgcaaccttatacagaagttcaaccacaagcagctactgcctctgccactgctggaccaattgttccacatacaaaggcacagttgagctgggtaaacacactccttggtgcaggtctttttcttggtttaggggctagtgctgccataaccctaaagaaattggtcatccctagtctgaaatcttggactcgtagagtcgttgctgaaggagatgaaaatgcaaagagtgaacatacttccaaactttgtgaagaaattagggaagccataaaagtttctgcatcagccttttctgatattgctaaaataaaccaagaagtgcttgcttcaaaagatgaagataggaaggtactcatgaagttaacagaagcattcgagtcacaagaaaatgtgtttaaatcattgagtgagaccttaaatcgtatcagggagaatcagctttcacaacacagcctattggaagagcatgttcagccttcatcatggaacgggccaattgactatcaagggagagcttttcagcaaactaatatgtatgcaacaccaccaaacaacagttttgacacagggaggaactcattcatgccattagctgctgaatcttcttatggaccatttccaggatcctactctgagcagcgggtgcagaggcctggtggatacggattccagcaacagacaagcagcgaccgattgaatgttgttggcccacggagcagctaccaagggggttcttctaatcaccatgctggtagtaatgccatggatgacccggcagcggttgcagcagaattgcagcgccgctgggttcccccacagccaccaggcgtcatcatgccagaggctgcggccgccatccgacaggccaggtcggttccgaggcagctgccaagcggcgatgggcgcctgggcgctgatgtcccgagacagcctgagcctgccattgccatggcgacaacagagcacgtgaacgttgcccctgaagcacctggcggggagttgccaagcgatggtggtggtgccatgactgctgatgccagcaacggtggtgggagtggagagcagcaggagcaggaagcctcttgagtgaagctttttggacgccctttgatttggttctttgagaggatctagcttgcacctgtacctgtgtgtgtagcatatgcatatgcatctgcataggtttgtgacataatgtgcctcgtgttcgaaactgcagctgtattgtagatatataaactgatcaactttacacgtgtgttacctgtgtgttctgtcataagtgtatcagctatgaggacgtatttgcttcggcccatgctaaaatattcgcaaagtttgggccaagcatgggctgaactgagcattctaatcagcaatggcccaattttgagccatgtgctttcagata

SEQ ID NO: 110683 - DNA, 1295 bp, Zea Mays
ttgcgaagcagttttggttccttttccttcggtctggggacttccaggtgctctgtccctctacaggggatggctgctttgactcttggtgggagaagagtgccgaggtggtgggcaagcctttgtcgggtggtttcaactcgctggtcatattgggtgcgtggtcgatctggaaacacaggaataggtgtgtgtttgatggttgtagcccgaatgttgaggtcgccctttcggcagctagggaggagttgatgtgctggcgtttggctggcgctaaaactctctctttcttccatttagaggagctgtcttaggcgttaatggtggtgtgagtttgtaaaactgttgtttctgttttggggttccccccttttttcttcttaatataaaaatacgcagacctcctgcgtattcaagaaaaaaacaacacagcctattggaagagcatgttcagccttcatcatggaacgggccaattgactatcaagggagagcttttcagcaaactaatatgtatgcaacaccaccaaacaacagttttgacacagggaggaactcattcatgccattagctgctgaatcttcttatggaccatttccaggatcctactctgagcagcgggtgcagaggcctggtggatacggattccagcaacagacaagcagcgaccgattgaatgttgttggcccacggagcagctaccaagggggttcttctaatcaccatgctggtagtaatgccatggatgacccggcagcggttgcagcagaattgcagcgccgctgggttcccccacagccaccaggcgtcatcatgccagaggctgcggccgccatccgacaggccaggtcggttccgaggcagctgccaagcggcgatgggcgcctgggcgctgatgtcccgagacagcctgagcctgccattgccatggcgacaacagagcacgtgaacgttgcccctgaagcacctggcggggagttgccaagcgatggtggtggtgccatgactgctgatgccagcaacggtggtgggagtggagagcagcaggagcaggaagcctcttgagtgaagctttttggacgccctttgatttggttctttgagaggatctagcttgcacctgtacctgtgtgtgtagcatatgcatatgcatctgcataggtttgtgacataatgtgcctcgtgttcgaaactgcagctgtattgtagatatataaactgatcaactttacacgtgtgttacctgtgtgttctgtcataagtgtatcagctatgaggacgtatttgcttcggc

SEQ ID NO: 110684 - DNA, 1292 bp, Zea Mays
ttgcgaagcagttttggttccttttccttcggtctggggacttccaggtgctctgtccctctacaggggatggctgctttgactcttggtgggagaagagtgccgaggtggtgggcaagcctttgtcgggtggtttcaactcgctggtcatattgggtgcgtggtcgatctggaaacacaggaataggtgtgtgtttgatggttgtagcccgaatgttgaggtcgccctttcggcagctagggaggagttgatgtgctggcgtttggctggcgctaaaactctctctttcttccatttagaggagctgtcttaggcgttaatggtggtgtgagtttgtaaaactgttgtttctgttttggggttccccccttttttcttcttaatataaaaatacgcagacctcctgcgtattcaagaaaaaaacaacacagcctattggaagagcatgttcagccttcatcatggaacgggccaattgactatcaagggagagcttttcagcaaactaatatgtatgcaacaccaccaaacaacagttttgacacagggaggaactcattcatgccattagctgctgaatcttcttatggaccatttccaggatcctactctgagcgggtgcagaggcctggtggatacggattccagcaacagacaagcagcgaccgattgaatgttgttggcccacggagcagctaccaagggggttcttctaatcaccatgctggtagtaatgccatggatgacccggcagcggttgcagcagaattgcagcgccgctgggttcccccacagccaccaggcgtcatcatgccagaggctgcggccgccatccgacaggccaggtcggttccgaggcagctgccaagcggcgatgggcgcctgggcgctgatgtcccgagacagcctgagcctgccattgccatggcgacaacagagcacgtgaacgttgcccctgaagcacctggcggggagttgccaagcgatggtggtggtgccatgactgctgatgccagcaacggtggtgggagtggagagcagcaggagcaggaagcctcttgagtgaagctttttggacgccctttgatttggttctttgagaggatctagcttgcacctgtacctgtgtgtgtagcatatgcatatgcatctgcataggtttgtgacataatgtgcctcgtgttcgaaactgcagctgtattgtagatatataaactgatcaactttacacgtgtgttacctgtgtgttctgtcataagtgtatcagctatgaggacgtatttgcttcggc

SEQ ID NO: 110685 - DNA, 1729 bp, Zea Mays
caagcgagcaatacaaaatcagcgagcaggcgggctggcatcggccggttgcggtggcatccataggactctcagattcccatctcgtcttcttatctccacttctccctccacacacatcccctcctctctctcctctgtttataaaactcgccaggcgcaatctctctcgctccgtccatccccgtcgccagcatcgcttccacttcggtctcagcgacggtcgccaccaccgctcccctccctctccccctcctcgcccagcggcaattaccacagcctccccagcaagccgggatggctgcactcaaggcatcgttccggggtgagctcagcgccgcttccttcctcgactccagcaggggacctctcgtccagcacaaagtggattttacgtttcaaaggaagggcaaacgagctatttcactgagaaggacatgctgttctatgcaacaggctccaccaccagcatggcctgggcgagctgttgctgagcctggccggaggtcatgggatggcccaaagcctatctcgattgttggttcaactggttccataggaacacagacattggacattgttgcggagaatcctgataagttcagagttgttgctcttgctgctggatccaatgtcacgcttctagctgatcaggtcaaaacattcaaacctaagttggttgctgtaagaaacgaatcattagttgatgaattgaaagaagccttggctgattgcgaagagaagccagaaattattcctggggagcaaggtgtcatagaagttgctcgccatccagatgcagttacagttgtcacagggatagtaggttgtgcagggctgaagcctacagttgctgcaattgaagctggtaaagacatagcattggcaaacaaagagacacttattgcaggtggtccttttgtgcttccccttgcacacaaacacaaagtgaaaattcttccagctgattctgagcactctgcaatatttcagtgtatacaaggcttgtccgaaggtgcacttcgtcgcattattctaactgcatcaggtggtgctttcagggactggccagttgacaggctgaaagatgtaaaagttgctgacgctttaaagcatccaaactggaatatgggaaggaagatcacagtagattctgctactttattcaacaagggtttagaagttattgaagcacattatttatttggtgctgaatatgatgacattgagattgtgattcacccacagtctatcatacactctatggttgaaacccaggattcatctgtcctagctcagttgggatggccagatatgcggttaccaatcttatacaccttatcatggccagatagaatctattgctctgaggtcacctggcctcgtctggatctttgcaagttgggttcactgacattcaaagctcccgacaacgtaaaatacccatcaatggacctagcctatgcagctggccgggctgggggcaccatgacaggagttctgagcgctgctaatgagaaggccgtggagttgttcattgacgagaagtatgatcctttttttttgcatatcgacttttgcctgctttgttctagataaatcgttgcatatttttcatgtcatcctttgatttggtttgccaaacattctgcaaattctaaggccagatacgctatgctaatttgctgcaatgaaaagaaaactttggaccaaccaaagccccatggac

SEQ ID NO: 110686 - DNA, 1917 bp, Zea Mays
caagcgagcaatacaaaatcagcgagcaggcgggctggcatcggccggttgcggtggcatccataggactctcagattcccatctcgtcttcttatctccacttctccctccacacacatcccctcctctctctcctctgtttataaaactcgccaggcgcaatctctctcgctccgtccatccccgtcgccagcatcgcttccacttcggtctcagcgacggtcgccaccaccgctcccctccctctccccctcctcgcccagcggcaattaccacagcctccccagcaagccgggatggctgcactcaaggcatcgttccggggtgagctcagcgccgcttccttcctcgactccagcaggggacctctcgtccagcacaaagtggattttacgtttcaaaggaagggcaaacgagctatttcactgagaaggacatgctgttctatgcaacaggctccaccaccagcatggcctgggcgagctgttgctgagcctggccggaggtcatgggatggcccaaagcctatctcgattgttggttcaactggttccataggaacacagacattggacattgttgcggagaatcctgataagttcagagttgttgctcttgctgctggatccaatgtcacgcttctagctgatcaggtcaaaacattcaaacctaagttggttgctgtaagaaacgaatcattagttgatgaattgaaagaagccttggctgattgcgaagagaagccagaaattattcctggggagcaaggtgtcatagaagttgctcgccatccagatgcagttacagttgtcacagggatagtaggttgtgcagggctgaagcctacagttgctgcaattgaagctggtaaagacatagcattggcaaacaaagagacacttattgcaggtggtccttttgtgcttccccttgcacacaaacacaaagtgaaaattcttccagctgattctgagcactctgcaatatttcagtgtatacaaggcttgtccgaaggtgcacttcgtcgcattattctaactgcatcaggtggtgctttcagggactggccagttgacaggctgaaagatgtaaaagttgctgacgctttaaagcatccaaactggaatatgggaaggaagatcacagtagattctgctactttattcaacaagggtttagaagttattgaagcacattatttatttggtgctgaatatgatgacattgagattgtgattcacccacagtctatcatacactctatggttgaaacccaggattcatctgtcctagctcagttgggatggccagatatgcggttaccaatcttatacaccttatcatggccagatagaatctattgctctgaggtcacctggcctcgtctggatctttgcaagttgggttcactgacattcaaagctcccgacaacgtaaaatacccatcaatggacctagcctatgcagctggccgggctgggggcaccatgacaggagttctgagcgctgctaatgagaaggccgtggagttgttcattgacgagaagattagctacctggacatattcaaggtggtggagcttacatgtaacgcgcatcggaacgagctggtaacaagcccgtcactggaggagatcgtccattacgatctgtgggcgaggagatatgcagccagtctacaaccatcttctggcctgagccctgtccctgcataataggtcgtcacgacaacgttgtacagcaggagttctaagatatgatgtgtttgtggctcctgtttccatgttcaattttcaggcctccacatgaataaaatgcatctattccatgtgatttcttttatggatgaagtgtgcgaagtcgggtgggaatcagatgcatccctttcggtggagttcttacgtagggttgagcag

SEQ ID NO: 110687 - DNA, 414 bp, Zea Mays
atggatgaggactatctcttccttcacaacggggtacatgtaacacccgtgttcatgctcataagggcgactctaaccagaacaggccttggatggcgccagaaaccgggtttgcggaggccgaccttatcggactgggacattgacaaatgcaaccccgttacacaggaagagttcgttctcatgctaccttctaggcgtaagctcaaggatagacattacaatgagaacttgtattctactggggaggagttcggcctcctgcttctgggcctagtagcccctatggctcatctattgggtcgtgctttcgggcctcatagctcctatggagtcgtctaccgaggtgtgcgccaccgtacctatggtatggtgttgcatcctgtctgccttcctgtagctacttcgatttag

SEQ ID NO: 110688 - DNA, 554 bp, Zea Mays
gaagtaatgcagcagatgggttttggacatatctggcgagacattgtctgtggtttattaccctcttccactactcaggtgttgctcaatggtgtcccgggtaaactgattatgcatagaagaggacttaggcagggagatcctctctccccgatgctatttatccttgctatggatgttcttggccttctgtattccaaagctgagggagcgggcttactccaacaaccgtcaagaaggaaaaggcttcacagagtctcgatgtatgcagatgatgtggcgttgttcttgcaccctacagctatagacatttcaacttctctggatatcctcttgctttttgtgatgcgtcaggcctttgctataatccacagaaatcaaatgtgtaccctatcaaatgccccgaggagactattgacgaaattgggattgcagcctttgcttgcagatatctgggtctccccttgtctttacataaattatccaggaatcaggctcagcagtttgtagacaaaattgcagaccgcctaccaaactggaaggccgacctgatg

SEQ ID NO: 110689 - DNA, 105 bp, Zea Mays
atccaaatgtttgtttgcacaggtaattgcataaatgtagtattattcaaacccgcatatatcttacaatcaagtggcacaaacaataaaacaggaaaaagaaat

SEQ ID NO: 110690 - DNA, 91 bp, Zea Mays
ccaaatagcgactaatcaccttgatcgtcacctaatcgcaactaatcgtctgatcgcccagtggcatcgatcagacgatcaggcgatatga

SEQ ID NO: 110691 - DNA, 345 bp, Zea Mays
atggccttctcgatgtccgccgcgcccatgggcgcggccgccgcagccgatctgcgcacgcgtgcggctggactgggcgtgcccttcgccgcattgggcgtcaccaaaccggaagccgtcagcatggacaataggccacagagaggcttacccctaaccaagatggctaattttatcttttaccttaactcaaatggtcctctaagaatatctccagaagtttactcatctcatccccatattcaaactccactctgcgaacagtgcaaaacagtgttttgcatggccatatgggtaagctgcaagaggcggtctaatacaactgtcccagcccataaggcctaa

SEQ ID NO: 110692 - DNA, 3109 bp, Zea Mays
gaatccggtccgctctcttccatcacgttccctatctccccgaccccggcccaccgaacttcacgccactcgcgccgccccatcgccacccccattcctcatcgcagcgatggagggcaaaacactaacccctgaggcggacacggcctccgcgccccaaaccctagccgccggggagctcgtctgggcgaagccctcccagccccgccagcactgctggtggcccgcgcgcatgctctccgcgtgccccgcctccgccgtccgcgacgcccaagtctcctacttcagcgaccccgccgcctccggcgcgccgtccgcccctcctgcgcaagtccggcgcttcgccgatgccgacgctgacatgatggcttgcggcagcaccgcgcgcggattcttcggggccgtcgcggaggcccaggcgcgtgccgtcgcggccctgcgcctccagctcacctgcgcctgcgtcccgcccccgccgcccggagaggatagcagcgtcaccggagtcgccaacctggcgcccgccgagttcctggcggcgctccgtgaggccgcattggacatctcctctgtcggcctattggaccgcgccaggctcaagagctgggtcttcgcggtcggggaggggtggggtccacatggcgcccagcactacctgcggcgcccgctggacgaccttgtggacaagatcgatcttgatgtgcctgctggcgaagacatagatgctgatgattggcttgccgaggaccagcacaaagcattggagaggctggaggagacacccatgcagaagaagcgctgtgtcaccaaagtgatggacaaactggatacaagcaagaatgagggcaagattggcagccctgaacatgtaacctcaggaaagcgagtgcggaagaggagtaagtacctgtcgccaccatacactaacttgggtgtggttgacaagattatcaaacaggctgatctgccaaaggcattggttcccaaagctgctgctgatggcagcaacgtgtcaccattgccaggcagcattgttgtggaagatgtcttgctgctggtgcgaggcttagggaaggttcccaagcatagggacgattttccaaaggatgctgaggaatttctccgtttgtttagaagcacaacatttgttcacggtgctgactataagtcttgtaaggcacatgaatgtccactcatgcatggctctagaaatgttgacatggacattgctgtgggtctaatctctgattcacatgctgttctgaaacaagccagttgtgtgtcaaagaggggcaggaaaaaggatgaaactgggagtggtggctcttccatcaagaggaagaagcgagagaatacctcttctgctgctacaattagcactagtataccaatcactcctgctattcctatcaggcaagtgaaagaagaagatatgagaaccctaatgaaggcgggaagtggtccaaggggcatagaagtagatgttcagaacgagaagggcaaaccatcacctttggaagttcctatttcagctgcagatcctgaagtagtggaatcaggacatgaagaggcccaagcaaatgttctggctgtgggcaatatgtttcctgaacaatccgcagaagaaaatgatgcggctaacttggaagcaacaaggtcagaaacgaatgtgcagaatgttactgtagatgtgtctatcagaagtgttcagacagaagcaatggaattgcaatctaataatcccatagatgtgagtgcgcaaagtgttgttgtggatgttcctattggaagtgtttctaaggaagcaacagagccagaaactagtgtacacaaggataagaatgtgcaaagtgatgtttcagatgtgcctgacagaattgtttctaaggaaccaacagagttggaaactgataatcgcataaatgagaatgtacagagtgttgctgatatgtctgacagaagtgttttaaaggaagcaacaatgcctgatgctgacattcgcatatatgaaaatctgcaaagtgctgcaaatttgcctgccagcagtgggctctctcctatgcgtgaagacatgtctcagcctgtagatggaaatgaagagcctggggatgtagaagtttgcacagtccagcgatcttatgcgtctctgcaagctaacctgccagaaatgcttaagaaagttaaaactaatggaacagatataatcggtgtgaatcatacactcaacgatgagtgtcaaaagaatggacaacctgtcaagaaagtgaagctacctgcagaagtggcaaatcattcctgtggtgaaggtaccaatggcacttggctggaccctgctaaccttactcctacgaaaaagaagaaacctgcacagcacttcagcaatccggcagccgttattgtggaatttgtacctggtgccactgttccttccagagaggagctactctccacatttggcaagcacggctacttgatcgagtctcagactgatatttcagaagctacccgcagtgcttgtgttgtgtttgggaaaagcattgaagccgaggaggcgtacaagaacggttgtcagtaccttcttggtcagtttgggcctccgtttgctacgctaaggcttgatttctctcccgtcaagttgactgtgccttcaccgtctcttgcttcaaagcctccactccgagatattaggaagaaccttgaggatatgatttcagcccgtcgttcggctctggcaacctcatcagatgggcagctgaatcctgttccagataagcttctgggggagatgcagggccttttggcaaacgttgacaggatgcttactaggccgcctgagaatgctccttagctctgccaatctgaaggattatggctgtaacctattggtagttagacaactttggtggttctgttagttgtagcttttgcatctaactttatgatgaactacatcgtttacccagttcagcagctgcgatttggaattcctgtgaatggtaggggcttattgtgtcactgcttcgtgtactatatatgccaataaggtcgcagcttcttttagtgccttgattttgtgttatgttaataaataaaataaaataactaaaaa

SEQ ID NO: 110693 - DNA, 3115 bp, Zea Mays
cccaccgaacttcacgccactcgcgccgccccatcgccacccccattcctcatcgcagcgatggagggcaaaacactaacccctgaggcggacacggcctccgcgccccaaaccctagccgccggggagctcgtctgggcgaagccctcccagccccgccagcactgctggtggcccgcgcgcatgctctccgcgtgccccgcctccgccgtccgcgacgcccaagtctcctacttcagcgaccccgccgcctccggcgcgccgtccgcccctcctgcgcaagtccggcgcttcgccgatgccgacgctgacatgatggcttgcggcagcaccgcgcgcggattcttcggggccgtcgcggaggcccaggcgcgtgccgtcgcggccctgcgcctccagctcacctgcgcctgcgtcccgcccccgccgcccggagaggatagcagcgtcaccggagtcgccaacctggcgcccgccgagttcctggcggcgctccgtgaggccgcattggacatctcctctgtcggcctattggaccgcgccaggctcaagagctgggtcttcgcggtcggggaggggtggggtccacatggcgcccagcactacctgcggcgcccgctggacgaccttgtggacaagatcgatcttgatgtgcctgctggcgaagacatagatgctgatgattggcttgccgaggaccagcacaaagcattggagaggctggaggagacacccatgcagaagaagcgctgtgtcaccaaagtgatggacaaactggatacaagcaagaatgagggcaagattggcagccctgaacatgtaacctcaggaaagcgagtgcggaagaggagtaagtacctgtcgccaccatacactaacttgggtgtggttgacaagattatcaaacaggctgatctgccaaaggcattggttcccaaagctgctgctgatggcagcaacgtgtcaccattgccaggcagcattgttgtggaagatgtcttgctgctggtgcgaggcttagggaaggttcccaagcatagggacgattttccaaaggatgctgaggaatttctccgtttgtttagaagcacaacatttgttcacggtgctgactataagtcttgtaaggcacatgaatgtccactcatgcatggctctagaaatgttgacatggacattgctgtgggtctaatctctgattcacatgctgttctgaaacaagccagttgtgtgtcaaagaggggcaggaaaaaggatgaaactgggagtggtggctcttccatcaagaggaagaagcgagagaatacctcttctgctgctacaattagcactagtataccaatcactcctgctattcctatcaggcaagtgaaagaagaagatatgagaaccctaatgaaggcgggaagtggtccaaggggcatagaagtagatgttcagaacgagaagggcaaaccatcacctttggaagttcctatttcagctgcagatcctgaagtagtggaatcaggacatgaagaggcccaagcaaatgttctggctgtgggcaatatgtttcctgaacaatccgcagaagaaaatgatgcggctaacttggaagcaacaaggtcagaaacgaatgtgcagaatgttactgtagatgtgtctatcagaagtgttcagacagaagcaatggaattgcaatctaataatcccatagatgtgagtgcgcaaagtgttgttgtggatgttcctattggaagtgtttctaaggaagcaacagagccagaaactagtgtacacaaggataagaatgtgcaaagtgatgtttcagatgtgcctgacagaattgtttctaaggaaccaacagagttggaaactgataatcgcataaatgagaatgtacagagtgttgctgatatgtctgacagaagtgttttaaaggaagcaacaatgcctgatgctgacattcgcatatatgaaaatctgcaaagtgctgcaaatttgcctgccagcagtgggctctctcctatgcgtgaagacatgtctcagcctgtagatggaaatgaagagcctggggatgtagaagtttgcacagtccagcgatcttatgcgtctctgcaagctaacctgccagaaatgcttaagaaagttaaaactaatggaacagatataatcggtgtgaatcatacactcaacgatgagtgtcaaaagaatggacaacctgtcaagaaagtgaagctacctgcagaagtggcaaatcattcctgtggtgaaggtaccaatggcacttggctggaccctgctaaccttactcctacgaaaaagaagaaacctgcacagcacttcagcaatccggcagccgttattgtggaatttgtacctggtgccactgttccttccagagaggagctactctccacatttggcaagcacggctacttgatcgagtctcagactgatatttcagaagctacccgcagtgcttgtgttgtgtttgggaaaagcattgaagccgaggaggcgtacaagaacggttgtcagtaccttcttggtcagtttgggcctccgtttgctacgctaaggcttgatttctctcccgtcaagttgactgtgccttcaccgtctcttgcttcaaagcctccactccgagatattaggaagaaccttgaggatatgatttcagcccgtcgttcggctctggcaacctcatcagatgggcagctgaatcctgttccagataagcttctgggggagatgcagggccttttggcaaacgttgacaggatgcttactaggccgcctgagaatgctccttagctctgccaatctgaaggattatggctgtaacctattggtagttagacaactttggtggttctgttagttgtagcttttgcatctaactttatgatgaactacatcgtttacccagttcagcagctgcgatttggaattcctgtgaatggtaggggcttattgtgtcactgcttcgtgtactatatatgccaataaggtcgcagcttcttttagtgccttgattttgtgttatgttaatagtatgtcattgccttgattttgtgttatgttaatagtatgtcattgccattatcagaggtattggagtttgcatcgg

SEQ ID NO: 110694 - DNA, 246 bp, Zea Mays
atactatgtcttggtgttttaaaacgttctaggcagcataaagcaacatcacaggagcaagcggccaaggatctggaggagctagagaagaggagagaggagcttgagtctctgttaactgctgagcggtcagagatggcctgctgtcgacctaccatctcacttctggtgtaaataagtgtttttccattctctgttgaatgttggtagcatatttggagcatgttgtttcagctgggttctaga

SEQ ID NO: 110695 - DNA, 1128 bp, Zea Mays
atggctgacgaccagcagccgccggcgcaacggtactggttcccgtactggaccgcgcctgctcctcggccggtcgcccgcccgcagctgtcgaggcgggaaactcgcccggcaccgtcaccgtcacctcctgcaacagcgtcgccgtcgcggcggccgtcgcatccgcaacaggcggcgacgccggcatccagaagcgctggcagtggtgtccctgatccacctgcccagccgcagccgacgcggctgtccagcaggccatcgccgtcgccttcccgcgttccgccactgtcgcccattagagagcccaacgccagggcgccggtgccgtcaccggcaccggttgccaaagagcacaagcagccttctcctcttcatcataccgagcatggtgttcctaagcaaaaagacatcaccgttccgcaagagaaaaccatccataaaccgcttgtagcatccaagacacaaaccaagaccccagagaaagaaaaagacaaggaaaagggaaaggagaaggagaaggaaggcagccagctgcacaaggaaaaagataaggagaagaaagacaaggagaaggaaaaggaaaaagataaagagaaggaggatcataaagataagaaagacaaggatcacaaagagaagaaagaaaagaataaagagaaggaaggcagccagctacacaaggagctcaaggcgggtgtcgccgacatggtgcacacgctcagctcttcggcaccgtcatccgggggcggccacgagcgtgctggctctgcggcggcgggaacaacaatcatcacgctggccggcgagaacaagggcacgtccatgaaggtagacagcagcgccgtagcctacggcacggcggacgcggcgggcagcaaggagcgccgcggccacaagctcgacggcagcgtcatcgtgagcgggaaggagcaagctggggccggcaaagggctgacagctttcgtcaacagcaacgtgcaggtcatcaacaactcgctgctgctgcagagctcctgccacggcggcgacctgggggtgcacctcaagctgtccaccaaggccaagaagaaggacggcaaggaagccgggggcaatagtggctctgctgctgcgccaaaaaaatga

SEQ ID NO: 110696 - DNA, 1222 bp, Zea Mays
ccgaattctcctcgtcctaaaaaaccctaaccccaactccccacactcgtctcgccgggggcggcgcgatgagggctatcaccggcggcgtcgtctcctcccagccctgtcccctccacaaggccgccctcttcctcaaacgcttcaccgagtctgccgcctcccacctaccctcctccgactgctgtaactacctccgcaacgccgccgacgccacaacacagctcagccgcttccgcaaggaactcggcggcagccacaagcagggtgccgccaactccgatgcccactactatgatgatccggtgaagggcaatagaaatcacgaagatcaggagagcaaaggggacatggcgattgccgctgatgattccaaccgcgattctgccgctgaggcgaagctagatgttgcctccggtaagaagggcaataagaagaagaatggggatccactggaggatagagcggttgcccgtgctaactcgcacatccccccttcaccagaaattgccactgagaagaggaagaagaatcatccgaataaggaaatcatcgtcgatgtgaagcaggagcctaactcccacattctcccttcaccagaaattgccactgagaagagtaagaagaagagtcgtccgaataaggaaatcatcgtcgatgtgaagcaggagcctagttttgtggtggaagaagagctggtgagtgaaaagaagagcaagaagaaaaaagagaaggatcatgtgaaactggaggagaatgtgaatgaggtggaagagaaaattgtcaatgacagtgcagcagaacaaagagttgccataactgagagggaaaggaagaaaaagaagcataaacaagaggaatgcactgaggttgtgaaggagaagaaaatcactgatggtgatctagaccgagagaagaagaggaaaaagaagagggatagaggtgacaattatgacaatgctccagagcaggtagaacatataaataagaagcaaaagaagcatctggggattagttaggagaatccttactcattggagatgtatgggagtttgtgactggtgaggttcctgatgttgtattttgggcttgaatttgattactactatggctgtgttcttttggctactacgccagactccacagttttgttctgtaaaacatccaatttatatgttatggccatgaggcccaagcaatgatattgaattgttacttcaaa

SEQ ID NO: 110697 - DNA, 930 bp, Zea Mays
atggcgtcggagaagagcaagatcctggtggtcggcggcacggggtacctgggcaggcacgtcgtggcggcgagcgcgcggctgggccaccccacctcggcgctcgtcagggacacggcgccgtccgacccggccaaagcggcgctgctcaagaccttccaggacgccggtgtgacgctcctcaagggcgacctgtacgaccaggctagcctggtgagcgcggtgaagggcgcggacgtggtcatctccgtgctcggatcgatgcagatcgccgaccagagccggctcgtcgacgccatcaaggaggccggcaacgtcaagaggttcttcccgtcggagttcggcctggacgtggaccgcacgggcatcgtggagccggccaagtccatcctaggcgccaaggtgggcatccgccgcgccaccgaggccgcgggcataccctacacctacgccgtggccggcttcttcgcgggcttcgcgctccccaacatcgggcagctcctcgcccccggcccgcccgcggacaaggcggtcgtcctcggcgacggcgacaccaaggcggtgttcgtggaggagggcgacatcgccacgtacacggtgctggcggccgacgacccgcgcgcggagaacaaggtgctgtacatcaagccgccggccaacacgctgtcgcacaacgagctgctgtcgctgtgggagaagaagaccggcaagacgttccggcgggagtacgtgccggaggaagccgtgctcaagcagatccaagagtcgccgttccctctgaacatcatcctggcgatcgggcacgcggcgttcgtgcgtggggagcagacgggcttcgagatcgacccggccaagggggtggacgccagcgaactgtacccggatgtcaagtacaccaccgtcgacgagtacctcaaccgcttcctctga

SEQ ID NO: 110698 - DNA, 224 bp, Zea Mays
ccaaaatgtcttcggagatacaatctgcgttcgtgacgtcgtcagtgcaagacaaggccggagctagccctgaccagaagcaggagcgtagcaccaagaaagacgaatctggcgatcaagaatccgaaactgtcggcgatgcggtgccacgaaagggtgtttgcaaatatgtgcaaaacataataacaagtgtaggttttgtgaatgattttgttgtggtgctt

SEQ ID NO: 110699 - DNA, 1486 bp, Zea Mays
tctacgcatcgccctggtgttcttctctagccgtcggagtagtagccatggcttccaagcgctcgttctcagtctctggcggtagcttctccctgctccggtgactggtgctcggctcctccccagcatctcctcgaccctgcctagaatccgccgcaccctgctctcggtttgtgctcgcttgtgctccagccatggcgcgccggctccctgctgcgcccgctgctggttccccctgctcgcccggctcgccatggagcctcaccgtcgcagctcctgctcggatttcccttcccagccgaaattcctccctctgctcgagtccctctgcccatctccacggccaaccgcacggctccctgatgcacacgtctctgccccagctcgctcggacctcgccgcggcctaccctctgcgccgtgcccctggtcccggcctcagtccgcccactccccatggcgcgcccgccttgcttctccagcgtcgcgtccctccccatctcctctgctccctccagctcgcagaagctcccagccgagcccctctccagccgtggccgcgtctttcgtgctccggctcgctggcgagcgccgctgctccctcttccgtggtccctggctcgtctttggtgctcgcctggctgcgccccttagctctcgaccatggtggtcgcccatggccgtgttctgtttttctccccgcagcgctcgacgccttagaacctgcatagctctgttcgtctcgtcattaccttgctactgcctccggtgtggagtgatttgcgtgtgtcgatgaagcaagcgaagtcccacaacgtccgctaggtgttcgacaaaaaaagagacatgagccaagtgttgtcgagcccgtcccgtgttttccctgtcttgtgctcgcgcggttttctgctcgcttgcgtgccctctcgactcgctcggctttaatttccaatcgcgtcgtcgatctcgtcgtttgccgtcgagtcgtcaaacacgtcatcccggcttgatcctcacctcaccagcttaccccagacttcaatcgaaggtcgtcgtcgttcgtgcatccccaagaaaacccaagaatcgagtgaagacgaagttagcagcgcgattttccccaagcgctcaaccaattgcctggatcggaaaatcgctaccgatctcgcggattcgtgtcagctgtggaaacggtaagctgataaattattcagaatagtttgatcgatgaataaattaatgtgctagtgcgatgctcattaaggtgctcgataaattgtgtaagtcacgaaactctcgtcgacttcgcagttcttgcgattatcgagccaggttcagttatagcgagttatttcgctatccggtcaattagctgaattaatgtaccaagtagaattttggtaggcatgtgtgatgataaaatattttaatcacttataaagatgtagtataatttataaggcaagggattagtttagaatttaatt

SEQ ID NO: 110700 - DNA, 1231 bp, Zea Mays
atggagcctcaccgtcgcagctcctgctcggatttccttcccagccgaaattcctccctctgctcgagtccctctgcccatctccacggccaaccgcacggctccctgatgcacacgtctctgccccagctcgctcggacctcgccgcggcctaccctctgcgccgtgcccctggtcccggcctcagtccgcccactccccatggcgcgcccgccttgcttctccagcgtcgcgtccctccccatctcctctgctccctccagctcgcagaagctcccagccgagcccctctccagccgtggccgcgtctttcgtgctccggctcgctggcgagcgccgctgctccctcttccgtggtccctggctcgtctttggtgctcgcctggctgcgccccttagctctcgaccatggtggtcgcccatggccgtgttctgtttttctccccgcagcgctcgacgccttagaacctgcatagctctgttcgtctcgtcattaccttgctactgcctccggtgtggagtgatttgcgtgtgtcgatgaagcaagcgaagtcccacaacgtccgctaggtgttcgacaaaaaaagagacatgagccaagtgttgtcgagcccgtcccgtggttttccctgtcttgtgctcgcgcggttttctgctcgcttgcgtgccctctcgactcgctcggctttaatttccaatcgcgtcgtcgatctcgtcgtttgccgtcgagtcgtcaaacacgtcatcccagctcgatcctcacctcaccagcttaccccagacttcaatcgaaggtcgtcgtcgttcgtgcatccccaagaaaacccaagaatcgagtgaagacgaagttagcagcgcgattttccccaagcgctcaaccaattgcctggatcggaaaatcgctaccgatctcgcggattcgtgtcagctgtggaaacggtaagctgataaattattcagaatagtttgatcgatgaataaattaatgtgctagtgcgatgctcattaaggtgctcgataaattgcgtaagtcacgaaactctcgtcgacttcgcagttcttgcgattatcgagccaggttcagttatagcgagttatttcgctattccggtcaattagctgaattaatgtaccaagtagaattttggtaggcatgtgtgatgataaaatattttaatcacttataaagatgtataatttataaggcaagggattagtttagaatttaatt

SEQ ID NO: 110701 - DNA, 1657 bp, Zea Mays
gagacttgcaatcccatctgctccggacagagccctcgctccacaccgccggcgacctttttcctcctccgctcgaggagtgggccaacggagggagaccatatgggcgcggaggcagcgcatgggcatccgcagcagcagcctccctcgtccctccgacccggcagggaggccgcggcgccgcccgcggtggtggggctgcagctctcggcgctgatcgaccacgtcgcgcgcgtcgactggtccctcctcgaccgcgtccctggcgaccgcggcggctcgcagcaggtatccattgatgagctgaatcatattcttgatgaagtgaatgcccacatccttccttcccgcaatgatctcactccggtaactacaatagccggtggaagtgttgccaacacaatccgtgggctctcagctggttttgggatatcaactggaataattggagcttgtggagatgacaaccagggacttctgtttgtcaacaatatgagctttagtggtgtagatctcacaagattaagggcgaaaaaagggcacaccgctcagtgtgtgtgcttggtcgatgcaagcggcaatcgcaccatgcggccatgcctatctagtgcagtcaagatacaggccaatgaatttagaaaggaggatttcaaaggctccaagtggctcattgtgagatatgcacaacagaacatggaacagattgtcgaagctattaggattgcgaaacaggaaggcctttcagtatcattagatttggccagtttcgagatggttcgtgactctaggtctaaacttgttaaccttttggagactggtaacattgacctttgcttcgccaacgaagatgaagctagggaggttatagggggaagcctggaatcagatccagaggaggcgcttgcattcttgggcaagtactgcaaatgggccgtggtgacacttgcttcaaagggatgcatggcaaagcatggcaaacaggtcgttcgagtcccggccatcggggagagcaacgcggtggacacaactggagcgggcgacctgttcgcgagcgggttcctgtacgggctggtgaaggggctgccgctggaggagtgctgcaaggtcggggcgtgcagcggcgggtcggtgacgcgggcgctcggcggggaggtgcggccggagaactggcagtggatgtacaagcagatgcacgccaggggcttgctgctcccggagctcaagaactgaatgaaactattgctgctgtagctttagctagctaaatgcctgcatgctgcaccagctgttgtatctcccagctctcgaagactcgtagcatcacccagggccggtcgagtggccagtatccagccttccgttgttaattgctggcgttacctttcccctgctagtctgttaatgttactagaatattggtgtccatgaccatgcttgattgctggcatggtgaaggacgggcagatacattagttgatttgtagagccactcctaagactgaatcaatcagatggagtatattgattactgcacttcatgtgtgtgctagctgcctagctagagtactattttctacgcccaaaatttgtatgctgttttgtctttgtaagtacatactcattccgtccaaaaataaaatttgttttagactaaaca

SEQ ID NO: 110702 - DNA, 103 bp, Zea Mays
caccaaattacacaaaggtacatgataagaatatgtctaagtttgtgttatttactcatttgtcctcgattcaccatatcaattaatcatagacagaaaatag

SEQ ID NO: 110703 - DNA, 1087 bp, Zea Mays
aggaaaccatcgtcaatcaaaaatcaaaaacaaaagaagcaaacctcgtcgtcacgccatccctctccacctctcgtcttccagacgcctccaatccgggctcccagcgtctcggaaaagaggagcagcacggcacggcggcgatggcgaggaacgctccaataatatgctaacccgttctacccagtccaattagcagcctcccaaggagaaggagatccaatcctgcgggcgggcgtccccgtatcccatccatcgatccgaatctcggaatctgcaggaccctgcggcgcggcttcttcgtggagaagaggttgctgccgaagccaccgccaggtagccatgtcgtcctccgtgctgagggctgcggccgacagggccattcgcaggcaggccctcacgctgacgaacgccgcggtgtccaggatccggcagctcctcagcctaaggcaacggccatacctgcggctgggtgtcaaagcgcgaggttgcaacggcctctcctacaccctcaactatgccgatgaaaaggggaagttcgatgagcttgtcgaggagaaaggagttaaagtactgatcgaccccaaggctttgatgcatgttataggcaccaagatggactatgttgatgatccattaaagtccgagtttgtgttcataaacccaaattccaaagggcagtgtggctgcggtgagtctttcatgactacaggcagcaaagggtcgacgtcatgaggcgtttttcagtgtaaatgcttagccaagtgtctgcaggctccagctacagattttcttgtgtctgttgcgtcgcagttcattcatatatataataacacagcagtgggtttgtactggatatgcaactaactcgcatttacttgtaagttcacctcaaatgttgttattacatggtctgactctgattatccatgttgtgtatatttgatcgctcgcgatttaagacctcgaaatttgcacgctgcagttggttatttgtaatcgtattcagccgctctgcctctgcataactgcaggagaagagattgtatatatctgactgttatttactgcttagcaaaaaaaaaaa

SEQ ID NO: 110704 - DNA, 171 bp, Zea Mays
ggcattgttgtttttttagataagagacatgacttatctgacagattttgatcttaactaaactcgaaggatcctcatttgatccttatgcttccaaagccattgtatttgcttcttcaacttgtactctgtaagtttctaatgttcatgcaaatgttttccaaatctaaa

SEQ ID NO: 110705 - DNA, 839 bp, Zea Mays
tatatacataaccgctggcaggcaggctcatgcgattagcgcggcggcagggcaggcatggagaaggaggcggcggcggagctggagatccccggtgagtgccagtacgcgggggatccagtgttggtgcgaccgagccagccgacgccgcgccacaccctgcacctctccaacctcgacgaccagcggttcctccgtttctccatcaagtacctgtacgtgttcggcgccgacgccgccgtgcccgccgacgcgctgcgggcggcgctcggcagggtgctcgccgactactacccgctcgccggccggctccggccgagcgccgaggaggatgggaagctcgtcgtggactgcaatgccgagggcgccctcttcgccgagggccgcctcccgggcctcgccgccgccgacttcctcagcggcagcgaccggccgcacaagtcctggaggaagctgcactacagggtggaggcgcagagcttcgtcgccgtgccacctctcgtcgtccaggtgagtgagttagtgggggctctcctctcctccctctttcgcttacagtagtaattaatcgcctcttcatgcatgtaatctgtctgtttcttccaaattcttctcctagttaatcagaaacattttatttgttgccgactaaacagccaatcatcatttcccacccccttatgtaagtaaattaccacttgtttgaagtctaaatttttttgtggttacttttggtgcgccctgaggtggttccagtatagagctgatcgatgcaaaaggccacacatttaccagcaacatgtcatgcaactattcctgccgcgcgctggttacttttt

SEQ ID NO: 110706 - DNA, 1310 bp, Zea Mays
tatatacataaccgctggcaggcaggctcatgcgattagcgcggcggcagggcaggcatggagaaggaggcggcggcggagctggagatccccggtgagtgccagtacgcgggggatccagtgttggtgcgaccgagccagccgacgccgcgccacaccctgcacctctccaacctcgacgaccagcggttcctccgtttctccatcaagtacctgtacgtgttcggcgccgacgccgccgtgcccgccgacgcgctgcgggcggcgctcggcagggtgctcgccgactactacccgctcgccggccggctccggccgagcgccgaggaggatgggaagctcgtcgtggactgcaatgccgagggcgccctcttcgccgagggccgcctcccgggcctcgccgccgccgacttcctcagcggcagcgaccggccgcacaagtcctggaggaagctgcactacagggtggaggcgcagagcttcgtcgccgtgccacctctcgtcgtccaggtcacttggctcgcgtgcggcggcatggtcctctgcaccgccatcaaccactgcatctgcgacggcatcggcaccgcgcagttcctccacgcctgaggcccgagctgccgcggggctactacggcaacggcttcgtgctcgggtgcgccaggtccacggcggcccagctgacgtccccgtcctgcggctcggccgcgcgctacggggtgcggctggtgcaggacgccaaggcgtgcgtggacgacgactacgtgcgctccatggtcgacctcctggaggagcggcgcggcgcccgcccggacctggcggccagcctggtgatctcggcgtggacgcgcctgggcctcgaggacctggacttcggcgccggcaaggccgcgcacatgggcccgctcaccagcgagatctactgcgtcttcctgcccgtggtcggcgacccgcacgccgtcactgtgctcgtctccgtcccgcaggccgccgccgacaagttccagcacttctgcctcgggttcctcaaggacgtcgaagtggacgcgaagctcacctgagctactatggctatgatgtatgatccagcttgctagctcgtcgatgagtctcagtttgattttccaccgtgcattctgctttctgcatgctatatgagaaaatgatggagtattatgctaattactcccggtcaatataattgtgtcgaacggatgaaatgaaagatcgtctggtgatgatcatagtcatgcatgtatcggctgcggtccgatccagtagtaatatcaatcaatcaatcggtgatgaggtcc

SEQ ID NO: 110707 - DNA, 1964 bp, Zea Mays
tatatacataaccgctggcaggcaggctcatgcgattagcgcggcggcagggcaggcatggagaaggaggcggcggcggagctggagatccccggtgagtgccagtacgcgggggatccagtgttggtgcgaccgagccagccgacgccgcgccacaccctgcacctctccaacctcgacgaccagcggttcctccgtttctccatcaagtacctgtacgtgttcggcgccgacgccgccgtgcccgccgacgcgctgcgggcggcgctcggcagggtgctcgccgactactacccgctcgccggccggctccggccgagcgccgaggaggatgggaagctcgtcgtggactgcaatgccgagggcgccctcttcgccgagggccgcctcccgggcctcgccgccgccgacttcctcagcggcagcgaccggccgcacaagtcctggaggaagctgcactacagggtggaggcgcagagcttcgtcgccgtgccacctctcgtcgtccaggtcacttggctcgcgtgcggcggcatggtcctctgcaccgccatcaaccactgcatctgcgacggcatcggcaccgcgcagttcctccacgcctgggcgcgcgccgtgcgcggcggcggcggccgcgacgcactggacgccggcggcgacgacactgccctgccgttccacgaccgccgcgccctgcgcccgcgctgcccaccgcgcgtcgcgtttgcgcacccggagtacagcacccgcggcatcatcaacgccgccgtcgccaacggcaacggcaacggcagcgcgaacgaggcgccgagcctgctggcgcgcctgctggggcagccgctagcgcccgtgtcgctcaccttcacggcggcgcacctcctccggctgaagcggcagtgcgtgccgtcgctcaagtgcacctccttcgaggccctggcggcgcacgtgtggcgcgcgtgggtgcgcgccctggacccgcccggcgcgctgcgcgtgaagctgctcttctccgtgaacgtgcggcggcgcctgaggcccgagctgccgcggggctactacggcaacggcttcgtgctcgggtgcgccaggtccacggcggcccagctgacgtccccgtcctgcggctcggccgcgcgctacggggtgcggctggtgcaggacgccaaggcgtgcgtggacgacgactacgtgcgctccatggtcgacctcctggaggagcggcgcggcgcccgcccggacctggcggccagcctggtgatctcggcgtggacgcgcctgggcctcgaggacctggacttcggcgccggcaaggccgcgcacatgggcccgctcaccagcgagatctactgcgtcttcctgcccgtggtcggcgacccgcacgccgtcactgtgctcgtctccgtcccgcaggccgccgccgacaagttccagcacttctgcctcgggttcctcaaggacgtcgaagtggacgcgaagctcacctgagctactatggctatgatgtatgatccagcttgctagctcgtcgatgagtctcagtttgattttccaccgtgcattctgctttctgcatgctatatgagaaaatgatggagtattatgctaattactcccggtcaatataattgtgtcgaacggatgaaatgaaagatcgtctggtgatgatcatagtcatgcatgtatcggctgcggtccgatccagtagtaatatcaatcaatcaatcggtgatgaggtcctttttgtggtgtcatcaactatctggctcgtggtagctagtcggcgatcatgacgctcatcgtgtcgtgcatatatttgtctgtctctctaattaataaacatgtagtactactagtaattacgatgaagattcatgctcatttattcaattctctactatattaaagcactagttttttctagtttcattgtcgttgtgatccacgtttaaatagtaaaaaaataa

SEQ ID NO: 110708 - DNA, 1974 bp, Zea Mays
tgcatgcacgcacaatcttctctgatcccttcccccccccaaaaactatgctccaggaaaatcagatcagatcaggtgagaatatcatcatgtcccagtgcccctcaaaacaccatgtcgtcctgttcctgtccttgtcatacacgtactgatgtgcatagcacagtctactacagtgatggctggtaccagagactagaggtcgcaaatgcaattactgtgcactgcagtgcagttcaggtcacgtatagtcctgctgtaactcagcaggagcagagtacgccgatacttttgccaggacccccgaatccaaattcgattcagaattgatagcccctgctggcctgcttttaccttggtgacgaccttacttacacttggcgctgcatgcatgcattcatgtgggatgcaatgcaatgcgatgctgctccctgcactgcaccctgtagctttcaggaaagcgaccgacgcattatcttcctttttttattagtttagatttatatttaccaacaacgaattagcgatccagatcaatgtaaatttgttgtttacctattggtgcttaccccccaaaaaaacaaatcgaaattttgatgacggcatgacgtggcgcgtccactcgcgcctcaggtcacttggctcgcgtgcggcggcatggtcctctgcaccgccatcaaccactgcatctgcgacggcatcggcaccgcgcagttcctccacgcctgggcgcgcgccgtgcgcggcggcggcggccgcgacgcactggacgccggcggcgacgacactgccctgccgttccacgaccgccgcgccctgcgcccgcgctgcccaccgcgcgtcgcgtttgcgcacccggagtacagcacccgcggcatcatcaacgccgccgtcgccaacggcaacggcaacggcagcgcgaacgaggcgccgagcctgctggcgcgcctgctggggcagccgctagcgcccgtgtcgctcaccttcacggcggcgcacctcctccggctgaagcggcagtgcgtgccgtcgctcaagtgcacctccttcgaggccctggcggcgcacgtgtggcgcgcgtgggtgcgcgccctggacccgcccggcgcgctgcgcgtgaagctgctcttctccgtgaacgtgcggcggcgcctgaggcccgagctgccgcggggctactacggcaacggcttcgtgctcgggtgcgccaggtccacggcggcccagctgacgtccccgtcctgcggctcggccgcgcgctacggggtgcggctggtgcaggacgccaaggcgtgcgtggacgacgactacgtgcgctccatggtcgacctcctggaggagcggcgcggcgcccgcccggacctggcggccagcctggtgatctcggcgtggacgcgcctgggcctcgaggacctggacttcggcgccggcaaggccgcgcacatgggcccgctcaccagcgagatctactgcgtcttcctgcccgtggtcggcgacccgcacgccgtcactgtgctcgtctccgtcccgcaggccgccgccgacaagttccagcacttctgcctcgggttcctcaaggacgtcgaagtggacgcgaagctcacctgagctactatggctatgatgtatgatccagcttgctagctcgtcgatgagtctcagtttgattttccaccgtgcattctgctttctgcatgctatatgagaaaatgatggagtattatgctaattactcccggtcaatataattgtgtcgaacggatgaaatgaaagatcgtctggtgatgatcatagtcatgcatgtatcggctgcggtccgatccagtagtaatatcaatcaatcaatcggtgatgaggtcctttttgtggtgtcatcaactatctggctcgtggtagctagtcggcgatcatgacgctcatcgtgtcgtgcatatatttgtctgtctctctaattaataaacatgtagtactact

SEQ ID NO: 110709 - DNA, 344 bp, Zea Mays
ggtcttcctgaatttgtcagttttgctgccacgttggtgcaatgatgtaatattgctgctcacgtgttatgctcacgaattttaaaaaaaaaatgacctacaggctacatgtctcctcgttgtccatgaattttcggttcttcttgagcggagcctaaggggatgtttggttagagggactaaagattagtctctagtttttagtctcttttagtcccttttttgccaaacactaggactaaaatatggactaaaatgatttagtctttagtccttcacataggtgctaaaagagactaaaagctcataattatcatgttgcccttacctttttatagataact

SEQ ID NO: 110710 - DNA, 2208 bp, Zea Mays
ctgcccggtagtcaaggcgggagtgggagcgcttctgcctttggtttggtgcgccctcatttatgacgcgcgcaatcttcactgtcttcagtcatcgtcagaatttccttcttttttttttccttccccaacttctccctgcgtcggccgaggctgcggcgactgaccacagctttcgaccctttccagtggagggaacggggttagcgagcggcctccgctgcgacggcaacggcgtgggagggccatggcggcccccgcgctcgccttccccatgttgctggctgcctcactgctctccgtcgccgctcctgcgctggctcgaagcccatcttgccctgatggttggcaaggcggccctgttcagaacagatgcttcatgtacatatcagcctccctttcttgggatagatccgaggctgtctgccataactacagcgggcatcttgctgcagtatcatcagtccaggagctaaacttcgtgaagtctctctgtggatcatcatccacaggatgctgggttggagggcatcactacagcactagtaccggtaacggttggaaatggtctgatgattcctctgtttggaatgaaactgtcttccttggtgagccattgcctgccaactgcagtgatcctgcatgtaaagtagccaccagcaacgatttctgtactttggtcaccaatggtcagccttcaactattactgaaaaaaggtgcagtgagtcccatggtctgatctgcaggatgaaccacgtggacagatgctaccatgatcattgccacaaggagtatttcatatccattattgctgtgagtggtttcatcctggcaaccactctagccgttgtggtttggctgcttgtctacaggcgaagcaagaaaagaagaagatcgcgagaagtgttaagtgcctcagctgctgcattggtagcaccgcaatggaaagtattcaccagtgaagaacttagatcgatcacaaagaacttcagcgagggtaaccggcttcccggcaacgcaaagacaggcggaacctatagtggaatcttaccggatggatccaaagtagcaatcaagaggcttaagaggtcgagcctgcaaaggaaaaaggacttctactctgagatccggagagttgcaaagctatatcaccctaatttggttgctgtaaaaggatgctgctatgatcatggtgaccggtttattgtctatgagtttgtcgcgaatggtcctttggatgtgtggctgcatcatattcccagaggagggcggagccttgattgggcaatgagaatgagagctgccacaactcttgctcagggaattgcgttcttgcacgacaaggtaaagccgcaggtggtgcaccgtgacatccgtgcaagcaacgtcctactcgacgaggatttcgggtcgcatctgatgggggtggggctttcgaagttcgtgccgtgggaggtgatgcacgagagaaccgtcaaggccgcgtcctacggctacctcgcccccgagttcatatacaggaacgagctgacgacgaagagcgacgtgtacagcttcggcgtgctcctcctggaaatcatcagcgggcgccgccccgcgcagtcggtcgagtccgtcgggtggcagaccatcttcgaatgggccactccgctggtgcagtcccaccgctacctggatctgctggacccgctcatccaggagtcgccggacgcgggggtcgtccagaaggtcgtcgaccttgtctactcctgcacccagcacgtcccttcggtgcgcccgaggatgtcgcacgtcgtgcatcagctgcagcagcttgagctcaagtctgcagcgtccgagcagcagctaaggagcgggacgagcaccagcgcgacgtctccaatgctgccgttggaggtccggactcctcgctgaaatgtgctgccagaaattgatagcctttttaagtactctctagctctgtaggtggtaccacattccttgtgggccaccgttatcttgatcagttgtagacttgtcatctgtaacctctaatctgctacatatgtcgtgggttttcaatgtgtgacctaaagaagctttaggcttatgctctcaagtctgaagaaacaactcatctgtatttcatagagtaataacagtagcttgtaatactatttcctatcaacacaactagcagttcgatttctatcatatttacatttggc

SEQ ID NO: 110711 - DNA, 2083 bp, Zea Mays
ctgcctttggtttggtgcgccctcatttatgacgcgcgcaatcttcactgtcttcagtcatctggagggaacggggttagcgagcggcctccgctgcgacggcaacggcgtgggagggccatggcggcccccgcgctcgccttccccatgttgctggctgcctcactgctctccgtcgccgctcctgcgctggctcgaagcccatcttgccctgatggttggcaaggcggccctgttcagaacagatgcttcatgtacatatcagcctccctttcttgggatagatccgaggctgtctgccataactacagcgggcatcttgctgcagtatcatcagtccaggagctaaacttcgtgaagtctctctgtggatcatcatccacaggatgctgggttggagggcatcactacagcactagtaccggtaacggttggaaatggtctgatgattcctctgtttggaatgaaactgtcttccttggtgagccattgcctgccaactgcagtgatcctgcatgtaaagtagccaccagcaacgatttctgtactttggtcaccaatggtcagccttcaactattactgaaaaaaggtgcagtgagtcccatggtctgatctgcaggatgaaccacgtggacagatgctaccatgatcattgccacaaggagtatttcatatccattattgctgtgagtggtttcatcctggcaaccactctagccgttgtggtttggctgcttgtctacaggcgaagcaagaaaagaagaagatcgcgagaagtgttaagtgcctcagctgctgcattggtagcaccgcaatggaaagtattcaccagtgaagaacttagatcgatcacaaagaacttcagcgagggtaaccggcttcccggcaacgcaaagacaggcggaacctatagtggaatcttaccggatggatccaaagtagcaatcaagaggcttaagaggtcgagcctgcaaaggaaaaaggacttctactctgagatccggagagttgcaaagctatatcaccctaatttggttgctgtaaaaggatgctgctatgatcatggtgaccggtttattgtctatgagtttgtcgcgaatggtcctttggatgtgtggctgcatcatattcccagaggagggcggagccttgattgggcaatgagaatgagagctgccacaactcttgctcagggaattgcgttcttgcacgacaaggtaaagccgcaggtggtgcaccgtgacatccgtgcaagcaacgtcctactcgacgaggatttcgggtcgcatctgatgggggtggggctttcgaagttcgtgccgtgggaggtgatgcacgagagaaccgtcaaggccgcgtcctacggctacctcgcccccgagttcatatacaggaacgagctgacgacgaagagcgacgtgtacagcttcggcgtgctcctcctggaaatcatcagcgggcgccgccccgcgcagtcggtcgagtccgtcgggtggcagaccatcttcgaatgggccactccgctggtgcagtcccaccgctacctggatctgctggacccgctcatccaggagtcgccggacgcgggggtcgtccagaaggtcgtcgaccttgtctactcctgcacccagcacgtcccttcggtgcgcccgaggatgtcgcacgtcgtgcatcagctgcagcagcttgagctcaagtctgcagcgtccgagcagcagctaaggagcgggacgagcaccagcgcgacgtctccaatgctgccgttggaggtccggactcctcgctgaaatgtgctgccagaaattgatagcctttttaagtactctctagctctgtaggtggtaccacattccttgtgggccaccgttatcttgatcagttgtagacttgtcatctgtaacctctaatctgctacatatgtcgtgggttttcaatgtgtgacctaaagaagctttaggcttatgctctcaagtctgaagaaacaactcatctgtatttcatagagtaataacagtagcttgtaatactatttcctatcaacacaactagcagttcgatttctatcatatttacatttggcag

SEQ ID NO: 110712 - DNA, 2370 bp, Zea Mays
ctccctcctccttggaaggcaactagatccaccgcttcttattttagccaccaattctaaaacgagccgcgaacgtattattttgtttgccgccatggcgtcatgtatgtgccacgctgtccctaagccacccaagagacgaattaccaaattgatatgactccttgttctaacctcttgtgctgcatgcctgctgattctcgaacaatatggaggtgcaaactgtcttctagttttggatggggattttgccttcaccacaaagagacacgaggaaatgtagacaacgaccatttgttacttcactttcctctttagctcttctttacactttgatctggccatgactctgcgattttccgtccacacctaatatattgtttatgttggttgttgaaacacaactttcggcttcccaattcgttatgcggcctgtgtgcatcatcatatggcccctatcagtaattttttttagctttgacatcaacaacttcgactttgtgcagcatcttgccctgatggttggcaaggcggccctgttcagaacagatgcttcatgtacatatcagcctccctttcttgggatagatccgaggctgtctgccataactacagcgggcatcttgctgcagtatcatcagtccaggagctaaacttcgtgaagtctctctgtggatcatcatccacaggatgctgggttggagggcatcactacagcactagtaccggtaacggttggaaatggtctgatgattcctctgtttggaatgaaactgtcttccttggtgagccattgcctgccaactgcagtgatcctgcatgtaaagtagccaccagcaacgatttctgtactttggtcaccaatggtcagccttcaactattactgaaaaaaggtgcagtgagtcccatggtctgatctgcaggatgaaccacgtggacagatgctaccatgatcattgccacaaggagtatttcatatccattattgctgtgagtggtttcatcctggcaaccactctagccgttgtggtttggctgcttgtctacaggcgaagcaagaaaagaagaagatcgcgagaagtgttaagtgcctcagctgctgcattggtagcaccgcaatggaaagtattcaccagtgaagaacttagatcgatcacaaagaacttcagcgagggtaaccggcttcccggcaacgcaaagacaggcggaacctatagtggaatcttaccggatggatccaaagtagcaatcaagaggcttaagaggtcgagcctgcaaaggaaaaaggacttctactctgagatccggagagttgcaaagctatatcaccctaatttggttgctgtaaaaggatgctgctatgatcatggtgaccggtttattgtctatgagtttgtcgcgaatggtcctttggatgtgtggctgcatcatattcccagaggagggcggagccttgattgggcaatgagaatgagagctgccacaactcttgctcagggaattgcgttcttgcacgacaaggtaaagccgcaggtggtgcaccgtgacatccgtgcaagcaacgtcctactcgacgaggatttcgggtcgcatctgatgggggtggggctttcgaagttcgtgccgtgggaggtgatgcacgagagaaccgtcaaggccgcgtcctacggctacctcgcccccgagttcatatacaggaacgagctgacgacgaagagcgacgtgtacagcttcggcgtgctcctcctggaaatcatcagcgggcgccgccccgcgcagtcggtcgagtccgtcgggtggcagaccatcttcgaatgggccactccgctggtgcagtcccaccgctacctggatctgctggacccgctcatccaggagtcgccggacgcgggggtcgtccagaaggtcgtcgaccttgtctactcctgcacccagcacgtcccttcggtgcgcccgaggatgtcgcacgtcgtgcatcagctgcagcagcttgagctcaagtctgcagcgtccgagcagcagctaaggagcgggacgagcaccagcgcgacgtctccaatgctgccgttggaggtccggactcctcgctgaaatgtgctgccagaaattgatagcctttttaagtactctctagctctgtaggtggtaccacattccttgtgggccaccgttatcttgatcagttgtagacttgtcatctgtaacctctaatctgctacatatgtcgtgggttttcaatgtgtgacctaaagaagctttaggcttatgctctcaagtctgaagaaacaactcatctgtatttcatagagtaataacagtagcttgtaatactatttcctatcaacacaactagcagttcgatttctatc

SEQ ID NO: 110713 - DNA, 1057 bp, Zea Mays
gacgaatcgtccgtcatcttccccaactccgatccatagtaggccagtccagaacacgaggcggcggctatgggcggacatggccacccttactcgccggcggagctgcagctgccggggttcgtgccgcagcggctgtcgcaggcccagatcgtcgcgcctttcgcgggcaccgccgtgttggccgtgctcggcgcctggctcgtctccgggagatgcggcggcggcggcagactatccaggaccgaccgcttgctcatgggctggtggctcttcaccgcgttgacccacctcgtcttcgagccacccttcctcttcaccccggacttcttcagcaaggagaacccaaactacttcgatgacctcttcaaggagtacagcaaaggtgactccagatacgccgctagggacaccgccatcgtcgcgcttgaagcgataaccgtcgggctcaaaggccctgcatcgctcctcgcagtctatgcgatcgcatcccggaagccgtacggccacatcctgcagttcgcagtctcgttaggccagctctacgggtgcctgttctacttcgtcaccgcgtacctggacggcttcagcttctgggcgagcccgttctacttctgggcgtatttcgtcggcaacaacagtttgtgggtggtcataccgacgctcgtcgccacgaggagctggaagaagatctcggcagcgtttcaggctgacaaggtcaagaccagatgatgatgatgatcctgcactgttcctgcgaccagcgaccctccgtttcgccgccacggcctggaggaagtttctttggaaggcacaaaaatgcaatgcatgttgtgcaagaacgggcaaaccatcatgaccgtgtagtttgcgagaagcaaaccttgtacctttttgtgaaaactgtgctgtttcacccatcttgttcagtcgtatgcatgccagggtgactgggtgagtgcatatatatgcaattatgcacacatatctgcatcgtgtttcaaaaaaaatgtatacctgatctttaaggtgacatacattttacattgagttagtg

SEQ ID NO: 110714 - DNA, 243 bp, Zea Mays
gcaccctcggcatcgacaacactttcggcgaggtccgacctagcctcggacggcgacgtgtgtgacaccccagtgtcacctagggtttatctcaaatgccaaaccaagaatcattattttatgtgagccaaagtaagcatgagcatcaaaataacttaagtggcaaagaattcaccaagcatatacttaaaagtatcatgatcaaaacaattgagacttttaaaagataaaaatatgcaaccc

SEQ ID NO: 110715 - DNA, 1032 bp, Zea Mays
accaacgggaagttcggccgatgcatgaaaacacacacggatgaaatcgtttgattggtagccccctgtcaacatctcgatttcgaatttcacccagctccgcacgcgcctcaacccttcctctcgggcggcggcgccggcaaggcggcagccaaccggagcgggagctgcgatgaagaagatcttcggcgccaagaaggacaaggggccgcccccctccatccaggacgccaccgagcgaataaacaagcggggtgagacggtggacgagaagatcaagaagctggacgaggagctagccaggtacaaggagcagatccgcaagacccgccccggcccgtcccaggaagccatcaaggcacgcgccatccgactcctcaagcacaagcgcatgtccgtaccctactctgtctccctgtttcggcctgaaagagtgggtacgaggagcaacgcaacatgttgtacaaccaaacctacaatctcgaccaagttggctttgctgccgatggcctcaaggatgctcagcagactatgaatgcaatgaaggcagcaaacaaggagctcaagggaatgatgaaaactgtcaaaattgatgaaattgataatatgcaagatgaaatgacagatctgatggacgtgagcaatgagatacaagaaactcttggtagaagctacaacatccctgatgacgttgacgaggaagaactgatgggcgagctagatgctttggagtctgatatggaatttgactcagctgcagtcccctcatatcttcaaccagattctgactttgatgctgacctcaacttacctgctgcaccaagtcgccctgcaatggtcccagcaggcgggctgcaggaggatgagctaggattgccagcggtgcctcgggcatcacttcgcagttagaaataatcttgtgtttcgattttaagttggtgtgaaaactctgtagtttgtgtctgagtctgaacaatctaatgcttttcgtcatggtaatgcttcagtttattgcacttcctgttgctgctg

SEQ ID NO: 110716 - DNA, 953 bp, Zea Mays
accaacgggaagttcggccgatgcatgaaaacacacacggatgaaatcgtttgattggtagccccctgtcaacatctcgatttcgaatttcacccagctccgcacgcgcctcaacccttcctctcgggcggcggcgccggcaaggcggcagccaaccggagcgggagctgcgatgaagaagatcttcggcgccaagaaggacaaggggccgcccccctccatccaggacgccaccgagcgaataaacaagcggggtgagacggtggacgagaagatcaagaagctggacgaggagctagccaggtacaaggagcagatccgcaagacccgccccggcccgtcccaggaagccatcaaggtacgaggagcaacgcaacatgttgtacaaccaaacctacaatctcgaccaagttggctttgctgccgatggcctcaaggatgctcagcagactatgaatgcaatgaaggcagcaaacaaggagctcaagggaatgatgaaaactgtcaaaattgatgaaattgataatatgcaagatgaaatgacagatctgatggacgtgagcaatgagatacaagaaactcttggtagaagctacaacatccctgatgacgttgacgaggaagaactgatgggcgagctagatgctttggagtctgatatggaatttgactcagctgcagtcccctcatatcttcaaccagattctgactttgatgctgacctcaacttacctgctgcaccaagtcgccctgcaatggtcccagcaggcgggctgcaggaggatgagctaggattgccagcggtgcctcgggcatcacttcgcagttagaaataatcttgtgtttcgattttaagttggtgtgaaaactctgtagtttgtgtctgagtctgaacaatctaatgcttttcgtcatggtaatgcttcagtttattgcacttcctgttgctgctg

SEQ ID NO: 110717 - DNA, 1045 bp, Zea Mays
accaacgggaagttcggccgatgcatgaaaacacacacggatgaaatcgtttgattggtagccccctgtcaacatctcgatttcgaatttcacccagctccgcacgcgcctcaacccttcctctcgggcggcggcgccggcaaggcggcagccaaccggagcgggagctgcgatgaagaagatcttcggcgccaagaaggacaaggggccgcccccctccatccaggacgccaccgagcgaataaacaagcggggtgagacggtggacgagaagatcaagaagctggacgaggagctagccaggtacaaggagcagatccgcaagacccgccccggcccgtcccaggaagccatcaaggcacgcgccatccgactcctcaagcacaagcgcatgtacgaggagcaacgcaacatgttgtacaaccaaacctacaatctcgaccaagttggctttgctgccgatggcctcaaggatgctcagcagactatgaatgcaatgaaggcagcaaacaaggagctcaagggaatgatgaaaactgtcaaaattgatgaaattgataatatgcaagatgaaatgacagatctgatggacgtgagcaatgagatacaagaaactcttggtagaagctacaacatccctgatgacgttgacgaggaagaactgatgggcgagctagatgctttggagtctgatatggaatttgactcagctgcagtcccctcatatcttcaaccagattctgactttgatgctgacctcaacttacctgctgcaccaagtcgccctgcaatggtcccagcaggcgggctgcaggaggatgagctaggattgccagcggtgcctcgggcatcacttcgcagttagaaataatcttgtgtttcgattttaagttggtgtgaaaactctgtagtttgtgtctgagtctgaacaatctaatgcttttcgtcatggtaatgcttcagtttattgcacttcctgttgctgctgacgtttcaggttccttttttttgtcattctggaatttttcatctgtcacctgtcact

SEQ ID NO: 110718 - DNA, 924 bp, Zea Mays
ataactatcaggatcaaaggtggaaatatcttttccaaggggttcaaaatatcaggcaacaggggtgagcgggtcccccttctccttggtccaagaacaccggtagaggggtaccacataccagaatcttatccagagcagggaacccctcctggccctgcagtatataacggagggggtcaccacacaaaatagataagcgttccagatcgtactggaccaatctgccaccacactttgatcacacacaggaagttgagatcagaaaaatgcaggctgccgctactgccgccgggttctcggccgtgctgcccgccaagggcaggccggcggcgaggagcagggtggtggcccgtgtccccgccacaaggaggagcgtccgtgtagctgccgtcgtcgcgaccgaggccgcgcagatcgactacagctcaagcgtctcggtgttcccgatggaggcctgcgacctgcttggtggcgacgcgtgcaacgggcccatgttcccggaggccaagcccgcctcggcggcggcggcggcgagcaggagtgtggtcggggtggacagggactacctgtcctacgacgagccaaagacgtaagcagcagctagcaactagcataggataacccagcttttagcaccatctgttcttggtgattcgtcgaggcagcaaactaactgtggccatggtgaatccactggactgcagggtgttcccgggcgaggcgtgcgatgaccttggcggcgagttctgcgaggcgccgtaccaggacggcgtctccaaggagctggcgcacgcctgaagaccctgatccatccatttctgtccaccacgctatgtacgtatgtgtagcagatggtttacatctacgtgttagagcccggagagctggagaagctagctagcgtgcttacagaataacagc

SEQ ID NO: 110719 - DNA, 980 bp, Zea Mays
ataactatcaggatcaaaggtggaaatatcttttccaaggggttcaaaatatcaggcaacaggggtgagcgggtcccccttctccttggtccaagaacaccggtagaggggtaccacataccagaatcttatccagagcagggaacccctcctggccctgcagtatataacggagggggtcaccacacaaaatagataagcgttccagatcgtactggaccaatctgccaccacactttgatcacacacaggaagttgagatcagaaaaatgcaggctgccgctactgccgccgggttctcggccgtgctgcccgccaagggcaggccggcggcgaggagcagggtggtggcccgtgtccccgccacaaggaggagcgtccgtgtagctgccgtcgtcgcgaccgaggccgcgcagatcgactacagctcaagcgtctcggtgttcccgatggaggcctgcgacctgcttggtggcgacgcgtgcaacgggcccatgttcccggaggccaagcccgcctcggcggcggcggcggcgagcaggagtgtggtcggggtggacagggactacctgtcctacgacgagccaaagacggtgttcccgggcgaggcgtgcgatgaccttggcggcgagttctgcgaggcgccgtaccaggacggcgtctccaaggagctggcgcacgcctgaagaccctgatccatccatttctgtccaccacgctatgtacgtatgtgtagcagatggtttacatctacgtgttagagcccggagagctggagaagctagctagcgtgcttacagaataacagcagccaagcaaagccaagggtgtgtatataataggcatgccttgggttgtgtcagctgcgactgtatgtatagtttaaaccaagatgaaatggtactgatggtgatattccgtgttttacgatacaaaggctagaaaatagattttgcctggatatcagatagctttcaact

SEQ ID NO: 110720 - DNA, 342 bp, Zea Mays
ctggcgttcttagctcttttaatggtggaagctacggcatcgatctcgagttgcacggaacgcagcttctggtgcagattggcctgcgcatcaaactcaggcgcaacactactcccgctggggtcatcgacggctgctcctggctcgtcatcgcgcttcggttcagtttggacctgcgagaggattttcttctcgatgtcctcgatgttggcggacgtgacgccgaggctgtgcagcaggcgctggtcgtcgtcctcttcgtccatggcgtctgccggagacgagaggcacaaggctctcgcgggcgagcgcgtagcaaggggcaaagtagcggccttgtag

SEQ ID NO: 110721 - DNA, 1667 bp, Zea Mays
ctcctctccacgtggccacctgcctcttacccaacggctatttcaccatgtccccatccccagccgcagccggcctcccgcgtccccgcctgtcgctagttctctcgccttgaccgcagaaataaaacgaaaaaaaaacagcgcgccaccgccaccaaccaaacagaggaaaaggaggggaggaagaagcggaggagagagaaaccctaatcgagatgggcaagcttctctgcgacccctccgccgccgccgtcgccgaggccctgccgccgtccccagcccccgctccgcctccgccgctcctcgcttggtcctccccggccccggcctcctcccccgaggcctccatctcgcccacaggctgggacgcggtctgggcgctcgaggaccagcagcgccgccgcctccaccggatctgggagcggggcgtcgcgtggaaaccctcctcgccgggcgccggcgaggccgcgctgcctcccgtggtcttccgcctcgaccacggcggggaggtcgacgccgatggcaactgcctcttcaccgccgcgcggacggcagccgctgccaaggccgacgcgcgcgagctgaggcaccgcgcagtgcgccgattcgccgaggtctacgccgccgctggggaggacgacaagaacgccgtcgacgccgccgtgaggcacctctacgcgccggatctcaaggccgggtggggtgtccatgtcgtgcaggagatcaaggtgctcgtgcccaaggcccagcgccacgcgctcgactccgccatccaggagctcgtcgatctcggtatccaaagggaaatagcagctgaaactatctacaaggaaagatgcatcactgtagacaatggggatagttggaccaagtacatgtccatttctggttcttcagaggacgagcatgacattatcaccctgcagtacacagaggaggggttactgacaatagatgagaaccgagatggccgtgcagctgcatttggcgatgatattgccattgaatgcctagctactgaattcaagagagaagtttacgtggtgcaagcccatggagcggatgcaatggttgacgaggataactgtgtgttcttcctcccacaccgtcctcgaggagaagtttgcgagccaccgatttttcttttcatgaaaggaacagcatggtgtggtgctggtgctgaccattacgagcctttgatcgccactgtcctccagcatgttactccagacaaggcagctgtcatcctttgagaatgactgcagttttttctacctcccttagcttttagtcagcggtggagttgagacaattttgttattggagctagagtgctgaattgaggagcgacatcaatatgcccaagagattagagagacggccaacctgagtatcttgctctgttgcggggttttgcctgcttatgaagctgtgtatggtgattttgttgttgtatgtttatgagtaggctctgactagcgaggatattctgagtgtagaacgtcgaatctagattttttgagggtctgatgttgtttgccattgtcggccggcatttttgtattgcttattgtgaggattttcgtttcttgacgcctgtttctagggacatcatgattggacatttggaatgcaaacaattcctttgtggtgttgggttaactctt

SEQ ID NO: 110722 - DNA, 105 bp, Zea Mays
cggtcgtaacttgtgttaactaacatgaatatcatttttgcatgcacgttttccatgtttcgagtgacttgcagttcaaatgtgaattatccgaaaaattcaatt

SEQ ID NO: 110723 - DNA, 1971 bp, Zea Mays
gtgccggctccatcttcttcgacccgcacgagcacggctgccatttcatcgaacaagcgccataccggacatggcaaccggatcccctcgccgccgtcctctgccgctcctcctcctgttcctgctcctcttcgccgccaacggcagggccaatgccgcccgccccggcggccccagccccataaagaacgtggtggtgctggcgctggagaaccggtcgttcgaccacatgctgggctggatgcgccgcctgttgggcctccccgtcgacgggctcaacggcacggagtgcaaccccaattccaactccacatcctccatctgcgtgtccgccgacgccgacctcgtcgtccccgacgacccgggccactccttcgaggacgtcctggagcaggtgttcggcaacgtctccgccgccgctgcgcagccgcagccctccatgtcgggcttcgtccgcagcgcgctctccgtcaacgcggtcctctcctccgccgtgatgcgcgccttccgcccctccctcctcccggccttctccgcgctcgcgccccaattcgccgtcttcgaccgctggttctcctccatcccggggcccacgcagcccaaccggctgttcctctactccgccacctcccgcggcgccgtcgcgcacgacaagctcgacctcctcctcggctacccgcagcgcaccatcttcgagtccctcgccgccgacggccacgacttcgccgtctacttcaagaccatccccaccgttctcttctaccgccgcctccgcgcgctccgctacgccgcccgcgccttccaccgctacgacgccgccttcaaggaacacgcccgacgcggcgtcctcccggcgctctccgtcatcgagcccaggtacttcgacctcacggggacccccgccgacgacgaccacccggcgcacgacgtcgccaacgggcagcgtctcgtcaaggacgtgtacgaggcgctccgggccagcccgcagtggaaccagacgctgctcatcgtcacctacgacgagcacggtggcttctacgaccacgtcgccacgcccaccgccggcgtgcccagccccgacggcatccggggcccgccgcccttcttcttcaagttcgaccgcctcggcgtcagggtgcccaccatcatggtctcgccgtggatcaagaagggcaccgtcgtcggccgcgccctcgggcccacggacacctccgagttcgaacactcctccattccggccaccatcaagaagatcttcaacctctcgtccgatttcctcaccaagagagacgcgtgggccggtaccttcgaccacatcttcaccgagctcgaccaaccaagaacagattgcccagagacattaccggaggtgccatttgagagaccaactccacccaaagaacacggctggctctcagatttccagcgggagctcgtcgagctcgcgagcttcctaaacggcgactacatgctgacgagccttgcgcaggagaaccgtaagaagaagatgacagtcaaacaggccgatgcgtacgtgcggcgagccatcacgagctttctgcaggcgagcaagcaggcggtgcggttggccgcaaacgaatctgccattgtgacaatgaggtcgtctctgacaagcaagagcacacgctcatcaagcccttgagttgattcagtctgctaatacatatagctagtgaacagatggatttgagtccacggtctaatgtatattgcctctgaaatgtttatagctgaatagggagctagcagagcctttttaaatataacttttgtttctcttgtcacatattaccaatgtagtataagagttttctgttgacctcaaatgtagatctgcaacctcattttgatcttggattcacgttttggagggacacacgtaagtgttacatatatgtttttttagataatgaaatggaacatggagtgttatatatcacaaattgaata

SEQ ID NO: 110724 - DNA, 123 bp, Zea Mays
ttgattatttcgatggcggcatggatgtccgtgttgtcctgtacgccactgccatcgtctctcagcttctagttccagcagtcagtgctgcgctgcgctggacttttcggcgcatcttaaata

SEQ ID NO: 110725 - DNA, 810 bp, Zea Mays
catatatgtggagagctcatctctgccagtgccaggccacacgcacaccaagagatagagattgctggtcgagaagaagagatgttacatatataataactactgtaggcagcggcatctcctgctgggacgaagattcaagaagctagctaagagagaagggcataacgagataataagcagcgcgcgaagatgcaagactgggcgccggtgttcgtctcgctggtgctcttcatcctgctgtcgccgggcctgctgttccagatgccgggcaagtgccggatcatcgagttcggcaacttccagaccagcgccatctccatcctcgtccacgccatcctcttcttcgccctcgccgccatcttcctcgtcgccgtcggggtgcacatgtacctcggctcctaggcggcggcgcggggcgccgtaccttctctctctcgccgcgcgcgccatcgttctcttcttttatgttctctctctatatatatagtctgtatgaatgaatgatatcatataataatgtacgtaccgtcgtccatgcatttgcccttatatctgtctgccttctgatccgtaaacgaattcagttcttcagtttttttttcctcctctaccgtttgttcacaaagctagctcagctgtagcgtgctgcgtgcatgcatgaaccatgatggcgtagtatcagatcgacgacgaaaggagctagagcaggtttcgcttttgtgcctctgattaatctgatgcagctagagcgtcgcagtacgtacatactgtaggagtgtagccgtatacgtacgtacgtacgtagag

SEQ ID NO: 110726 - DNA, 492 bp, Zea Mays
atggagatgggagggatgagcgatgcggagcggctgttcttcttcgagatggcctgcaagaactccgaggtcgcgtacgagcagaaccccaacgacgccgacaacctgacgcggtggggcggcgcgctgctggagctgtcgcaggtgcgaaccggccccgacagcctcaagcttcttgaagatgcggaagccaaactggaggaggcacttcaaattgatcccaacaagtccgatgcactctggtgcttgggaaatgctcagacctctcatggattcttcactccagacaatgcactctggtgtatttccatgacctcattcttgaatgttgattctttcaaggcaatcaatgatgaaggcatgcccatgtatcagaggcccttcatgaagggcaagctgtacatccacttctcggtggagttcccggactcgttgagcccgaagcagtgcaaggccctggaggctgttctcccgcccaagccagtatcatag

SEQ ID NO: 110727 - DNA, 539 bp, Zea Mays
ccactactggtctctcagacatttaaccgcagaagcagcagcagtgtttgaagacgaaggaaggggccgagaagatagatggctgactgggggcccgtgctcatcgcggtgctcttcttcgtgctcctcacgccggggctgctctgccagatccccggcagcggccggggcatcccggagttccacagcatgcgcaccagcggcgtcgccatcttcgtccacaccctcctcttcttcggcttctgcgccatctttatggtcgccatcggggtccacctctacgccggatagctagtagatacatgttgatcgacggtcggtcgatccagtggacttttttttttttgcatgccgagatttctagctagtaccactagtcagcagcaataataccgatacgcatgcatttgttgtatactgtagtctaccaactcgtgtactctttgcacgggctatacatcttagaatatatacgtacactgtactcctacacgagtatcaaactactttgcagcccgctgctgctgcttaaagtaaaa

SEQ ID NO: 110728 - DNA, 715 bp, Zea Mays
gtgcagcatgattgtggtggcatgtcactggcacgcacgcacccgctggcccagaaagctactagcgtgcccacacaagttcatgcatgtccgtggcagcaagcaggagtatagacatgtagcgttgcacttgcactgccctcccagctggtttggtttggtttcgttttggttttggttgggttttcacaggcaccgcgcgcgcgccggcgatcgagatggccgactggggccccgtggtggtggcggtggtgctgttcgtgctgctgtcgccgggcctgctgctgcagctgccggccaagggcgggcgcttcgtggagttcggcaacttccagaccagcggcgcctccatcttcgtccacgccatcatcttcttcgccctcgccgccgtcttcctcatcgcaatcggggtgcacatcaccacggactagccgtctagccccatagccgggaccgggatctttcttcgttacagtctgcctgtatatacatatatacatacatgctcagtacgtacgctttaccactctgtcagtgagtatctctttgtatcagcacccctgctgtgtgcgtacctagcaagtgtttatatgggctctggtctgggctgttatcattcagcggcgcagcaagaaacccgatcgtttgcttccagttccagacttgcagtgtggcgtgtggccatccatcgtcgatccatctcactaatttacac

SEQ ID NO: 110729 - DNA, 603 bp, Zea Mays
agcaccatgtaaagggtcctgtcctctaaatatagaggactgtcaggtcccctacggctccagcaagggcctctatagcgtcctctaaattttagaggatgtggcaggcactctaaatgtggagggctccgggagtgcgctatccgcgctgctcgtccaccggccgccgcgaggaaacttccgcgtcctcctaccccgcgctggcgactgcatcttcctgggccgagccctcgatccggcgcgcttcgccgccggcatcgaggcaggagggcgagaagcggccgtgccgaggcgggtctgtcggcgtagagctcgcaccccttggaaccgaggccgcgcgacccaccgcaaccgaagatccaagccagcttccccctgttcgtcgccggagagtcgccatcggcaaaaggcttcgtcgtccgccgacttcatcgaaggcagccggcaaaaggaagagaagctcctcgccgccgtcgtcttcgtcttcgattcggtccaccgagccagatccgcgaagagcgagaatggggagtgattggaaccagatgatgtctcaatatggaagcttccttagctagattgacgagcagcctatcggaacac

SEQ ID NO: 110730 - DNA, 240 bp, Zea Mays
atgccgccgccgccccacagccgccccaccgccaccgccgcctcaccatcgccactccaccgccacgccacctcattggccccaatgccaccaccgcctctctcctacaccacaccgccgctgcactcgccggtccggccgccgccggcgcccacgaatccatttcgcgcaaggccctccatgaagaacgtcatcgagttaatgattttgattgtgaatgtcatgttatgtaagtattga

SEQ ID NO: 110731 - DNA, 1857 bp, Zea Mays
gtagagacaaacaaaaagacggccgcgtcactgattcaagctagcccgccatggacgacgcacctgcagccatcgtcaaggccaagggcggcaggggggcgttcctcgcccacttcttcatcgtgctccccgtcgtcaccctgtgcgtcgtcgtctacgccccacgctacttctccggtcccccaccgtactacggcggcggcgccaacgacgtcggcggcatctccgcgcccaggcccagctcgatgacccgtacgtcgtcctcgtcgtcagcgcatctcggcgggttgggctacgtcgctggccgccgcgatgcagacgaagacgaccagcagctgggtgtgggtgacggcggcgcgctgccgcagcaggtggttcttgacaaccaggtgggctccccgtgctcgtccctgcccaaccacaccatctgctgcgaccgctccgactaccactccgacgtctgcttcatggccggcgacgtgcgcacggacgccgcgtccctggccctcctgctgttcccgccgcgagcagcgtcgtcagcgccggagccacccgccgcggaggagcggatacggccctacacgcgcaagtgggacgcctacatcaccaagaccatccacgaggtcacgctccgggtggcccggccggaggaggccgccgccgccgcgcaccggtgcgacgtccggcacgacgcgccggtcctcgtcgtcacggcgggcgggtacagccacaacatgttccacgtcttcaacgatggattcctgccgctgtggctgacggcgcagcacctccgccgccgcgccgtgctcgcggtgctctcgtacagcccgcgctgggccggcacctacggcgagatactcgcaggcctctcgcggtaccacgccatcgacctgctcagggacaagaggacgcactgcttcccgggcgccgtcgtgggcacccgctaccacgactacctcgccgtcaactccacgcggctccgggacaacaagaccatcgcggacttccacgacttcctcgccggcgtgtacagcgacgacgacgtgcgcaacgacaaagctgcaggcggcagcagcagcagcaggaggccggagatggcgtggtacgagcggcgccggccacggctcgggatcgtgtcgcgcaaggggaggcgcgtggtcgagaaccaggcggccgtggcgcagctggcggcgtcggtcgggttcgacgtggacatcatggagacggccaacggcgcgccgctctcggccgtgtacgcgtccgtgagctcgtacgatgcgctggtgggcgtgcacggcgccgacctgaccacgttcctgttcctgcgccccggccgcgcggcgctggcgcagatcgcgccgctcggcatcaccatgctctcgcgcaacctcttcggcgtgccggcggccaggatggggctgcactacgtgcagtacgacgtgagcgcgcgcgagagctcgctgagccgcaggtatccgctcgaccatgtcgtcgtggccgacccggcgagggcaaggcgggagcaggggaagcaggagtgggagcttgtggagcacgtgtacctacgagggcagaacgtcagcctggacctcggcaggttccgggagacactggccaggatccactcccgactcaaggagcaacaacaaggtcacgcttccaggtccagtccagatgcgtcaccgcaaatataggcttgttgcatactgctaggtaacgtagacgtttatttggtgctataaatattgatattttacttataaaattagtgatataaggcaattctataagttagtttattaatttagagtagaggaagtattgttttacttaatgataacgtcatgttcacttgcc

SEQ ID NO: 110732 - DNA, 399 bp, Zea Mays
atggctaaagatcgtgcatggatgtacaatggttggtgtaggaatgaacgtcattctgatgagtgggtagccaagaccaaagattttgtggaccatgctttctccttgtcattaaccggcaatgttagatgccattgtaggcggcacaaaaactatatattccttaataaggaaagagttagcttagatctctatcggtttggatttatgcccggatatgaggtgtgggaacattatggtgaggtagtacccaactggaatgtagaacaggaggagaacaatgattgggctagcaatgatgtgatgcatgagatgctagattcgttacgtccagagttaaaaccaagctccgaggatcctcccacaccagagattttgagatcttttaaaagactctga

SEQ ID NO: 110733 - DNA, 468 bp, Zea Mays
caactcttcatggaatcataagcattttaatatatcagatgagcgctccgaacagcactcgagttctccgaagatcttcatgccctgcaaataaaactcctaaatcagaaagggagataataaacaccagttcagcattctccatcatcatcaatcaatctgcaaacagccaactgaatgatacagcagctatcatatagcagattctgcagcgccccctaaagatccacctactccagtttcatgtttcccattagggtctgctacagcagggcacacatcatttccttcatcaacttccaaaccaacttcatgtctatgtttcttatggttactactattgttgttcaggatttcatcttcagagctcctcttatgtgcgacagcattactatccacccttttatcttccactggatcttttacagaccttccatcgttgtcacctctactgcttctatgagatcg

SEQ ID NO: 110734 - DNA, 115 bp, Zea Mays
ttttttttcttttattggcatttctcttctaacaaagactagcaaacacaacataaactgtcatgctaccaggagaagtgtacataaaacctccctcatcatcgcatccttcgca

SEQ ID NO: 110735 - DNA, 1208 bp, Zea Mays
cccccctgcccatctcctcctctctcaattcttgcagccacaccaccaaaccctagccgccctcccaatctcctcctcccaaggtgccaatccttgccgctcggatcatcgtcacgtggtgcgagtcttcaatcgttttggtggagggaagaagggaggaagtaaagggggagaatccaaggtggtggactctcagatcgttcttagggacttgcccaaacttccggtgaaggcaagtaaaactgtgatggttattccgtctgtcagatgaggagtcgtatacttgattatgttgtgctattgtgttcatattcatattttcttttttgtaccatcatttgaaaatgttcatgtttcatggatttcatatgttgagtttgaggtttgattatgttactcaagtggttattatgtggaatgggtggaagtaaatgtctagcacatttttatttgggaagaactcataatgttgtcatgcataatgcactcatcatccattgcattgaagtttcgtcgcgatcttatggtccgaccgtaccggtacattgagcatcatatgttgcccgagaaggggtatggtgcagcttcatatccttagagatatggaggcagaagtcattattgcatttgtagccatgtgcattcatgggagaggtgtggaatctattatgtggatgtggataatttggacttgtgcatggtgattctacttggcgttgagtttttagttacttgtttacttgctgcaatttactgttcaaaagaaaagaaagaagttctgaacacgtggttgtgtaagcacagttgatttacaatgtcctatttgttgttgttatgtttacttgctgagatgtgttatctcacatcttgcattgtttgatgcaggcacctaatttctgctttgggaatagagggatgtagcagcacggccactacacctttaataaaggaaccaccatttaataatgttgttaaccagagttggtcaagtctagtgaattgctttgttcttggttgagcgtttattttggggtgggctgagtttcttatcccatttgttttacttcagttggggcataaatgagctttaccactttgcatctagtttctactatgtgaattatatgtctttatatcctgtatgaacttcatgttttcccctccttgttatgttagtttcaaaggaggtgctgccggattttgctata

SEQ ID NO: 110736 - DNA, 1434 bp, Zea Mays
ccacagctattgacagaacgctcgccttgccagctgccacttcgccgtgagtcaaccactgatccaactcgtcgcgccatggccgcctcgaacgctggccccgaggccgcagccactgccgccggccaccgtttcaacttcgacgtcatcgtcgtgggcgccggcatcatgggcagctgcacggcgcacgcggccgcgtcccgcggcgcgcgggtcctgcttctggagcgcttcgacctgctacaccacctcggctcctcgcacggcgagtcccgcaccatccgcgacgcctaccccaaggcgcagtacccgccgatggtccgcctcgcgcgccgcctctgggccgaggccgaggccgagtcgggctacagcgtgctaaccccggcgccgcagctctccttgggcccgcgcagcaacgcctctctgctcgccgccgtcaggagcgccggcgcggaggaggcagacctgacgcggagatggggcggggcgttccgggtccccgacgggtgggtggccgcggtgagcgagcgcggcggcggcgtcctgaacgcgaccaaggcggtggccatgttccaggcgctcgccgtcaggaagggcgtcgtggtcagggacaagacggaggtccttggagtcaggaaggcgctggaggagggaggtgtcgtggtgacgacgagcaccggcgccgagttccgcggcgccaagtgcgtggtgacggtaggcgcgtgggcgagcaagatggtcaggtccatcgccggcctggaactccccatccagccgctgcacacgatggtcctgtactggcgcatcaagcccggccacgagcgggagctcgcggcggaatccggtttcccgaccttctccagctacggcgacccgcacgtgtacagcacgccgtcgctggagctgccgggcctgattaagatcaactacgacggtggcccgccgtgcgaccccgacgctcgcgactgggccgacggtggcggtggcgtggcagagcgggtcgcccggtggatcgaggagttcctgcccgatcacgtggacaccgccggcgggccggtctcccgactgtcgtgcatgtactccatgacaccagacaaagacttcgtcatcgacttccttggcggcgagttcgggaaagacgtcgtggtcggggctggattttcagggcatgggttcaagatggcgccggcggtggggaggatcctggccgagatggccatgtatggcaaggagagcacagcgacggaggccggtgtcgagctcggccacttcaggatcaaccgcttcgagggtaaccccttgggaaacgccgcgaattagcaactctgaggatccttcattaaacttgctcggctaaaagcacccgattgatcgtgcacatgtaaaagagttaccaataacttagggaaatttggatttataccattaaaagtt

SEQ ID NO: 110737 - DNA, 185 bp, Zea Mays
tttttttctctttttttgcgattttttttcaaatatttttttatatttttctcttttgcagcagcacataagaagaaaacacactaagtttcagatttttttgtgcaaggacgcgtcctctagaatttctacaagtttgccttaaaatcggaataaatgtttggaaaatgagaagtcctatttcc

SEQ ID NO: 110738 - DNA, 399 bp, Zea Mays
atggcgacgagcgtgccagagggattgctcggcgagccttcttcaccgtggaaggtgcagcaactgctgccgctgtgcgcggtccttgccgtcgtcgtcgcgtggtgtgccgcgcgcgcggcggagtgggcgtggctgaagccgcggcgcctggaacgggcgctgcgggcgcagggtatccgtggcacggcgtaccgcccgctggccggcgacgcgccgctgtccgatcgactcgcccgcgaggccaggtccaggccgcccctaccgccgggctgccacgccatcgtgcccagagccatgccgctcgtccaccacgccatgaacgagcacggtaacttctctctcgctgttgtcgcgttgactctaactggtgatctatctttagcttgccggtcttag

SEQ ID NO: 110739 - DNA, 1182 bp, Zea Mays
atgacccatccactctcgctctggattgacaacgcgtggcctactggtctgggcactggcccaggcaagacctcggtcacctggttcgggccgacgccgagggtgatcataaccgagccggagctggtgcgccaggttctgtccaacaagttcggccacttcgagaaggccggcttcgggcagctgacgcggctgctgcattatggcgtgagcacccacgagggcagcaagtgggccaagcaccgcaggatcatcaaccccgctttccatttcgagaagctcaagcgcatgctgccggcctttgcgtcgtgctgcgccgacctggtgagcacatgggagcgtctggtggtcgcggccgacggcgaaccatgcgaggtggacatctggccggacatgcagaggctgacgggggacgtcatctcccgcgtcgccttcggcagcagctacctggaaggcaggaggatcttcgagctccaggaggagcaggtgcacctcgccatgctcgtcgccggcaagatacacatccctggatacatgatgctgcctacaagggtcaaccggcggatgaagcggatcgcggcggagatcgaagggatccttagacggatgatcgcgacgagggagagctcgctgagggcaggaaaggcgacgagcgacgaccttctcggcctgctgctagagtccaacatggagcagctcaggggcgaaggcggaggcggaggcggcgggacgagctccggaggcatgtccaccgacgacatcattggagagtgcaagctgtgttctacttcgccggcatggagaccacgtgaccatggtgctgtacgaggtgctgcggctctacacgccgctgccggcgttgcaccggcggacatacaagcccatggagcttgggggcgtcaggggccggacgccgacgagttcaggccggagaggttcgcagagggagtcgccagggcgtcgtccgccggggacgcgcctccatcgttcttcccgttcggctggggacctcggacctgcgtcggtcagaccttcgcgctgctggaggccaagatagggctcgccatgattctggggagcttcacattcgagctctccccgtcctactcgcacgcgccgttccccgtcgtcttgctcaagccagagcacggcgcgcaggtcaagctcaggaagctcccatga

SEQ ID NO: 110740 - DNA, 450 bp, Zea Mays
ttcaataatcttatattactattaatcaccaaaactcaactaggagctagacgcctagacactttcacttttcattcttttataggcgtggtaggcatgccatgcacaagccactctaccgtcaaaccctcgatatcataaatacagtaattgaggacatgataccctgccaaatgggaataaaaaaacaatgacaccaccagaaatacaaccattcagtggacttgatttcttttctttaattccacagcttcatctgttgttttcaagtataatatgtacagattgcctgaaacaaggcaaccacagatacgtcaaccatctgctatatattcccacctataagatgtacaacagaaccattgcgtgcccagcccagtctgccagcaaattgacgcacaatgtcagaagatgcacaacataccttgcaatcctgaataatgccggatc

SEQ ID NO: 110741 - DNA, 294 bp, Zea Mays
atgggggcagtgaatgatggggtcgatgaaggagacgttgccatcgtgaatttcggcgccaccattgatgagagggcgtacgatggaattgacgatggtgatggtggcatggagatgagctcatggacggctgctgccaaggactctcgcgtgaggggaggtggaggtgccatggatgaggatgtgacgggtctgggcaccgacggtgtggaaattggcagcgtggcggagaaggccgacgactggatggtggtggacaaagggcctgacatatccgataccagattgttataa

SEQ ID NO: 110742 - DNA, 282 bp, Zea Mays
acctttaccgcacgccgacaaggatgtcgtcgtggtcgtcgccctcatccgccgccgccgcctcgggcgcccgattcggccccttcccgagccgagcgcagcggctcgtgccgtatccgtcgctcgcccgcggaacccccgcctcgacgctcgtcctcaggccccacccggacggccgtggccatggccacctcgcgcacaccggctcctcttcctcgcggtgccgcgccgtagccgccgaggtcgagggcctcaacatcgccaaccacgtcagccaggtta

SEQ ID NO: 110743 - DNA, 1570 bp, Zea Mays
gagatgctctaacgtgatgtcatagggtgattgtcttctgttctgtctggcagtttttttttttttgagaatccgattagcgatcaaggctagaattgattattgctcgcgggcgacaagtgtggtgacgcgtctcgatccgcgcaccgcttgggcttctcgtaggagtactgctcagcctgtcaccgtcagcgtatgttcttgttccagttcctatttttactccaagtccactagggatcctatccagattcgtggggacaccctcttcgagttccaggcttccaaggtccaaccttctcctctgaggccgtagcatttgtctggttggattgggttgttccgcttgggtagccgggtgggatcgaaatctgtgtggcacccatatggcggcggtcgaggggacgaagaagaaggtaatcatcgacaccgaccccggaattgatgacgcgatggccatcttcctggcgctgcggtcgccggagctggaggtgctgggcctcaccactaccttcggcaacgtacacaccgcccttgccacgcgcaacgcgctccacctgctggaggctgttggcaggactgacatccccgtggcagagggatcccatgtaacgatcaagaaagccaccaagctgaggatcgcaagcttcgtccacggttcagacggcctgggaaaccaggacttccctccaccagctaccaagcctgtagatcagtctgctgctgccttcctggttgagcaggcaaatctgtaccctggtcaagttagcgttgtcgccctcggcccacttaccaaccttgctctggcagtcgagcttgaccctgcgttcccggagaagatagggcagattattattcttggcggtgcgtattcagttaatggaaacgtgaaccctgcagctgaggcgaatatctttggggatcccgacgctgcagatatcgtgttcacctgcggcgctgatattttggccgtgggactaaatgtaacccaccaagtggttctaaccgatgctgaccgggaaaagcttgagcagtgtgacagcaaatacgcccgctacttgtgcaagctaatgggcgtttattttgattaccacagggacggttacttcataaaaggagcgtatcttcacgatccaacgacggttattgctgcggtgaacccatcgctgctgacttacacagaaggcgttgtgagggtacagacagtcgggatcaccaagggccttactgttttcgacaacaccaagaaaaggtacggagagatcacagcctggagtggcatgcccaccgtgaaggtcgctgtcaccgtcgatgcccctgccgtggtagagctgatagtgcagaggctgatgaccgatgactagcaacaacgccaccagctgatccggccgcgttgtcattagaacacgagaatgcattgcgttgcattgcatgtggttatgtgcgtgcttggtgtttacgtacagtttatatatatatgcttgatacgtttgctgatgcttctgagagaacatgattaaattaaattaaacttgattaaatgaaattgccacctgatgatgccagataa

SEQ ID NO: 110744 - DNA, 87 bp, Zea Mays
tttttgaagttaagttattgtagggaggacctacaatatttttattatttcttggccaaatatgaacagtttacagaaaagtaaacg

SEQ ID NO: 110745 - DNA, 447 bp, Zea Mays
gcactggcgaatcgagagggaggcaccacgcaccatcttacattgcctgccgtaagcagatcgactactcagctcaaggttgaaggcatggctgcatccaaattctacgtcgccagctgcgccctcctcctaatcggcgtggtgctgctggggcagcagggtatagatggcgccgtcgcctgcccccagttctgcctcgacgtggactacgtgacctgcccgtcctccggctccgagaaactcccggcgaggtgcaactgctgcatgacgcccaaaggctgcacgctccatctctccgatggcacgcagcagacctgcagctagctctgaaccaaagtgtgcgtgattcgatctggacaaagaccaacctgccggttttcgcaaataaaactttggcgcctgtgcatgtggccatccgaataaatgtgtgcatgatcgtctatatag

SEQ ID NO: 110746 - DNA, 1281 bp, Zea Mays
cgtatcataatcgcaaaaagctctccacgctctgaagaagcaacggcgacgcctccgacgacgagcacagctgcccagcccagcaaactagcagcgccctcgtcagttccgtctcgttcccaacctctcccggattcgattcgattgacccgtccgctccaaatcgaatctaatcagcagttttggagttgcggaagggagaaagagagaggagaggggcatggatcaggtgctcaacaaggtggggagctactggttcagcaaaagggccagcaaggaaatcgactccatcggcgacgacatcagccatactaccctcccaagataactactataggaatctgatgaaccaagatgatacagataatttaggctcggaggattacgtgcaagttgatcctcttgtagctaatatgaattcccagacaaaaccaaagggcctctcaaaaaatttcactgatgatgaggacattctactgttgtcagcgtatctcaatgttagcaaagatcctattgctggaagggaccaaaaagatggcagattttgggaaagaattgaaaagtattatcatgtcaatttaacatttgaatcgctcttcattgcatcatcgatggggtataatccaaaagaaagtaagtctttccaaagttactatgaagccatacaaaggaagaatgaaagtggaaagacaatgaatgacaagattgctgatgctaaagctatgttccaaaccttaagaaaaaaggcttttactttgtttcatgcttggaatattcttagacacgagccaaagtggtcatcaataaaggactccacaatggctaccaagaagctagatcctcacaacggtaatgaagatgatggacatgacacccctagaccaccaggaaggaaagccgagaaagataaattgcgagcacgaaagcgagaggacaatgacaatgatgcattgatggaagaactaaaaaaattagagagtcaagattggagatagaaaatgatcgtaatgcacgagaagacaagttattagagccggagagtagtaaacttgatcttgagcgtgaacaacgtgacgacaaggtgatgagaaccgacacaagtacaatggatgatgagtcgaaacaatattttaagttagtgaaagaggaaattttggcgcgatgttttgggagaaagcaagattgaggggtcatgttattagagttgcttttagtcatactgaacagacttgtattttttctgtctcttcaatatagtatttttcctgaaacgactacaag

SEQ ID NO: 110747 - DNA, 642 bp, Zea Mays
atggctgctcccagactcgccgccgccagctgccacgctctgcgcggagtgctccacgacaagctccgcgccgttgagctgcagctgcgggcgtgccgccgctccctcgccggcgcgtccggctcttcgtcgacgacggcagccgccgtggccgcgctcgtctgcgccgccgcggcgttcccgcgagccgcggccttcttcctgccactcgtggcctccacctccctctgctgcacggcagcgtgcctgttcgccgccgtggagcggagcgcggccaaggaggctgtagaggccgtggtcgtggacggcgagggaaaggccgaggccgggctgctacaggtgatcggcgaggccaacaccagcgcgtacggcgacaggctcggcagcgtccaggtgggatgcttcatccgcaggtccgcgaggcgaggcgtggacgaggacggcgaggaggtcgtgttcgccggcacgctggcgccctgcacggcgggcttcgtcggcgccggtcacgcccagcggcgcggcgccgcgctggaggaggagctcacggcgatgcgcgtggatcggctcgccgaaggcgtctggaacagctacttcggcgggtggtctaggtggcaccacatcgacacggcatgcagcctctga

SEQ ID NO: 110748 - DNA, 1027 bp, Zea Mays
gccagcactatatatacgggtcctagcttaggtgaccctacctcagcacagcaagtgtagtctctcggttgtgtgcgagcagtgacacggctgacgacgacatggcgaagctgcacctgctggccctgtgcgccttcttcttcctcctaggagggtcagtggcggcagctcagtggacacccgccttcgccacgttctacggcggcagcgacgcgtcgggtaccatgggcggcgcgtgcgggtacggcaacctgtacgacgccgggtacggcacgcgctcgacggcgctgagcacggcgctgttcaacaacggcgccatgtgcggcgcgtgcttcgccatcgcctgcgacgcggggcggtcccagtggtgcaagccgggcgccgcctccgtcacggtcacggccaccaacctgtgcccgcccaactgggcgctcccgggcgacgccggcggctggtgcaacccgccgcgccgccacttcgacatgtcgcagccggcgtgggaggccatcgccgtgtaccgcgccgggatcgtgcccgtcaactaccgccgcgtcccgtgccgcagggccggcggcgtcaggttcaccgtccaggggcgcagctacttcgagctggtcaccgtcgccaacgtgggcggcagcggcgtggtggcgcaggcgtgggtcaagggctccgccacgggatggatggccatgagccgcaactggggcgccaactggcagagcaacgcctacctcaacggccagggcctctcgttccgcctcagggccgacgacggccgcgtcgtcacggcgtataacgtcgcgcccgccggctggtggttcggcgccacctacacatccaatgtccagttctattgaccgccggcctgttgccgagaatggcgcgcgttccatcgacatctctaattctctacgctactatgctagtggttttcaatttcttgcatgtgtctctcttttctctctctttctctttgacaatttgttctgctctttaccagttcacaagttgttatttggtagag

SEQ ID NO: 110749 - DNA, 1578 bp, Zea Mays
atgcatgaaccacgcgcccgggttgtcggcgacgaagcggacgacggcccagccaagcctgggcacctgcaccgtgttcttgagcaaggggtcgacgaggttgtaggtcctgacgtgcttggccgggtcgtagttgccgtggccctgcgcgagcacgaagaagtcgtggccgtggaggtgcatggggttggagtcgctctgcatggtggccgtgctctggaacaccacctcgaccgtggcgttgtgcgcgaagcggcgcaccgtggtggccttccgcgtggcctcgatcttctcgagcggcacgccggggccgacagggatgagcgccgggtcggtgaagttgaacacgctgggcggcctggccggcagctcctgcacggcgaggccggcgttgccgccgtactgccgcgcctccagcatggacatcctctcggggaggcggaaggagacgttgttcatgtaggccacctcgatggcctcggcctcgtcgccgcctccccgcctgcaggacggcctgtcccctgggcagatggtgcccttgccgagcgagatgaagaggcggtcgtcgacgcggccccggagctgcggcagcagcgggtgcgtcggcaggccggacaggttgccgtggaagtggaacgtcgtggtcgtgtcgtgctggtcgggcatctccggcatgggaggcgggcggccgtctctgcacccgctggccgcggctccggttgtgtcgtcgttggcgtactgcactatgcctctggatacgaacaccgggatctgcgggtccggcgccggcggctggttggcgagcgcggccatgtagtagcggcagggcggggcgtcggcgaccatgagcacgtcgaacgtctcgccgggcgcgatggccaccacgtcggtggtgtacggcgtgatgtagttggcgtcggcgcccaccacggtgaacttgtggccggcgaccttgaagtagtactcggagaagagcgccgcgttcacgagccggagcatgtacgtcttcccctgctccacgttgagaacgaagttgtcctctacgacgccggagcagttgtagagatcgccaagttttccattgatagtcgccccagcggggttatcactgaacgagccgccattggagaagttcttgtccactttcatcaaatctctctgccaccattcacctatgatgatgggaacatccacatgaggctgatgattctggaatgggtaagagccggacttggggcggatgatgatgatgccatgcagggttgcccggaggatggagacgtgggagtgccaccacaacgtgccctcctgcccgtccaccttgaaacggtaggtgaacgtggagttgggctggattgggcactgcgttaccattccggcgccatcggcccaacacgtcaggcgctgctttacgccatgcctgtgaattgttatttcaaagggcgactcgttgaccaggtgcacaatcaccgtgtccccttccgtggcctctaccggtgggcctggaaactgaccgttgaccacagtggccagcgtatcattgcagaggtgtcggatatacacttgctttacctgtga

SEQ ID NO: 110750 - DNA, 357 bp, Zea Mays
atggcgtcctcggagcaggcggacaggccaggtcaggacgaggaggacgaccatgcatgcatgatggcgatgtgggaaggggaagacaaggtcgccgtgggtacggtacaatgtagaatcagctcgccggagctcctcggtcgtgaccgcagccgtagtgctcctccgatgagacccaaccgtgccacggcagggcgctggttccaacaaggcagtaacattgtttatgcccctgctaaagaaactagcttaagggcacaagtactcttggtcaatgaactgatcaatcatgcccgtggccaattaccgctagacttattgtattattctcttggagctatgcagaaaatagtgtga

SEQ ID NO: 110751 - DNA, 564 bp, Zea Mays
atgtctaagaagatcgttatcaaagccgacctcatcggcgaaaaatgcaagagtgagatcctagcaattgtttccaagaaccaaggaatcaagtccatgacgatcgacgccgagaagtgcacgctgacggtggtggggaccgtggacccggtgcgcgtggtgcagcggctgaagaagaagtgcttcgaggcgaccatcgtgagcgtggaggacgacaagcccgccaagaaggacccctgcaaggaggcgtgcgagaagctgtgcaaggagaggtgcgacaaggtcacctgctgcaaggagtgcaaggagaggtgcgagaaggagtgcaaggagaagtgcgagaaggagtgcaaggcgtggctctgcaaacgccgctgctgctcctcctccagctgcaggcccagcagcagcgcgtgcggcggctgcagctatgatcagtgcgccgccgtgcctagtagccacccttattacagctactacaaccacggaagcgccggcgggtacccaccatactacggctgctacgaagagaggtcgcatgatggagcctgcaccatccagtag

SEQ ID NO: 110752 - DNA, 531 bp, Zea Mays
atgtctaagaagatagtggtcaaagctgacctcgtcggcagagcatgcatgagcgatatcctgtcggtcgttgccaccctccaaggtatcaagtcgatggacatcgacgccgacaagtgcacgctgacggtggtcggcaccgtcgacccggtgtgcatcgcgcacaggctcaagaagaagtgcttcgccgtcagcatcgtcagcgtcgaggacgacaagcccaagcccccggagaagaaggacccgtgcaaggaggcgtgcgagaagctgtgcaaggagaggtgcgacaaggtcacctgctgcaaggagtgcaaggagaggtgcgagaagtcgtgcaaggagaggtgcgagaggcgctgcaaggcgtggctcgagagcggctgctgctgcaagcccagcccgggctgccgctgcacgcgctgcgccgctgtggccgtgcccagctgcgactacccctactactcctactgctacccctacagcgggtgcggcggcggcagcggcagctggccctggccctacggctgctag

SEQ ID NO: 110753 - DNA, 1380 bp, Zea Mays
atggagggcacggcgcgccccgtcccgggggaccccctgccgctggggctctcacggggctaccgcatcacccgtcccaagcagctagacttcttccaccggttcatggcgtcccctctggtacccaccttctccgccatgcgcgacggcctctctgttaaccacgcccacattttctacatgacagacaactggtcttctaccatcttggagaaaatcaatgttaagaagcttgtgtctgtcgtgaaagagaaattagcaaatcggcaggaagaggcctcttggaccaaagatttaaagaaccacttgcatgatgttatgtctttaggtgtaggcacggagatcttgatcacaccagacaccactttgctgctggagttatttgatatcaagaaaggcaatcgaggaaaagcaatatttcaccacgaggcaaaaaatctggatgctcttaacctatttggtatacagacacccctttacctattgcagcttcctcatcataatattacattccaagcatcttggcctggattatttgttgataagaagggaacatattgggatgtgccattatcattatcggctgaccttgcttcagttggctccagttctggattgagttatcatctattattgcagcagaatagtggggaaccaaaatgttttgggggtgatgaaacagatgatgttcctactgctctgttacctggcctatgtgctaaagtggctatttccatgaagaaaagcattgatgcttggaggaaaaaagaagataagctaaaaaaagttcagccatatgatgtatttctctcggattcacatgtttctttaactggtattgttggtggagtagccagtggatatttgggagactgttcaaggagagtggctatacgagatgaaacacacaagagtaatgcttttataatgtttgacgagaggaataaacgtgctgcctttgcagacctctttgcttctgttactttcactgctcaatacgggaattttcagaggctttttctggatttgactaaggcaagtgcccgatttgatatcacctctggttcattgttcttatgtggtgcttctcgccttgcacaagatttcttcttctctagaagacctgatgtagagacattctgcgatatttgtcctgatgtgacagtttcctttcaacaacagatagttgggcccttcagttttcgtgttgaatcctctgtagccattgaccccagaagccaggaccattttgttcgagtggatgatccgatcttcgcaattgattgggctctcaaagtcctgggttcagcaaaggccacagcgtggtattcacccaagcatcaggaggccatgatggagctccggttctacgaaacctga

SEQ ID NO: 110754 - DNA, 2098 bp, Zea Mays
gggcgtggtggtggtgggtgctttgactgcaggcctcggcacggtaggcacaaatcattttggccgctgcgtcgcgttgggagcagtattctactgtgcctgcgtcccgacaagcgaaaagaagagacgggggagggtgggagaacggataccgaaaggggtaggagagtgagcagccagagaacagggaggtagagaggaggaggaggtagaaggcgaaagaaggggaaccaaatcttggacgggaacacatagatttctttggtggaggaaggaggagggcaacaagaggaggttacaggtagcccaatagatctactgctgttgagggagttgatgcaaagctgagttgctgcgcgttggctttctttagagatggcttcagctggtgttgccccttctgggtacaagaacagcagcagcaccagcattggtgccgaaaagttgcaagatcacatgaacgagctaaagattagagatgataaggaagttgaagcaaccataattaatgggaaagggaccgaaactgggcacataattgtcaccactactggtggcaagaatggtcaaccaaaacagacagtgagctacatggctgagcgcattgtaggtcaaggttcttttgggattgtcttccaggccaagtgtttggaaacgggtgagactgttgccataaagaaggttcttcaagacaagcgttacaagaaccgcgaactgcagaccatgcgcctccttgaccaccctaatgttgttgctttgaagcattgcttcttttcaacaactgagaaggatgagctttatctaaatttggtccttgagtatgttccggagacagttcatcgagttgtgaaacatcacaacaagatgcaccaacgcatgccacttatttatgtgaagctttatatgtaccagatatgtagagcattggcttacattcatggtactatcggtgtctgccacagagatattaagccacaaaatcttctggtgaacccacacacccaccagcttaaaatatgtgactttggtagtgcaaaagttctggtcaagggggaaccaaacatatcatacatctgctcgcgatactatagggctccagagctcatatttggtgccactgagtataccacagcgattgacatttggtctgctggttgtgttcttgctgagcttatgctagggcagcctttgtttccaggtgaaagtggtgtggaccaactcgtcgaaatcatcaaggtccttggtactccaacaagggaagaaattaaatgcatgaacccgaattacacagagtttaagttcccacaaatcaaagctcacccatggcacaaggtattcaacaaaaggatgccgccagaagctgttgatctggtctctcggctactccagtactccccaaatctgagatgcactgctgtggaggcgcttgtccacccattctttgacgagcttcgagatcctaatactcgtcttccaaatggccgcttcctgccaccccttttcaacttcaagcctcacggtatgtttcatgcctactcgtttcagcattattgtcgatgctgttacagccagctaaatgtgtatctccaagtttgttctttgtatatccaccagctcacatgcttctgccacttctgttctgcagaattgaaaggagtcccagcagacattgttgcgaaattggttccagaacatgcgaagaagcaatgctcttatgttggatcgtgagatgaccgtgccttgggactggaacctgaggtcgcaatcgtgcatttcccctgggatgttggatgatcttgaggcatgcgagcctgtcgttgaagatgcaaggttacctacttgtacgacgtacgccaatgcgacctgtgtagctgtgagtagtctaatgttgcagtgacatgtaatggcgcacccccgtcctactaacagatgcttactggagattgccatagctgatcttgtaatttgttatagggcagtatgaatatatttatggtagcttgaatctatttgtggattcacttcgtttttccatgtttccttgtctccagacctggacttggactgctattgatttttgtttcagaattcctagcta

SEQ ID NO: 110755 - DNA, 2083 bp, Zea Mays
gggcgtggtggtggtgggtgctttgactgcaggcctcggcacggtaggcacaaatcattttggccgctgcgtcgcgttgggagcagtattctactgtgcctgcgtcccgacaagcgaaaagaagagacgggggagggtgggagaacggataccgaaaggggtaggagagtgagcagccagagaacagggaggtagagaggaggaggaggtagaaggcgaaagaaggggaaccaaatcttggacgggaacacatagatttctttggtggaggaaggaggagggcaacaagaggaggttacaggtagcccaatagatctactgctgttgagggagttgatgcaaagctgagttgctgcgcgttggctttctttagagatggcttcagctggtgttgccccttctgggtacaagaacagcagcagcaccagcattggtgccgaaaagttgcaagatcacatgaacgagctaaagattagagatgataaggaagttgaagcaaccataattaatgggaaagggaccgaaactgggcacataattgtcaccactactggtggcaagaatggtcaaccaaaacagacagtgagctacatggctgagcgcattgtaggtcaaggttcttttgggattgtcttccaggccaagtgtttggaaacgggtgagactgttgccataaagaaggttcttcaagacaagcgttacaagaaccgcgaactgcagaccatgcgcctccttgaccaccctaatgttgttgctttgaagcattgcttcttttcaacaactgagaaggatgagctttatctaaatttggtccttgagtatgttccggagacagttcatcgagttgtgaaacatcacaacaagatgcaccaacgcatgccacttatttatgtgaagctttatatgtaccagatatgtagagcattggcttacattcatggtactatcggtgtctgccacagagatattaagccacaaaatcttctggtgaacccacacacccaccagcttaaaatatgtgactttggtagtgcaaaagttctggtcaagggggaaccaaacatatcatacatctgctcgcgatactatagggctccagagctcatatttggtgccactgagtataccacagcgattgacatttggtctgctggttgtgttcttgctgagcttatgctagggcagcctttgtttccaggtgaaagtggtgtggaccaactcgtcgaaatcatcaaggtccttggtactccaacaagggaagaaattaaatgcatgaacccgaattacacagagtttaagttcccacaaatcaaagctcacccatggcacaaggtgtaattttttctacattttttataatgttctaaaaaaactgttgctaccggtttactaactgcctttttggatattttatctttcaggtattcaacaaaaggatgccgccagaagctgttgatctggtctctcggctactccagtactccccaaatctgagatgcactgctgtggaggcgcttgtccacccattctttgacgagcttcgagatcctaatactcgtcttccaaatggccgcttcctgccaccccttttcaacttcaagcctcacgaattgaaaggagtcccagcagacattgttgcgaaattggttccagaacatgcgaagaagcaatgctcttatgttggatcgtgagatgaccgtgccttgggactggaacctgaggtcgcaatcgtgcatttcccctgggatgttggatgatcttgaggcatgcgagcctgtcgttgaagatgcaaggttacctacttgtacgacgtacgccaatgcgacctgtgtagctgtgagtagtctaatgttgcagtgacatgtaatggcgcacccccgtcctactaacagatgcttactggagattgccatagctgatcttgtaatttgttatagggcagtatgaatatatttatggtagcttgaatctatttgtggattcacttcgtttttccatgtttccttgtctccagacctggacttggactgctattgatttttgtttcagaattcctagctacctgttgcctagtgcttcccag

SEQ ID NO: 110756 - DNA, 1889 bp, Zea Mays
gggcgtggtggtggtgggtgctttgactgcaggcctcggcacggtaggcacaaatcattttggccgctgcgtcgcgttgggagcagtattctactgtgcctgcgtcccgacaagcgaaaagaagagacgggggagggtgggagaacggataccgaaaggggtaggagagtgagcagccagagaacagggaggtagagaggaggaggaggtagaaggcgaaagaaggggaaccaaatcttggacgggaacacatagatttctttggtggaggaaggaggagggcaacaagaggaggttacaggtagcccaatagatctactgctgttgagggagttgatgcaaagctgagttgctgcgcgttggctttctttagagatggcttcagctggtgttgccccttctgggtacaagaacagcagcagcaccagcattggtgccgaaaagttgcaagatcacatgaacgagctaaagattagagatgataaggaagttgaagcaaccataattaatgggaaagggaccgaaactgggcacataattgtcaccactactggtggcaagaatggtcaaccaaaacagacagtgagctacatggctgagcgcattgtaggtcaaggttcttttgggattgtcttccaggccaagtgtttggaaacgggtgagactgttgccataaagaaggttcttcaagacaagcgttacaagaaccgcgaactgcagaccatgcgcctccttgaccaccctaatgttgttgctttgaagcattgcttcttttcaacaactgagaaggatgagctttatctaaatttggtccttgagtatgttccggagacagttcatcgagttgtgaaacatcacaacaagatgcaccaacgcatgccacttatttatgtgaagctttatatgtaccagatatgtagagcattggcttacattcatggtactatcggtgtctgccacagagatattaagccacaaaatcttctggtgaacccacacacccaccagcttaaaatatgtgactttggtagtgcaaaagttctggtcaagggggaaccaaacatatcatacatctgctcgcgatactatagggctccagagctcatatttggtgccactgagtataccacagcgattgacatttggtctgctggttgtgttcttgctgagcttatgctagggcagcctttgtttccaggtgaaagtggtgtggaccaactcgtcgaaatcatcaaggtccttggtactccaacaagggaagaaattaaatgcatgaacccgaattacacagagtttaagttcccacaaatcaaagctcacccatggcacaaggtattcaacaaaaggatgccgccagaagctgttgatctggtctctcggctactccagtactccccaaatctgagatgcactgaattgaaaggagtcccagcagacattgttgcgaaattggttccagaacatgcgaagaagcaatgctcttatgttggatcgtgagatgaccgtgccttgggactggaacctgaggtcgcaatcgtgcatttcccctgggatgttggatgatcttgaggcatgcgagcctgtcgttgaagatgcaaggttacctacttgtacgacgtacgccaatgcgacctgtgtagctgtgagtagtctaatgttgcagtgacatgtaatggcgcacccccgtcctactaacagatgcttactggagattgccatagctgatcttgtaatttgttatagggcagtatgaatatatttatggtagcttgaatctatttgtggattcacttcgtttttccatgtttccttgtctccagacctggacttggactgctattgatttttgtttcagaattcctagctacctgttgcctagtgcttcccag

SEQ ID NO: 110757 - DNA, 1994 bp, Zea Mays
gggcgtggtggtggtgggtgctttgactgcaggcctcggcacggtaggcacaaatcattttggccgctgcgtcgcgttgggagcagtattctactgtgcctgcgtcccgacaagcgaaaagaagagacgggggagggtgggagaacggataccgaaaggggtaggagagtgagcagccagagaacagggaggtagagaggaggaggaggtagaaggcgaaagaaggggaaccaaatcttggacgggaacacatagatttctttggtggaggaaggaggagggcaacaagaggaggttacaggtagcccaatagatctactgctgttgagggagttgatgcaaagctgagttgctgcgcgttggctttctttagagatggcttcagctggtgttgccccttctgggtacaagaacagcagcagcaccagcattggtgccgaaaagttgcaagatcacatgaacgagctaaagattagagatgataaggaagttgaagcaaccataattaatgggaaagggaccgaaactgggcacataattgtcaccactactggtggcaagaatggtcaaccaaaacagacagtgagctacatggctgagcgcattgtaggtcaaggttcttttgggattgtcttccaggccaagtgtttggaaacgggtgagactgttgccataaagaaggttcttcaagacaagcgttacaagaaccgcgaactgcagaccatgcgcctccttgaccaccctaatgttgttgctttgaagcattgcttcttttcaacaactgagaaggatgagctttatctaaatttggtccttgagtatgttccggagacagttcatcgagttgtgaaacatcacaacaagatgcaccaacgcatgccacttatttatgtgaagctttatatgtaccagatatgtagagcattggcttacattcatggtactatcggtgtctgccacagagatattaagccacaaaatcttctggtgaacccacacacccaccagcttaaaatatgtgactttggtagtgcaaaagttctggtcaagggggaaccaaacatatcatacatctgctcgcgatactatagggctccagagctcatatttggtgccactgagtataccacagcgattgacatttggtctgctggttgtgttcttgctgagcttatgctagggcagcctttgtttccaggtgaaagtggtgtggaccaactcgtcgaaatcatcaaggtccttggtactccaacaagggaagaaattaaatgcatgaacccgaattacacagagtttaagttcccacaaatcaaagctcacccatggcacaaggtattcaacaaaaggatgccgccagaagctgttgatctggtctctcggctactccagtactccccaaatctgagatgcactgctgtggaggcgcttgtccacccattctttgacgagcttcgagatcctaatactcgtcttccaaatggccgcttcctgccaccccttttcaacttcaagcctcacgaattgaaaggagtcccagcagacattgttgcgaaattggttccagaacatgcgaagaagcaatgctcttatgttggatcgtgagatgaccgtgccttgggactggaacctgaggtcgcaatcgtgcatttcccctgggatgttggatgatcttgaggcatgcgagcctgtcgttgaagatgcaaggttacctacttgtacgacgtacgccaatgcgacctgtgtagctgtgagtagtctaatgttgcagtgacatgtaatggcgcacccccgtcctactaacagatgcttactggagattgccatagctgatcttgtaatttgttatagggcagtatgaatatatttatggtagcttgaatctatttgtggattcacttcgtttttccatgtttccttgtctccagacctggacttggactgctattgatttttgtttcagaattcctagctacctgttgcctagtgcttcccag

SEQ ID NO: 110758 - DNA, 377 bp, Zea Mays
atggatgaagagtcagtgtataaaaacatcgtcgagggcataattgggatcatctcaaaaaccatctcaaagaaagggatgcttgaagtggacaactctttgagtgaggaaggcaaaaaggagttcaacaaggcttacaatgcatcgttttacctgtgcatggatatactctacaaatgctatgaagatgtggcctctggaagtgaaatctagaatgtggtgttggctaggcggaggttttatgataaagagggcctgtcaactttttcgatgggcaacatcgaccaaactcacatatggaaggttggtaaaaaggtgcgctcaacccatccaaaaggagaccttggcccgctcgatgccttcagtgctggagtgta

SEQ ID NO: 110759 - DNA, 2216 bp, Zea Mays
aggagcggatacaaacacccatcgaagccacaggacgactacatgtacatgcaacacatagactaaatataggctatagtagctagtgcacctgaaggcaataggtacctaccagcaggccagcaaggtatagatagccatggccatgaaatcttcatcattgtgcaatccatttgtctccttgttcttcttcctcctgcggaagctcgccggtcatcggtaccaccgtggcaggatggcagtgccgacgaagccgagcccgccgccgccgccgctgcccacgttggacatgctacacggccagaccctagtggtcgacgtggaggcgtggatcctgcgcccgccggtgtccgccttcccgtacttcatgctcgtcgccgtcgaggccggcggcttcctccggggtcttctcctgctgctcctctacccgctgatgctcctcctcctcggcgacggcgcgcgggctaaggccatggccacggtcgctctcgtcgggctggaggagaaggaggtggccagggtcggccgagcagtgctgcccaagttcttcctggaggccacggcggcggagggcgtggcagcggtgcaggcggcagcgcgggtggtggcggtgaccgcaaccttcccgagggtgatggtggacggattcctgagggagtatgtcggcgtggacgccgtcgtggggcctgaggtgaggtcggtcggtggggtcctcgcggggctgatggacgatgaggacgcagatgaggtggcggcgaagacgcttcgggccgtgtttggcgacgacttggaggctgcgagaaagaagggcgccgtggggctcgtcggaccggcgagcagcggtagggtgcactaccttttatgtccttactactgcaaggaaactttcgctgtaagcgagaccgacacgcggggatggcgaccgctgccgcgggacaagtacccgaggcctctcgtcttccacgacggccgcctcgccttcgcgcccacgccgccggctgcgctcgccatgtacaccttcctcccgttcggcatcgtgctcgtcgtcttccgcatcatcgccttctccttcctcccgtatcgcgtctgcttcccggtaggtgcgctcaccggagtgcactaccgcctcgtggccggccacgagcccaccgccacgcgccaaggcggcggcgggcgactgtacgtctgcaaccaccgcacgctgcttgaccctgtcatcgtggccgcggcgctggggaagccggtgaccgcggtgacgtacagcctgagcccggtgtcggagctgatcgcgccgatccgcacggcgcgcctgacgcgggaccgcgagaaggaccagcgcaacatggcggcggtgctggcgcgcggcgacctggtggtgtgccccgaggggaccacgtgccgggaggagtacctgctccggctcagcccgctcttcgccgagctcggcgtcgacgtgaaccccgtggcgctggacacgcgcgtcggcatgttctacggcacgtccaccaagccggggcgcaagtggatggaccccttctacttcatgatgaacccgcggccggcgtaccgtgtggagttcctgccgcgcgccgccaccgcgccggtggacaacggtggccgcggccacagcatcgacgtggcgaaccgggtgcagcgcgagctcggcaaggcgctggggtttgagctcacagggctgacccggaaggacaagtacttgacgcttgccggcaacgaaggcgtcgtgccgaccgcgcccaaaaaccactgacgtaaataattgtccatgtggtttttccgttccaatgagcagcgcggccggacctctcgaagcacgtacggttgctatataggtccagtcgtctttgcgcaagaaataaaacatacacgtgcatgtaattaaggttaccatttagtttgcaaatcaaacgatctatgcacaagctcaacaaaaacaaatcaaatctatagaataatatgcgcaaataagcctttgctggagtctgctggagtgatagatggtctgaaatttgaaggctggctctgattcggtttttggcaacttcttattagtctcgatccaaagccacgtcagtttttttgacaaatttttatttaaaatggatcatggtgttttattgaaatacaatttcatctgagtatacaactaagcaaataaaaaattatatagtttataaaaacaaatataaattacataa

SEQ ID NO: 110760 - DNA, 163 bp, Zea Mays
ttttttgtctgcatataggttgagtgtcagtcatcttgttcttccttatgtttgtccatgtccttattctacttcagttcaatgcttttctatagtgttgtttgctgttttatataaaataagaaggcccttacagtaaactaaaccaacctaggaggaacta

SEQ ID NO: 110761 - DNA, 930 bp, Zea Mays
gatcgactaaaaaaaccagcagctagctagcgatggctggagcctgggcactgctcatcgtcctcgcggctgccgtcgcggtcctggccgcgcggccggcgtctgcaggcgggggagccgcggcggtggcggagatctgcatgaagactccgtcccccgacctgtgcaccaggacggcggggaagcacgccaacaagtacaaggtggtggacgcggtgacggtgctagagatgcaggtggacgcgttcaagaagcgcgtgaaggcggcgcggaggctcgccaaggaggaggtcaagacggccgcgacgcccgaggcgcggagggcgctgaacctctgcaagacctactacctggacgccgccgacaacctcggcgcctgcaagcgcgccatcggcttccgcgacgccgtcaccatccgcgccacgatgagcatggtggcgcaggacacgcagaactgcgacgaggagttcaggaaggccgtctccaagaaccccatggaggaccacaacaggtcgctcatcgagatgtccgagatctgccgcacgctctccaacatgatcccttacgaacatgtccattgatttgtttgtttctttttcccgaccccctactacgttcggtaacgtcgtcgtcgtcgtcgtcgtccggcctaaaacatatgtaatttgatgctggtcgcgtgtgtctgtcagtcgatagactggacgcatgccgacttcatgcggacctagcgcgtgtccttcttttcggtgttgcctcttgcggcgtggcacatgtcttgagaccgtgggatgaaacggctcgttgagacttgagaggcacgcgtgtagggcagcctatatatatgattctataacatgctaatttgtgcttctttattactatatatatagccattcatcaatcaattcaactagaaacattcctcag

SEQ ID NO: 110762 - DNA, 2331 bp, Zea Mays
gctagggtttctcccctcttcttttcccctcctcccgctgccctcggctcccacgacgcccggctagggttttgcctccttcccgctgccgccgtctcagcgagcgagactgagctgtgcttagtaagccatgtcgctgcgcccgagcgagcgggtcgaggtgcggcggaaccgctacaaggtggcggttgacgcggaggaggggcggcggcggcgcgaggacaatatggtggagatccgcaagagccgccgcgaggagagccttctcaagaggcgccgcgaggggctccaggcccaggtccctgcccctccctcgggggtcgagaagaagcttgaaagcctcccagctatggtcagtggggtttattcggatgacaataaccttcagcttgaggccaccacacagtttcgcaagttgctatctatagagaggagccctcccattgaagaagttatcaaatcaggtgtagttccaagatttgtgcagttgctcacaagagaggatttgccccagctgcagttcgaagcagcatgggctctcacaaatattgcttctggcacttcagaaaatacaaaggttgttattgatcatggggctgttcctatatttgtgaagcttcttgggtctggtagtgatgatgttcgtgagcaggctgtgtgggctttgggcaatgttgctggcgattctccgaagtgtcgtgaccttgttctcgccaatggtgcattgatgcctctgctagcccagttgaatgagcatgcgaagctctccatgttgaggaatgccacctggactctgtccaacttttgcaggggaaagccacagccatcatttgatcagactaagcctgctctgccagcacttgcacgacttatccattccaacgatgaggaagttctcactgatgcttgctgggctttgtcatacttatctgacggcactaatgataagatccaagctgtaattgaagctggtgtttgcccccggcttgtggagctccttctgtatgtcaaaatgctgtgtaacaactctatgatgatcacttggatagtttttgttatttgcaccagttctttatcttttatatgagtgtgctgataccacatgcagccatccatcaccgtcggtgcttatacctgctctacgaactgttgggaacattgtaactggagatgatcagcaaactcagtgtatcattgatcatcaagctcttccccgcctcctgaatttattgacacagaaccacaagaaaagcattaagaaagaggcatgctggacgatttcaaatattactgctggaaacaaagatcagatacaggctgtcataagtgctggtattatcgctcctttgttgcaactgcttcaaggagcagagtttgatatcaagaaggaggctgcttgggccatctcaaacgctacctctggtggttcccatgagcaaatcaagtacttggtgtctgagggctgcatcgtgccgctgtgcgaccttcttgtttgccctgatccgagaattgtaacagtttgtctggagggtcttgagaatattcttaaagtaggggagcacgacaagaccatgggcgcaacaggtgacattaatgttttcgctcagatgattgacgacgcggaaggcctggaaaaaatcgagaacctacagagccatgataataatgaaatctatgaaaaggctgtgaagcttcttgagacttactggatggaggaggaagatgatgcaatggctactgctggggaagctgctcctgctgtttttgactttagccaaggtggcaaccctcctggtggtggtttgaacctcaactgaatacagtatttgaccaaaagggtgttaattccctcatgacaacctagtctggtcgattccatgtgggataatggtttgtggttggtccagtaaattcgagatttcaagggagatgggttagcattattcccaagctgtcatggatatcagtatcgcagggtctgtaacaggaccataatcgtcgaacatgagtctgggtttttgagcaggctactctctagggtttgcgtcatttatgttttatatctggctactgtatagcctgagtctaattatctgcaatgccgtaggacattcctgagtggtttggttttgaggttcctcaggaatggtctgcgttgcaggttgtccagagttgtaaaccttcaagtggtttgagtatattgctcggccttgctttactacggtcgatccaacctgttggaggccaaatgacttataaaaagctgttggcagctgcattgttggcggttggtgataaaatttgtagggaaaaataaggcgaaggttttga

SEQ ID NO: 110763 - DNA, 2236 bp, Zea Mays
gctagggtttctcccctcttcttttcccctcctcccgctgccctcggctcccacgacgcccggctagggttttgcctccttcccgctgccgccgtctcagcgagcgagactgagctgtgcttagtaagccatgtcgctgcgcccgagcgagcgggtcgaggtgcggcggaaccgctacaaggtggcggttgacgcggaggaggggcggcggcggcgcgaggacaatatggtggagatccgcaagagccgccgcgaggagagccttctcaagaggcgccgcgaggggctccaggcccaggtccctgcccctccctcgggggtcgagaagaagcttgaaagcctcccagctatggtcagtggggtttattcggatgacaataaccttcagcttgaggccaccacacagtttcgcaagttgctatctatagagaggagccctcccattgaagaagttatcaaatcaggtgtagttccaagatttgtgcagttgctcacaagagaggatttgccccagctgcagttcgaagcagcatgggctctcacaaatattgcttctggcacttcagaaaatacaaaggttgttattgatcatggggctgttcctatatttgtgaagcttcttgggtctggtagtgatgatgttcgtgagcaggctgtgtgggctttgggcaatgttgctggcgattctccgaagtgtcgtgaccttgttctcgccaatggtgcattgatgcctctgctagcccagttgaatgagcatgcgaagctctccatgttgaggaatgccacctggactctgtccaacttttgcaggggaaagccacagccatcatttgatcagactaagcctgctctgccagcacttgcacgacttatccattccaacgatgaggaagttctcactgatgcttgctgggctttgtcatacttatctgacggcactaatgataagatccaagctgtaattgaagctggtgtttgcccccggcttgtggagctccttctccatccatcaccgtcggtgcttatacctgctctacgaactgttgggaacattgtaactggagatgatcagcaaactcagtgtatcattgatcatcaagctcttccccgcctcctgaatttattgacacagaaccacaagaaaagcattaagaaagaggcatgctggacgatttcaaatattactgctggaaacaaagatcagatacaggctgtcataagtgctggtattatcgctcctttgttgcaactgcttcaaggagcagagtttgatatcaagaaggaggctgcttgggccatctcaaacgctacctctggtggttcccatgagcaaatcaagtacttggtgtctgagggctgcatcgtgccgctgtgcgaccttcttgtttgccctgatccgagaattgtaacagtttgtctggagggtcttgagaatattcttaaagtaggggagcacgacaagaccatgggcgcaacaggtgacattaatgttttcgctcagatgattgacgacgcggaaggcctggaaaaaatcgagaacctacagagccatgataataatgaaatctatgaaaaggctgtgaagcttcttgagacttactggatggaggaggaagatgatgcaatggctactgctggggaagctgctcctgctgtttttgactttagccaaggtggcaaccctcctggtggtggtttgaacctcaactgaatacagtatttgaccaaaagggtgttaattccctcatgacaacctagtctggtcgattccatgtgggataatggtttgtggttggtccagtaaattcgagatttcaagggagatgggttagcattattcccaagctgtcatggatatcagtatcgcagggtctgtaacaggaccataatcgtcgaacatgagtctgggtttttgagcaggctactctctagggtttgcgtcatttatgttttatatctggctactgtatagcctgagtctaattatctgcaatgccgtaggacattcctgagtggtttggttttgaggttcctcaggaatggtctgcgttgcaggttgtccagagttgtaaaccttcaagtggtttgagtatattgctcggccttgctttactacggtcgatccaacctgttggaggccaaatgacttataaaaagctgttggcagctgcattgttggcggttggtgataaaatttgtagggaaaaataaggcgaaggttttgacttttgaagcc

SEQ ID NO: 110764 - DNA, 459 bp, Zea Mays
atgtcgtcgcagcgtatttcaacctgttgttgccgattccctgcttgctgtacgaaaaacagacagacaaactctacccctcttgatggaaagaaaggcctttcaggttcaagtataaacaaaaagatgcctgtgctgtgcggttctgacttctgggctaacgtcacaggcacagacttcaaagtaaagcagttccaggagcagaggcaatcggatcatcaaaggataataaaagggaagaaattcaacatacatatcatcggctacggtgtaaccgtatcaacatacaacctatccatgtcccatgaaccccatttgctagacagcaacaaccaaaaattttaccccaaccggatgatacaacaacagcgagatcagccacgcagtcggaagggggatcagttcccctgggcgcccactgcctccgctgctcctgtgcctgcccagcagtacctgtag

SEQ ID NO: 110765 - DNA, 1608 bp, Zea Mays
cgaggaaatcgagcagcggcaccagggcccaggccaatcccaggaaaccggaagctcgaaagctgccaagccctcgccgtcctgccgcccacggcttaccgctgccgcctgccggccaccccacccaatgaaaatccgcatatactgtagtactccgtttcgcccgcgccgcccatccgttcggctgcctcgcacgccccaaaatcccctgctgcgcctccaaagccagcagccggcaggtcccgctacaaaagcaggcggcatgcgcgtgcgcgacaggtagcagctgcctgagccagtgcgcttcggtgagcagacaggacggcataggatagagatggcggccgcggtggagggggtgcggcaccgaacgctggaggcgaacggagtgcgcctgcacgtggcggaggctgggcccgaggagggcagcgccccagtggtgctgctccttcacggcttcccggacctctggtacggctggcgccaccagatgtccgccctggcggcgcgcggctaccgcgccgtggccccggacctccgcggctacggcgactccgactccccgcctgatgcgtccagctacaccaccttccatgtcgtcggggacctcgtcgcgctcatctccgacctcggccagcggcaggtgttcgtggtggggcacgactggggagccaccgtggcgtggcagctttgtctgcttcggccggacctggtgcgggcgctcgtgaacctaagcgtcgtgtaccacccgcggcggccggagatgagcccgctccaggccatcagagctgcctgcggcgaagaccactacatgtgccgcttccaggaatttggtgttgctgaagctgaatttgctctatatgacatcaagtgggtgtttaagaagacatttggcatgcgcaagccagctcctcttattctgcccaaggacaagagcttctttgactctcttgattcagatggaacttgtcctccatggctatcagaggaagatatttcttactatgcagaaaaatttgcgaaaacaggctttactggaggacttaactactacaggtgcatagacaggagttgggagctttctgcggcatggactggagctccgataaaagttccgtcgaaattcattgttggggaccttgacattacatacaacgctccgggggtaccggactacattcacaagggtggcttcaaggcaagcgtgccaaatctagaggacgtggttgtaatggagggagtgagccacttcatcaaccaggagaaacccaacgaggtctctgatcacatctgcgagttctttagcaagttctgatacgtattggaaaaatctcaaggagccgttatatgattctgagctactcgtgtttttatgtcaaaaaaatgcggttgcgagtgtcaccatacaaatatacgatctaaataaaattcgtctgtctcacctttttacacagctctaccaagaaacttgttttgcctttgtggtagacaccatatggggtgatccaagaagcaacttccagcggccacggcagcttggagttgcatgataaatttccttttgatgtatgacacacgtgagggtgaggctctcatattattgattta

SEQ ID NO: 110766 - DNA, 843 bp, Zea Mays
cctaggcccacggccaccagcccaccacgacgctcccagtttcaccttctccagtcctctctgctggactctcggcagattccgctccagcgcgcaccgtcgcccaccgtcgcctttcaaaaagctagagggttcctcgagagggagaagcgtacccggcagctccgctccgtcagtccgtccgcccccaagaatgtcagacgaggccaggcgcgggcccgcgggcgccgcgcaggtggtgcttcgggcctcctccgaggaccgcaagccggtgggctcggggtctccgccgccggcagcgaccgcgactgcggttgcgcacaagatccagctcaagagtgccgacatgaaggaggagatgcggcaggaggccttcgaaattgctcgcatcgcattcgagaagcacagtatggagaaggacatcgcggagtacataaagaaggagttcgacaagaaccacggccccacctggcactgcatcgtcggccgcaacttcggttcttacgtgacgcacgagacaaactactttgtatatttctacatcgactctaaagctgtcttgctattcaagtctgggtgattgtcgcagccaatacagtcaaccttgcatgcctacattttctttctctcatgtatgctccatcccctcccctttcccctcagagtcgtctgcagccaagcctggaagccggtaatcttatgagcctgcatgttgatgtatcagcaacggattattcttcgcatgccatagtgtgagatcaggttgcatcttatttatgtctgatatatcttggtgttgtgagtacattatcttgttgcattatgattgccggacaactggaa

SEQ ID NO: 110767 - DNA, 100 bp, Zea Mays
ccgagcctatctgttgactcgcctgcacgcggagatgtcaactgttggaggcgatctggcagaacaacgggtcgtgaacagtaaaggtccagagattctt

SEQ ID NO: 110768 - DNA, 538 bp, Zea Mays
cgcgtccatcacatcgtgcatggtgaccatgttgtcctgctccccgaggatccccgacctgacacggcgcagttcctgcatatgcgcaccaacaccaaggagcagcccaaggtgcacacagagagtccggacgtaggtacctgcctcgcaggagatccagaacacggcaaggtgacgctcgggatcgtgctccaggagcttgctctcgtagattgttcgcaccctgagctggcgcttgactgcagagataagcggtgggcgctggaacacggcgccagtgagcgcctctagcgctcgggccactcgcgcggtgtccggcacggcggcgtggaagcgggcgacgcagacgtactccttgccggcgccctgctgcgacttgacgaggcgcgtggcgcggtcgatgcagacgatgagattgcctgtgaccttggggtcgagcgtgccgctgtgaccggtcttctcggcgcggaggatgcgcttgatccaggcgaccacctcgcgacgcgacagccggcggcggggacgacatgacggcggg

SEQ ID NO: 110769 - DNA, 240 bp, Zea Mays
gcgagcgaggatggcgggcgcgataaggttagcgcatgcgtcaaatgtgggcttgcgagggtcgaaggcgcgataaggctgttgggtgagcgcaaaatgcgtagacagcgggtgggcgaggatggcagtcgcggcatgctcggacgcggttggagcagacgcagcaaaatggagcaaagcgtggaattcgggaggccacgattggagcgcccgcgggcgaggatggtggccgtggttacg

SEQ ID NO: 110770 - DNA, 219 bp, Zea Mays
atggagcatggcgtggatttcgagaggccgcgattggagcacccacgggcgaggatggcggccttgcttggagggcccgtggttacggttgggctcatggcgagagaggggttgcaagattttcagggtgctcgggctggttgcaagctccacatcaatggaggcatggcggaggcggcatggagagggagggaggtcgcggggaggcgacaggcgtag

SEQ ID NO: 110771 - DNA, 1849 bp, Zea Mays
atgggcttcttggcgtgcttgtgccgatgccctcaggacggggacgacgacgagaaggagggggagcagttcagaatcaaccaccaggtcgcctcagtggactacccaaaatcttctgaaagcagcccattgaaggctgagagagtggttcatatggacggagcccagctaattggtagacatgatgaagcaacaatcttcacgttgcgtcagcttgctgaggctaccaataattttaggcaggactctcttttggggcgagggggattcggttgcgtctacaaggcaactcttagtaatggacaggttgttgcagtcaaacaacttgatctaaatgggcttcaagggaacagagaattcctcgtggaggttctcatgctcaacctcctgcatcaccctaatcttgtcaatctgcatgggtactgtgttgatggcgatcaacgcttgctcgtttatgagtatatgccattgggatcactagaagatcatctacatgatcttgcacctaatcaacaacctctagattggaaaacacggatgaagatagctgctggtgcagcggctggtttggaatacctccatgataaggcaaatcctccagttatttaccgagacattaaaccatcaaacattctccttggcgaaggctatcatgcaaaattgtccgactttggacttgctaagcttggtcctgtaggcgacaagactcatgtgacaacacgcgtcatggggacacatggttattgtgctcctgaatatgccttaactggacagctgacagtgaagtctgacatctatagttttggcgtcgttttccttgagctaattacaggtcgaagaccacaagacagtgatcggcctcctgaggaacaagacctagttgcatgggctcgtccattgttcaaagaccaaaagaagtttcgcaagatggctgatccttcgttgtgtggccgcttcccaaagaggggtttattccaggcactggctattgcagcaatgtgtttgcaggagaaggcaaaaagccgacctcccatgagggaagttgccgcagctctctcttatttagcatcacaagcatacgacaggaacaacaacgctgctgctcatcgtaatcgtgccgggccttcaacaccgagagttctggacgaccagattggccaggacacctgcacattagctaatcaacagggagctcagatgtccatgcatgtcgggacagaccacgccatgcctgaagtgaaggaagcttcctgtagtggttcacatcgtggaggacggggcagggttaccccgaatggcgctgatagggagcgtgcacttgcggacgccaacgtgtgggccgaggcttggaggcgccaggagaaggcaagcaagatgcgatagcgaccagagcctgactgcatgagttttgacatgtcactgcaaagatgcttactttgcatacattttgaaagagaactgtgggctacacgaagggttgttagaatagaaagaggaataatgcgcagtggaaatgcagagcttcaccagagtgagcgcttcgaagatttcaccggtgaatctacagtactcagacttgtttcagtgcgtacatggatttagcttactttatacacagacacttcacactccatagatgcatgtaatagctcaataataggcacagtagactacacaatctgtctgtagttcagcggttttggaaaattaataacataggatccgccgttaggttgcatgaaatgctatgatccgttggcgggtcttgcattctctattgggtcaacgtctacatatttgtacatcgttcaaccatttacatgatgaaatatacaattaagacttctaa

SEQ ID NO: 110772 - DNA, 522 bp, Zea Mays
atggcctctggccgcttgccccctgcactcgctgtagctagcccccaccccaccgcgctctcccgcgccgagcaacagatgctacccggcgtacaaacacgcaagcagttccagatcgacgaggcatggcactactggcgggtcacagcgactctgaaccgatcactcaccacgactccgaaccggaccaacggcacgcccggccatggcccgtggccgtgctctcagaagaagccgcggcggcgcggcgggggcagcaagagggcgacgagcatcaaggcggcgacggcgacgagggccaacgccacgaggatgctctcgtcgacggtgagcaggcacaccttccccatggacggactcgcagcctggggaatggcggtgcagaggggccttcagctgcaagcgggcaagctcaagagcgatgcctggatgcgcgtccttgtccttgttatagttgttgaagtatctccgtctctctgggtcaactgctcttcgaaagcacttcttttttttttcctttga

SEQ ID NO: 110773 - DNA, 1487 bp, Zea Mays
ctcgcacagagacactactagcttgctttctcctatctccactgccgcctagccctacagtcaaccgccgccaagcccggaaccggctgccgccacctgctagcactcgccacacgcgcggcgctggcgtgccctcgccgccgacagtgtcccgcccccgccgtcggccgacccctcgcggcctcgccctcgacgatcggccctcgccggctcgacgcgtgacgccggcgccgccacccaccgtccgacggcctagccggagtcggacgcccccgggctcgcgcctcgccttccaacagtccaagcgccgcattcgcgcgtggccaaccccaaagtctgaagttcgatccacatccaccgatccgcagaggcgcagactacaggtctctcctacaggttctcgttcttcagtgcgtgatatcaatccactgaggcgctgggtgcagttaatttcccaaactatatttgggggtgttcagcaaaaaccgcgtcaactgcacccgtgcgggtgagggatcactagaggctggactcgtgctagagatggtgaaggcaaaagcaagggtccgctatgagcctggaccggcttttgaggaggtcaaagaagaagccatgcttgatatatcaccaacagactcgacagagttttggttaattcagtggcctaaagaccagatagatgttttggattttcatggcaaagagctttctctcaagctgcatagtgatggaaacttgggcaacttggaaaattcctcagggaaatcttatgagattgcgagctttgcagctcagaaaccagatgcaaccgtcttcctgccttcagggtcagaaacaaaggctgtggggaagatttcacggcgagtatccttagttcgttatcctaaacctgaggaatttacaaaaccaagttttgggagtcttactcctagcataaagaaatctgcaggttctaagaagaccatgtctcggttcaccggtgtatcaaagaatcccagtagccaaggttcggcgctttcactgggccaaaggagcgcagagccaacacccaaacacaaggggaagagaaaggatgaaagcagcctggggcactcaaatgtgtcgggcaaggccacagaaggatctgaggctcgaggcgcggggagcaacacggcttcagagatgccacagtcgccaccggaaaaatcaaagaagaggaggaagaaggataagatcgttgagtagtagtgtcaccttggcaggtgatcaagtttcccttgaattatcaatcagtggctcgagcagctgtgctggaagttcacgttcaggtttctttatgaatttccggttctcattttatccatgcagaattttttgctggagtgcccggtgttgtttgacctgggagcaacctgttgcgtggtgctgaaataccgctatgtatcgttctgtttttggtatgtgaaaggttatctttgttgcgctgttcctgttggtgtgctaagctg

SEQ ID NO: 110774 - DNA, 1283 bp, Zea Mays
cctatctccactgccgcctagccctacagtcaaccgccgccaagcccggaaccggctgccgccacctgctagcactcgccacacgcgcggcgctggcgtgccctcgccgccgacagtgtcccgcccccgccgtcggccgacccctcgcggcctcgccctcgacgatcggccctcgccggctcgacgcgtgacgccggcgccgccacccaccgtccgacggcctagccggagtcggacgcccccgggctcgcgcctcgccttccaacagtccaagcgccgcattcgcgcgtggccaaccccaaagtctgaagttcgatccacatccaccgatccgcagaggcgcagactacaggtctctcctacagctatgagcctggaccggcttttgaggaggtcaaagaagaagccatgcttgatatatcaccaacagactcgacagagttttggttaattcagtggcctaaagaccagatagatgttttggattttcatggcaaagagctttctctcaagctgcatagtgatggaaacttgggcaacttggaaaattcctcagggaaatcttatgagattgcgagctttgcagctcagaaaccagatgcaaccgtcttcctgccttcagggtcagaaacaaaggctgtggggaagatttcacggcgagtatccttagttcgttatcctaaacctgaggaatttacaaaaccaagttttgggagtcttactcctagcataaagaaatctgcaggttctaagaagaccatgtctcggttcaccggtgtatcaaagaatcccagtagccaaggttcggcgctttcactgggccaaaggagcgcagagccaacacccaaacacaaggggaagagaaaggatgaaagcagcctggggcactcaaatgtgtcgggcaaggccacagaaggatctgaggctcgaggcgcggggagcaacacggcttcagagatgccacagtcgccaccggaaaaatcaaagaagaggaggaagaaggataagatcgttgagtagtagtgtcaccttggcaggtgatcaagtttcccttgaattatcaatcagtggctcgagcagctgtgctggaagttcacgttcaggtttctttatgaatttccggttctcattttatccatgcagaattttttgctggagtgcccggtgttgtttgacctgggagcaacctgttgcgtggtgctgaaataccgctatgtatcgttctgtttttggtatgtgaaaggttatctttgttgcgctgttcctgttggtgtgctaagctg

SEQ ID NO: 110775 - DNA, 1582 bp, Zea Mays
gcctagccctacagtcaaccgccgccaagcccggaaccggctgccgccacctgctagcactcgccacacgcgcggcgctggcgtgccctcgccgccgacagtgtcccgcccccgccgtcggccgacccctcgcggcctcgccctcgacgatcggccctcgccggctcgacgcgtgacgccggcgccgccacccaccgtccgacggcctagccggagtcggacgcccccgggctcgcgcctcgccttccaacagtccaagcgccgcattcgcgcgtggccaaccccaaagtctgaagttcgatccacatccaccgatccgcagaggcgcagactacaggtctctcctacagctgccatccccgtccgcctcgctccaccaccggtggccgcacacacgtctggcgtagggacacagccgcacaggaagtccccccggccccttcgactgaagcctcctctgagtgggggcatctacctctccttccctttaggttctcgttcttcagtgcgtgatatcaatccactgaggcgctgggtgcagttaatttcccaaactatatttgggggtgttcagcaaaaaccgcgtcaactgcacccgtgcgggtgagggatcactagaggctggactcgtgctagagatggtgaaggcaaaagcaagggtccgctatgagcctggaccggcttttgaggaggtcaaagaagaagccatgcttgatatatcaccaacagactcgacagagttttggttaattcagtggcctaaagaccagatagatgttttggattttcatggcaaagagctttctctcaagctgcatagtgatggaaacttgggcaacttggaaaattcctcagggaaatcttatgagattgcgagctttgcagctcagaaaccagatgcaaccgtcttcctgccttcagggtcagaaacaaaggctgtggggaagatttcacggcgagtatccttagttcgttatcctaaacctgaggaatttacaaaaccaagttttgggagtcttactcctagcataaagaaatctgcaggttctaagaagaccatgtctcggttcaccggtgtatcaaagaatcccagtagccaaggttcggcgctttcactgggccaaaggagcgcagagccaacacccaaacacaaggggaagagaaaggatgaaagcagcctggggcactcaaatgtgtcgggcaaggccacagaaggatctgaggctcgaggcgcggggagcaacacggcttcagagatgccacagtcgccaccggaaaaatcaaagaagaggaggaagaaggataagatcgttgagtagtagtgtcaccttggcaggtgatcaagtttcccttgaattatcaatcagtggctcgagcagctgtgctggaagttcacgttcaggtttctttatgaatttccggttctcattttatccatgcagaattttttgctggagtgcccggtgttgtttgacctgggagcaacctgttgcgtggtgctgaaataccgctatgtatcgttctgtttttggtatgtgaaaggttatctttgttgcgctgttcctgttggtgtgctaagctg

SEQ ID NO: 110776 - DNA, 1598 bp, Zea Mays
gcccgccagtaccgggtcggcatgccacgagcgcgcggtcagcatccgcaggtacaacacgcacgcacgcacacacgagcactcccagcccatcccgcccaccaagaatctacccgacccaccggtttatgggctccgctgaaacagtagcccacacgtcagtcccttccacgacacccaaaccgggtcgcccaccgttttcggagtaagccccacctcgagatctatccccgtttccaacctcacatccccttccactcgagctccttcgtttaaacccaaaccctaattgcgacctccgttcccccaaaaccctacggccatggacggcggaggcggtggtgtagggggaggcggagttggggcaggtgtcatggtgggcggcggagtcgggccgggcggcggcgttggcggtggcggcgacgtggagctcgtcagcaagacgctgcagttcgagcacaagctgttctacttcgatctgaaggagaatccgcgggggaggtacctcaagatctccgagaagacctcggccacgcgctccaccatcatcgtccccgtcgacggcgtggcctggttcctcgacctcttcgactactacatccgcaccgacgagcgcgacgctttcagcaaggagctgcgactccagaccaaggtgttctatttcgatatcggggagaacaagaggggccgattcctcaaggtttctgaggcctctgtcaaccgaaaccggagtaccataattgttccagctggcagctctggtgaagagggctgggaagcattcaggagtgtactgctggagataaataacgaggctaccagattgtatgtcctaccaaatcatccaaatcagcaacacatggagccgccagagcgtcttcctggtctgtccgatgatgtgggtgccggatttatagcaggacatggtagccagtctgcttctgggccagaggtagatgtcgaacgcttggttgatctgcctcctcaagaagaaattagtggcatgggtatgtctaaggttatcagggcagatcagaaaaggttcttcttcgacctgggcagcaacaacaggggccattatttgaggatttctgaggtggctggagctgatcgttcgtctattatcttgccgctctcgggtttgaagcaattccatgaaatggttggtcactttgtagatataatgaaggacaggcttgaaggaatgacaggagctaacgtgcgcactgtcgagcccagccagagatgattacccttgactgtgggcctggcaagactgctgttatgcctcctgtaggtttgccatgtggtgtgtggtaatgtagatcacgccgtattaattcatctggtggggataataatgtctctttttctctttattttttgaattcagtggcgaggattgatttgtttgggactttttttctttctttcagtcggaggaataatatgcagtgtattgttcgtggggtggtataattgtggttgctgcagtgttagccctgattttatgcttcgccgttcttatttaggtaaaagatctgctatgtttctggcattgtgtccgcctctgcattgagctcttcctacatatgtta

SEQ ID NO: 110777 - DNA, 447 bp, Zea Mays
gccatatctgctgctccagaagctttcctccccctctctgcttcaagagttcaaggtagctggcgctgcacgctccgtcctagcagcaagcttgcagccatggagcccaggaagtcgaattatctcgtcgccctcgtcttggcgtcgttcttgctctccgtcgccgtcgcaggagggcataggaagaagctcgatgacgcatcagaatcaatggagacatcggaatccacgcaggaagatgacgaaatagcggtggtggtccacgagagaattctcagccaggtgaagatgaacgactacgcgagatacgacccttcaccgaccatggctaagcctcgctccaaggacataccgaactagtcagcccagcccttgtattgagattatatgtagagaaagaagatctctctctctctcttatatatatatatatatatatatatatat

SEQ ID NO: 110778 - DNA, 2558 bp, Zea Mays
atccgcaccgggttttgtacccgcacagccacactgcccttctctccccttcctctctcctctgcgtcgcttccacctctcaatctcaccccacgcctgccccgagctccaaccctaaaggaacacacccctgcttgcggcggcggggagcggtcttgggcgtccgccgttgctgtggcccagccgtgacagatccgggccccgcgccgttaggtcggtgtttcttcggcgacggtgcagccgctggatgttagtctggcggatcggggctcgttgttcgcgtgattcgagctaggcggtgttgagttgtgacatttgtatcacatgaatgaactcagagcatctcattgttaaaactgtgagcatatcaattcccctcctttaagcaatatgggagctaattgctgcattgctgcaaaggagaggacacaaccatgcattactccattagaagtatcagcgtacaggaatgtgagacattcaccatcatggagctttcggtgggacaatcgcacacatatagaagacataatggaaatccctactctgttttccaaccatagtagtggaagcattcggcctgatacaaagagtggttccattgccccgaccgaagggttttctaatggaaatagccttggaactagcccttccaatgtgtctcatggaacaaagtggcacaaatctgacaaaaaaatggaagcatctaaggttacaatggctgatcctcgagctgaccaccccactgcaagtaactcttcccttgaggcaaagcttttcaggaaatcactggacatgtcaagtgttgcttcagatttgaagacatcagggtctgttccttcaacaccacccttagtatccagagcagatccatcatcctccagggggcattctcaacctacagattcagattcgatgaagaaagcacggcggtcaccagggtatcaattatacagacaagtttcggacagcaaaattccatctctcagatctctcaatgagataagctctcctgaaggaaggccttcgtcttccatgctatcagtctgcagcaatgacttgtcagcagcaggatcctatgctgagtcatctgatggttggtcaatgcgcacattttctgaaatggtcgcaacatcccaaagagagaggtggtcacttgatagcgaactcttgggatccatttctagtaaagtgacaagaactagtgcttcaaattctactacacttccccctgagcaagaggtgtgcaagctgtgcttgaagctgttgaaggagagatcaacatggaatgctcaggagctggccgttgttgctgttctgttgtgtggacatgtgtaccatgctgactgtctggacagcataactacagaagctgacaaatacgatccgccatgccctgtatgcacgcatggtgagaaatgtacagtgaagctatttgggaagctggaatccaaggttaagaacaagataccaaaaaatgtggcagctgatatcaatccagatgggaacagtaataagcaccagaagaaaggtagaagagagcccaggttaggtacaagctcaagcatgaaggtcccattcagtcgcccgtttttgaggagacatttctccattgggtctcgaccgcctcggtcagtctcagaaaccgattcgacgagaaagaagggattctgggcaagacattggagggagtagaatagcctccaattgccattaggtgggctggtttccattagtgtgttttggaagggtcttcgagaggaggtgaactccccagcatgcaagctcacggagttcagactggcacaagggctgccgtcctggcgggcaaccaacatatttggaagtttctcccagccataatattcggatactggtgcagagcgcacgctagcgccggtcccagcagatccattatagtagaataacaaggttttttataccatgcgagatacggttgttgtaggccctggttgcagcttagtaatagtagcaatctaacagaaacggtgtggccttcatggatgtaaggcccaatgctgggttacacaaccagcttgctagattatttattgtacttcgtattgttggatggaatgcgtttaagttgaagtcttcagtggtagaattttccgatgagagattggatgaaccgagtatccgtttgtgcatatatggtcacatcttagaaaaaaattgccagtaaatgtgagctccatttctgcctgtttgcagaagatttgacctgaactcgtacaagtttgcgatgcaagcaaagttgtgtctagtgccctcggcgggtaaggtaccagctagcgtttagtgtcatgaagccacacccacggtatcaaatggattactggagtgcttacaaactcttagacagcagaaatcaaatggattgctggagtacaattctgtagtttagcgagagatcatcttcacttgttcaaaaagatgctataataaaagagaatgcagacaatgcagtggccgctccactatgtagtgtactgtacaaacatggttcagatttacaaagctaaggatagtagtaa

SEQ ID NO: 110779 - DNA, 2554 bp, Zea Mays
atccgcaccgggttttgtacccgcacagccacactgcccttctctccccttcctctctcctctgcgtcgcttccacctctcaatctcaccccacgcctgccccgagctccaaccctaaaggaacacacccctgcttgcggcggcggggagcggtcttgggcgtccgccgttgctgtggcccagccgtgacagatccgggccccgcgccgttaggtcggtgtttcttcggcgacggtgcagccgctggatgttagtctggcggatcggggctcgttgttcgcgtgattcgaggcggtgttgagttgtgacatttgtatcacatgaatgaactcagagcatctcattgttaaaactgtgagcatatcaattcccctcctttaagcaatatgggagctaattgctgcattgctgcaaaggagaggacacaaccatgcattactccattagaagtatcagcgtacaggaatgtgagacattcaccatcatggagctttcggtgggacaatcgcacacatatagaagacataatggaaatccctactctgttttccaaccatagtagtggaagcattcggcctgatacaaagagtggttccattgccccgaccgaagggttttctaatggaaatagccttggaactagcccttccaatgtgtctcatggaacaaagtggcacaaatctgacaaaaaaatggaagcatctaaggttacaatggctgatcctcgagctgaccaccccactgcaagtaactcttcccttgaggcaaagcttttcaggaaatcactggacatgtcaagtgttgcttcagatttgaagacatcagggtctgttccttcaacaccacccttagtatccagagcagatccatcatcctccagggggcattctcaacctacagattcagattcgatgaagaaagcacggcggtcaccagggtatcaattatacagacaagtttcggacagcaaaattccatctctcagatctctcaatgagataagctctcctgaaggaaggccttcgtcttccatgctatcagtctgcagcaatgacttgtcagcagcaggatcctatgctgagtcatctgatggttggtcaatgcgcacattttctgaaatggtcgcaacatcccaaagagagaggtggtcacttgatagcgaactcttgggatccatttctagtaaagtgacaagaactagtgcttcaaattctactacacttccccctgagcaagaggtgtgcaagctgtgcttgaagctgttgaaggagagatcaacatggaatgctcaggagctggccgttgttgctgttctgttgtgtggacatgtgtaccatgctgactgtctggacagcataactacagaagctgacaaatacgatccgccatgccctgtatgcacgcatggtgagaaatgtacagtgaagctatttgggaagctggaatccaaggttaagaacaagataccaaaaaatgtggcagctgatatcaatccagatgggaacagtaataagcaccagaagaaaggtagaagagagcccaggttaggtacaagctcaagcatgaaggtcccattcagtcgcccgtttttgaggagacatttctccattgggtctcgaccgcctcggtcagtctcagaaaccgattcgacgagaaagaagggattctgggcaagacattggagggagtagaatagcctccaattgccattaggtgggctggtttccattagtgtgttttggaagggtcttcgagaggaggtgaactccccagcatgcaagctcacggagttcagactggcacaagggctgccgtcctggcgggcaaccaacatatttggaagtttctcccagccataatattcggatactggtgcagagcgcacgctagcgccggtcccagcagatccattatagtagaataacaaggttttttataccatgcgagatacggttgttgtaggccctggttgcagcttagtaatagtagcaatctaacagaaacggtgtggccttcatggatgtaaggcccaatgctgggttacacaaccagcttgctagattatttattgtacttcgtattgttggatggaatgcgtttaagttgaagtcttcagtggtagaattttccgatgagagattggatgaaccgagtatccgtttgtgcatatatggtcacatcttagaaaaaaattgccagtaaatgtgagctccatttctgcctgtttgcagaagatttgacctgaactcgtacaagtttgcgatgcaagcaaagttgtgtctagtgccctcggcgggtaaggtaccagctagcgtttagtgtcatgaagccacacccacggtatcaaatggattactggagtgcttacaaactcttagacagcagaaatcaaatggattgctggagtacaattctgtagtttagcgagagatcatcttcacttgttcaaaaagatgctataataaaagagaatgcagacaatgcagtggccgctccactatgtagtgtactgtacaaacatggttcagatttacaaagctaaggatagtagtaa

SEQ ID NO: 110780 - DNA, 1876 bp, Zea Mays
tgtctttctgtacagctaggcggtgttgagttgtgacatttgtatcacatgaatgaactcagagcatctcattgttaaaactgtgagcatatcaattcccctcctttaagcaatatgggagctaattgctgcattgctgcaaaggagaggacacaaccatgcattactccattagaagtatcagcgtacaggaatgtgagacattcaccatcatggagctttcggtgggacaatcgcacacatatagaagacataatggaaatccctactctgttttccaaccatagtagtggaagcattcggcctgatacaaagagtggttccattgccccgaccgaagggttttctaatggaaatagccttggaactagcccttccaatgtgtctcatggaacaaagtggcacaaatctgacaaaaaaatggaagcatctaaggttacaatggctgatcctcgagctgaccaccccactgcaagtaactcttcccttgaggcaaagcttttcaggaaatcactggacatgtcaagtgttgcttcagatttgaagacatcagggtctgttccttcaacaccacccttagtatccagagcagatccatcatcctccagggggcattctcaacctacagattcagattcgatgaagaaagcacggcggtcaccagggtatcaattatacagacaagtttcggacagcaaaattccatctctcagatctctcaatgagataagctctcctgaaggaaggccttcgtcttccatgctatcagtctgcagcaatgacttgtcagcagcaggatcctatgctgagtcatctgatggttggtcaatgcgcacattttctgaaatggtcgcaacatcccaaagagagaggtggtcacttgatagcgaactcttgggatccatttctagtaaagtgacaagaactagtgcttcaaattctactacacttccccctgagcaagaggtgtgcaagctgtgcttgaagctgttgaaggagagatcaacatggaatgctcaggagctggccgttgttgctgttctgttgtgtggacatgtgtaccatgctgactgtctggacagcataactacagaagctgacaaatacgatccgccatgccctgtatgcacgcatggtgagaaatgtacagtgaagctatttgggaagctggaatccaaggttaagaacaagataccaaaaaatgtggcagctgatatcaatccagatgggaacagtaataagcaccagaagaaaggtagaagagagcccaggttaggtacaagctcaagcatgaaggtcccattcagtcgcccgtttttgaggagacatttctccattgggtctcgaccgcctcggtcagtctcagaaaccgattcgacgagaaagaagggattctgggcaagacattggagggagtagaatagcctccaattgccattaggtgggctggtttccattagtgtgttttggaagggtcttcgagaggaggtgaactccccagcatgcaagctcacggagttcagactggcacaagggctgccgtcctggcgggcaaccaacatatttggaagtttctcccagccataatattcggatactggtgcagagcgcacgctagcgccggtcccagcagatccattatagtagaataacaaggttttttataccatgcgagatacggttgttgtaggccctggttgcagcttagtaatagtagcaatctaacagaaacggtgtggccttcatggatgtaaggcccaatgctgggttacacaaccagcttgctagattatttattgtactcgatgttttttaatgatgattgactaaggtacttcgtattgttggatggaatgcgtttaagttgaagtcttca

SEQ ID NO: 110781 - DNA, 1859 bp, Zea Mays
gatacatcgtaaaagcactgtatctgaaaaaaccagaacatcttataatttggaagggagggtgtgttattgtagtctcccaaactgatgaactttgtttactgatttgtactattttcagctgaccaccccactgcaagtaactcttcccttgaggtttgcatcattaagctacctgccaagaagttattaccttctaggttccatgcagttgtaataccaccacatttgttgtctgacatattttttaatatgttgtgtaggcaaagcttttcaggaaatcactggacatgtcaagtgttgcttcagatttgaagacatcagggtctgttccttcaacaccacccttagtatccagagcagatccatcatcctccagggggcattctcaacctacagattcagattcgatgaagaaagcacggcggtcaccagggtatcaattatacagacaagtttcggacagcaaaattccatctctcagatctctcaatgagataagctctcctgaaggaaggccttcgtcttccatgctatcagtctgcagcaatgacttgtcagcagcaggatcctatgctgagtcatctgatggttggtcaatgcgcacattttctgaaatggtcgcaacatcccaaagagagaggtggtcacttgatagcgaactcttgggatccatttctagtaaagtgacaagaactagtgcttcaaattctactacacttccccctgagcaagaggtgtgcaagctgtgcttgaagctgttgaaggagagatcaacatggaatgctcaggagctggccgttgttgctgttctgttgtgtggacatgtgtaccatgctgactgtctggacagcataactacagaagctgacaaatacgatccgccatgccctgtatgcacgcatggtgagaaatgtacagtgaagctatttgggaagctggaatccaaggttaagaacaagataccaaaaaatgtggcagctgatatcaatccagatgggaacagtaataagcaccagaagaaaggtagaagagagcccaggttaggtacaagctcaagcatgaaggtcccattcagtcgcccgtttttgaggagacatttctccattgggtctcgaccgcctcggtcagtctcagaaaccgattcgacgagaaagaagggattctgggcaagacattggagggagtagaatagcctccaattgccattaggtgggctggtttccattagtgtgttttggtaagttcaatttcatatagcaggttactagttctattcatttcgtcatcatggccttcatggggatgaattcgaatgtgttgaatttggaatttctcgtgtcatccctgaacattttgaaatggacaacaacattattaattgaatgtcttttcacaggaagggtcttcgagaggaggtgaactccccagcatgcaagctcacggagttcagactggcacaagggctgccgtcctggcgggcaaccaacatatttggaagtttctcccagccataatattcggatactggtgcagagcgcacgctagcgccggtcccagcagatccattatagtagaataacaaggttttttataccatgcgagatacggttgttgtaggccctggttgcagcttagtaatagtagcaatctaacagaaacggtgtggccttcatggatgtaaggcccaatgctgggttacacaaccagcttgctagattatttattgtactcgatgttttttaatgatgattgactaaggtacttcgtattgttggatggaatgcgtttaagttgaagtcttcagtggtagaattttccgatgagagattggatgaaccgagtatccgtttgtgcat

SEQ ID NO: 110782 - DNA, 94 bp, Zea Mays
attatgaataatgtagaatcatcagccgcatcaggtggtgctcctggttcagcagcttctgctactttagactctgctgcttttgttgaaaagg

SEQ ID NO: 110783 - DNA, 338 bp, Zea Mays
taaaatgcactgttcattcatacaattttatttgttatacttgcaacaaatgaatcgctcaaccttctctttggttaagaattatacaaatgccacactttaaagaagtacacaaacacacataattttaatgaagacagcaggaagagggaaaacacaaatcctgatacttcctatacaaagctataatgtacaaaaaaaaaataccacaaaacatttgcttcggccactcctgcaaatgtggagtgagggggtgtacaagaaacgtgtacctctatttacactatccactcttgttgattccactcgaactgctccaagctactatgcacagcacc

SEQ ID NO: 110784 - DNA, 1050 bp, Zea Mays
gggacacacgagtacacgaccacgagagactggtcggtctgcgactgtctctgaccgctgaccgcactgtcctctgcttctgtctttctctctctcccctgtcccccttccagatttcctccattcgcggtttgcctctctgccttcctgcctgcttccctccctccgtcagatccccgctcgggttgccatggcggaccagctcaccgacgaacagatcgccgagttcaaggaggccttcagcctcttcgacaaggacggcgacggctgcatcaccaccaaggaacttggcactgtgatgcgctcattggggcagaaccctactgaggctgagcttcaggacatgatcaatgaggttgatgctgatggcaatggaaccatcgactttcctgagtttctcaacctgatggcacgcaagatgaaggacaccgactctgaggaggagctcaaggaggccttccgtgtgttcgacaaggaccagaacggcttcatctccgctgctgagcttcgccatgtcatgaccaacctaggcgagaagctgacggacgaggaggtggacgagatgatccgtgaagccgacgtggacggtgatggccagatcaactacgacgagttcgtgaaggtgatgatggccaagtgagatatgcccgccgtttttaagctagttcctctcctgatggtagtaactagtctagttttggagactgactgcttttggttgtgtcttacgcctatccttgcgtcaatggacatatccgtttgttttcaaccaagggattttaccatgtctgtaatttcgctcaaatttggttcttgttgtattacatttgtgttatcttggtacaatgatcatgtctttctctttcaaatttaggtgttcagtttcctggtagaaatacgtggtagtggtatgcaggtattgctatatctggttttgattggtttgtcgttgtttcttgtgctgtgataagttcttgtagagaagtactgtacgtggtatgcagatcaattgattgttggccgtacggcaggacataggtggaagtataa

SEQ ID NO: 110785 - DNA, 1870 bp, Zea Mays
atgaataatccacagaaaaccggcttgatctgatctggccatattgagcgtccccaccccaccacgttggtttgagccgttgaggcctcaacagggaggaactgccagccagacgagacgatcctacctgacagggcagccgaagaagcgccgcgccgtttcggttcggcgcgtgcgtggttcgtcttcccctgcactgcccgctcccccaaacttccccagcatttcgcattcggatttccccccctcgactccaccccgaaccccaaccgcctccgcagccctccgtcccatggcgtccccctccttcgccgctgcggccaccagccccgcctcctccccactaaccctagacgccatccccctcgcctcccgccccgcacccggagccgccgccgcccagcgcaagcggtcggtcttcctcctcaaccaccgtccgcacccggtctcccctacgcccccgctccaaccaaccgccgccgcgtccgctcagcacgcacgccgaaaaaagacctctcacccgccccggccgcggtggcagaccgtgctcagcatcgccgccaagaacgcggctctcctcgccgcgctgctctatctcggggacctcgcctggcgctggtcccacccgcccccgccctcgccgccgcccgaccgcgccgcgctcgagggctacgccgcccgcgtcgacgaggtggaggcctccctcacccgcaccttccggatgatccaggtgcaactcgaggccgtagatcgcaagatcgacggcgaggtcggcgccgccaggggcgaccttctcgctctgctggaggataagcggctcgcgctcgagcgccaactcacccggcttgacgcgagggccggtgagctcggcgacgcgctggccgggctcaagcggatggagttcctccggaaggacgagtttgagaagttctgggacgaggtgaaggggagccttggctcgagttcggagagcgaggttgatctggaccaggttcgtgccttagccagggagatcgtcatgagggagattgagaaacatgccgcagatgggatcggcagggttgactacgccgttgcctcaggcgggggaagggttgtccggcattcggaggcctatgtgcctaaacgtggtttcatggtttggatgtctggagttgacgtggggcctaagccagagaagatgcttcaaccgagctttggggaacctggacagtgctttgctttgcagggtagcaatgggtttgttgaggtcaagctcaagtcagggataattcctgaggcagtaacgcttgagcatgtgtccaaggatgtggcgtatgacaggtctacagctccaaaaggctgtcgggtgtatggatggtacgaggagacgcccggtgagacccaatctggtcatgctgcaaagatggctttggcagagttcgcctacgacttggagaagaacaatgtgcagacatttgacgtgacagccccagatgtaggcgtgatcaatatggtccggctggatttcacttcgaatcacggaagctcgcagctgacgtgcatctaccgcctccgggtccatggccatgaaccggtctctccaggatcctccgcaggttctcaggcctgatgagttgtggaaagccttgtgtttctatttgatacgtgattcacacttgacacaactgtaaatgtaacgatcgtttgctggtagcctggtgtcttcctagatcctagtccagtaacatgtggtaggtggctagtgtattctatgaacacatgggatttcagcattcagcagttgtttgttgcgtaattgtttgtttgaacctttgtcaaggattgtgtgctgttgtctttggttcaagcagaacttccattggtatcc

SEQ ID NO: 110786 - DNA, 1091 bp, Zea Mays
ggtcctgcgcctgcgaccgcgtgcgagctggcgcacggggtgttcgagtgctggctccacccgtcgcgctaccggacgcagccctgcaaggacagcatcgggtgccgccgccgcgtctgcttcttcgcgcacacgctggaccagctccgcgtgccgcaggcgcagcagtctagcccgaggggcgcgtccgcggcgtcgccgctggtcgagccgtcgtacgacggctcgccgctccgccgccaggcattccagagctacctcaccaagagcggcatcatgtcgtcgtccccgaccagtgttggtctcgtccccgaggtccccgccgtcggagtccccgccaatgtcgccggccgccgccgccgcggcgctccgccgcggcgcgtggccgggtgtcggcggctcgcccgtcaacgaggtcctcgcctcgctgcgccagctccgcctcggcggcggctcaccgaggtcggcgccttccggcgggtcgttcttggcaggcggctacccgttcgggtccccgaagtcgccggccggtctgtacagtctcccgtccacaccaccaacccggtcgtgcccggtgatggtgaccaccgcctccggcgccaccatcatgaccgtggaatgcctcaaccttgggctcctcgtggacgaggagccggtcgagtccgggagagccctccgcgagaaggtgttcgaacggctcagcaaagaaagcgtcgtgcccaacgacactgtcgcctccgccaacacagagggagcggctccgaacgtcggctgggtctccgacctcattaactgagggaatgaaactcctgaaactatcagcatcagtcgtgccttttctgaacggtgcttatccatggtaagtgcgtgagggaagcttagaggtgtcactgcacagcagcaggagaagaaagttcgtgggaaaaaccaaaaaaaagatttttatttttctagatttgtactaagatgatccttgtacatattttcctccatgtgtgaatattctcggatggctgttggagggaggggaggcagggaaaggttgatttgttctcgggtttcagatgatggcatgccagtggaggtagaag

SEQ ID NO: 110787 - DNA, 1952 bp, Zea Mays
gaaagagaagggcctctcgagggaagggcaagagcggcggctggtaaataaagatcgcgtcgacgcctcttcccctcccccagacctccccgtctaggcttcgattccgccctcctcgaacccgccttccttcccgtcgttttctccccagctccatcgtcctcgggctccggagaaggaagagccgctctggcaccaggtcttcgaacctcccctgccctgccccgcctcgtctccccctgtccccgtctcggtctgttgcaggtatgggtgttctcggtggagcacctcctgcaagctgcccagcgacccggcactgcgcagaatgggcccgaatctacttgaggtactgcttgtgcagccagaaggaaggtgctgccctggcacttgggctaatcagtgtcataagctggggcttcgccgaggtgccacagataatgacaaattacagacagaagtcaacagaaggactctctgtcgcttttcttatgacctggattgttggggatttgtttaaccttgttggctgcttcctcgaacctgctactctgccaactcagatgtacatggcactgctatataccatcacaactctaattcttaccgtacagacgatatactatagccacatctaccatcgtcttgaagcaaaaaaatccagggcagctagcaaggctcaaaagcatcaacgtgcggatgcatcattacgtgaaaggcttttgggtgccaaggacggtgtgttatccagaaacaacgggtcagatgctacagtccttattccaagctcacctattcctgttaatgtgaaattggtcgaccaataccatggaagcagccccaacaccgactactactacatgtcagcaagatctttgtccaggagtccagtgccaactgctggtacatggttgggcagtaatcgtcaatcgttaatgactcctccacaaacgaatgatcaaaggggatctttaattggtgaaatcgctccagcacattctgcaccatctactgttacaaaaaatgccctctcagtggcaccatggatgggtcttctattgggtacgtgtctcttgcacattttgattggaaacacacatagggagatgccaagtggaactgtcataccagttggaagaaggcttttagtgtttgtggagggtcatggaaattcatcgctcagccatggcaatggaagtgaaattggacgctatcttggttgggctatggcaataatttatatgggtgggcgccttccccagattttgttaaacatgcaaagaggccacgctgaggggttgaatccattaatgtttacctttgctttactgggaaattcaacatatgtaggaagcatacttgtaaatagcttggactggtcgaaagttggaccaaatctcccgtggctcgtagacgctggaggatgtgttttgctggattcttttatcattcttcagttcctttatttccattatcggaagcaaagggagctttcagatgagcacgacaaagcagataaagcctgacagaaatggtttcttcttcagtacaaaggtctggttctcctattatgaacatttgttatgctgcactgtagttgtggtctgatgggaacccttgtacagaattcgcaattttgagtataatgtaagtcttgaatgatgtgtcaaactgaagtagggagatagaatgtaggaggcatattcactctattctattgttgtatacgtgcgtatgcagaactgaagctgaaatgagtacctcatacaactggctctgggtagcagcatcattcttacgtgaagagcaccactcatactcaggagtcgggacagatttggagcgtcatttcactggttgctgcttggggagggtagttctcacggcgtcatctcttgtggagaggcttgtgcacttaatttgtcttgtagtatcaaaacgtcttgtataatatt

SEQ ID NO: 110788 - DNA, 1900 bp, Zea Mays
gaaagagaagggcctctcgagggaagggcaagagcggcggctggtaaataaagatcgcgtcgacgcctcttcccctcccccagacctccccgtctaggcttcgattccgccctcctcgaacccgccttccttcccgtcgttttctccccagctccatcgtcctcgggctccggagaaggaagagccgctctggcaccaggtcttcgaacctcccctgccctgccccgcctcgtctccccctgtccccgtctcggtctgttgcaggtatgggtgttctcggtggagcacctcctgcaagctgcccagcgacccggcactgcgcagaatgggcccgaatctacttgaggtactgcttgtgcagccagaaggaaggtgctgccctggcacttgggctaatcagtgtcataagctggggcttcgccgaggtgccacagataatgacaaattacagacagaagtcaacagaaggactctctgtcgcttttcttatgacctggattgttggggatttgtttaaccttgttggctgcttcctcgaacctgctactctgccaactcagatgtacatggcactgctatataccatcacaactctaattcttaccgtacagacgatatactatagccacatctaccatcgtcttgaagcaaaaaaatccagggcagctagcaaggctcaaaagcatcaacgtgcggatgcatcattacgtgaaaggcttttgggtgccaaggacggtgtgttatccagaaacaacgggtcagatgctacagtccttattccaagctcacctattcctgttaatgtgaaattggtcgaccaataccatggaagcagccccaacaccgactactactacatgtcagcaagatctttgtccaggagtccagtgccaactgctggtacatggttgggcagtaatcgtcaatcgttaatgactcctccacaaacgaatgatcaaaggggatctttaattggtgaaatcgctccagcacattctgcaccatctactgttacaaaaaatgccctctcagtggcaccatggatgggtcttctattgggtacgtgtctcttgcacattttgattggaaacacacatagggagatgccaagtggaactgtcataccagttggaagaaggcttttagtgtttgtggagggtcatggaaattcatcgctcagccatggcaatggaagtgaaattggacgctatcttggttgggctatggcaataatttatatgggtgggcgccttccccagattttgttaaacatgcaaagaggccacgctgaggggttgaatccattaatgtttacctttgctttactgggaaattcaacatatgtaggaagcatacttgtaaatagcttggactggtcgaaagttggaccaaatctcccgtggctcgtagacgctggaggatgtgttttgctggattcttttatcattcttcagttcctttatttccattatcggaagcaaagggagctttcagatgagcacgacaaagcagataaagcctgacagaaatggtttcttcttcagtacaaagaactgaagctgaaatgagtacctcatacaactggctctgggtagcagcatcattcttacgtgaagagcaccactcatactcaggagtcgggacagatttggagcgtcatttcactggttgctgcttggggagggtagttctcacggcgtcatctcttgtggagaggcttgtgcacttaatttgtcttgtagtatcaaaacgtcttgtataatattatcactgttctcgaatattggttcattatctctgttctcgaatatttgttctcaaatatttgttacctgttagtttatttttgaaacgacggagggaatatttatttatatgagagattagatgtaactggtct

SEQ ID NO: 110789 - DNA, 1021 bp, Zea Mays
aaaaatgacttttttgttgtctgatctaatgggaatgtacggaatctcgtctcccatctcgcacttgagttgagactactgttgtgactattgtgtgcgtgagagagaaacagaagaggaaaaggaatccatggcggcgacgctggcgaggagggcggggcgctccgcggcgacgacgctatggggcgcggcgaggggcttcgcatcggtggggtccgacatcgtctctgcggctcccggcgtgtcgctgcagaaggcgcggtcctgggacgagggcgtcgccaccaagttctctaccacgcctctcaaggacatcttctacgggaagaaggtggtcatcttcggcttgcccggtgcatatacaggggtttgttcacaagcgcacgttcctagttacaagaagaatattgacaagttgaaagcaaaaggaatcgactctgttatctgtgtagctgtgaatgatccgtatgtcctggatggatgggcaaaaaagctagacgctaaagatacaattgagttctatggtgactttgatgggagtttccacaaaagcttggatttggagatagacctttctgctgctttgcttggccgccgttctcacaggtggtccgcctttgttgacgatggtaagatcaagtctttcaatgttgaggaagcaccgtccgactttaaggtttctggtgcggaggtgatcttggaccagatctgagctcctcaatgaacttcggccatcttcagtttgtgcggcatacttcctctgcagcagccgaataaaattaaatctcttacgacccgtgtaagatgttaaagatacgatgcgccccagactgtatggcctcggcctcggtttttctggaatgaattgatcagtgttcactgtgtgcgttatttctatttgcattggcttcaattggagcaatgaactagatttacaggccggacaaagaacatcgacctgaacagcctgcctgtggattatactctttcttggtgaaaatgcttgatagagaacagggtg

SEQ ID NO: 110790 - DNA, 951 bp, Zea Mays
ttgtctgatctaatgggaatgtacggaatctcgtctcccatctcgcacttgagttgagactactgttgtgactattgtgtgcgtgagagagaaacagaagaggaaaaggaatccatggcggcgacgctggcgaggagggcggggcgctccgcggcgacgacgctatggggcgcggcgaggggcttcgcatcggtggggtccgacatcgtctctgcggctcccggcgtgtcgctgcagaaggcgcggtcctgggacgagggcgtcgccaccaagttctctaccacgcctctcaaggacatcttctacgggaagaaggtggtcatcttcggcttgcccggtgcatatacaggggtttgttcacaagcgcacgttcctagttacaagaagaatattgacaagttgaaagcaaaaggaatcgactctgttatctgtgtagctgtgaatgatccgtatgtcctggatggatgggcaaaaaagctagacgctaaagatacatttccacaaaagcttggatttggagatagacctttctgctgctttgcttggccgccgttctcacaggtggtccgcctttgttgacgatggtaagatcaagtctttcaatgttgaggaagcaccgtccgactttaaggtttctggtgcggaggtgatcttggaccagatctgagctcctcaatgaacttcggccatcttcagtttgtgcggcatacttcctctgcagcagccgaataaaattaaatctcttacgacccgtgtaagatgttaaagatacgatgcgccccagactgtatggcctcggcctcggtttttctggaatgaattgatcagtgttcactgtgtgcgttatttctatttgcattggcttcaattggagcaatgaactagatttacaggccggacaaagaacatcgacctgaacagcctgcctgtggattatactctttcttggtg

SEQ ID NO: 110791 - DNA, 1607 bp, Zea Mays
ttgtctgatctaatgggaatgtacggaatctcgtctcccatctcgcacttgagttgagactactgttgtgactattgtgtgcgtgagagagaaacagaagaggaaaaggaatccatggcggcgacgctggcgaggagggcggggcgctccgcggcgacgacgctatggggcgcggcgaggggcttcgcatcggtggggtccgacatcgtctctgcggctcccggcgtgtcgctgcagaaggcgcggtcctgggacgagggcgtcgccaccaagttctctaccacgcctctcaaggacatcttctacgggaagaaggtggtcatcttcggcttgcccggtgcatatacaggggtttgttcacaagcgcacgttcctagttacaagaagaatattgacaagttgaaagcaaaaggaatcgactctgttatctgtgtagctgtgaatgatccgtatgtcctggatggatgggcaaaaaagctagacgctaaagatacagtaagtagctatcctttaatctttattctttatatgtcttattagcaatttagctcataatctgaaatataatgagggcatataacatgtgtatccaagtattgtgctattatcaatgtataggactatttgccttttgctgtcaggtgttggtgcttatttggagttccaactacataaatgtttgtcgtcattatattcccttcctactctcagtaattcgttactacttactactaaggattgtccaatatgccatcaacatgtgatgttttccttgttctgccacctaatatgcttaatcacagccctaaattattgatactgtacatcaaatatggtgctttttcatacttatgctgcacttcaccttggtgcataaaactaccaaatgcaaatttcatgctgtgtctcataaagctcacccaaatttctttatactgatgaatgatctaatttaaacttagaatttatgggaaacatgtttggtgtatcatcttaggatcttaatgaaaaaaactatgaattgagtatgtgcagttgctacttattatctatattaattctctcgagatcatgtgcatattcatattttttttctatgtgcaattattttggaaaatatagattgagttctatggtgactttgatgggagtttccacaaaagcttggatttggagatagacctttctgctgctttgcttggccgccgttctcacaggtggtccgcctttgttgacgatggtaagatcaagtctttcaatgttgaggaagcaccgtccgactttaaggtttctggtgcggaggtgatcttggaccagatctgagctcctcaatgaacttcggccatcttcagtttgtgcggcatacttcctctgcagcagccgaataaaattaaatctcttacgacccgtgtaagatgttaaagatacgatgcgccccagactgtatggcctcggcctcggtttttctggaatgaattgatcagtgttcactgtgtgcgttatttctatttgcattggcttcaattggagcaatgaactagatttacaggccggacaaagaacatcgacctgaacagcctgcctgtggattatactctttcttggtg

SEQ ID NO: 110792 - DNA, 465 bp, Zea Mays
aaaaccctcctttctctctgccggtggcgggcggagccatgaacttgttcgcgggggtcggcggcggggcggcggacggtggcggcacaggcacggcgctcctggagctgacgccgcacaagatggcggtgtgccacctcgtgcaggtctttgcgccggcggcgcaggccgggggcgacgtcgtgccgcccttccccttcgagtccctcactcaccacaaccgcctcggactcttcctgtttacgctcacccggtcatgcgatgattttctggagcctccactggaagaatttttgaagcagctgagggcagtggatgatttgactaatggttggttctgcgagcagctgacaagtgccctgtcagcactcaactcacctgatgacttgttcaacttctttgataagctacgaggtgtgttcactgcaccagagggtgcgagtgcagaagatgtattcttggatc

SEQ ID NO: 110793 - DNA, 2043 bp, Zea Mays
agcattttgtttttttcagaataatgatgattcatgccttgcctatgtattaggagccatttctaatctattatcaaagataggcatctcaaacacagttggaataatcagttctccatattcacttgggaccaatattggactaggcacaccattatccattcagcaacagttacttgttcttttaaagcgatcactcaagagagctgatgcattgaaacttccaagtttactatcctttgatcacctttcgcttgcaaaatttgatctgaagcatgtccaaaggccactagtctctttcggccctaatgcatctacaaagcttagaacatgtcctgcagatgtctgtaagaatctaaggttaggttcccgtgtgttgactgactttggagcagatgttctatctacttcaaatgataatggtagttttagcacttcttggcttaggaatctatccgccacttctgattcatggcgtagcagttcaaagaacaccaaaaaaatacatattaatgacttcgacaatttccattatcatgcacaaccaagtccagtacctgcatcaatattgcaattagctggctcagcatatttgctgagagctaccgcttgggagcactatgggagtgctccaatggtacgaatgaatgttctagtttatgcaacctgctttgcggatgctgcaagttcatcagagttatcactagcatatgttaagctaattcaacaactggcggtgttcaaaggatattcagctgcattctgtgctctaaagcttgctgaaaagaagttcccatcctcaacaagtttacacatccagcttctaggaatgcagattctacatgagcgcgcacttcatcgagggcatctaaaagtcgcgcaacaaatctgtgatgagtttggggtgttatcatcttctgtttctggagtagacattgagctaaagacagaatttagtgtacggcgtgctcgcactctccttgccgcaaaacagtttagccaggccgcagctgtggccaattctcttttctctacgtgctacaagtacaacatgcaggttgagaatgcaagtgttcttttattacttgctgaaatacataaaaaatctgacaatgcggtacttgggcttccttatgcgttggccagccaatcattctgcaaatcattcaacttggatctgcttgaagcctcagctacacttactctcgctgagttgtggctggatcttggatcaagccatgcaaagaaggcactgagtcttgtctaccagagccttcccatgattcttggtcatggtgggcttgagctgcgtgctcgagctcacgttgttttagcaaagtgccatttatccgatctgaaattctcagttctcgaagatcctgaagctgttttggatcctctgaaccaagccactgaagacctgcaagcattggagtaccacgagatggcagcagaggcgtactatctgaaggcaatggcatacaaccatctcggcaagcttgatgagagggaggaagccgcggctcgtttcaaggatcacgtcactgcccttgagaccccgcataacgaagaggactcgcttaagtactgagacccaagaccatttgttattggcaagcatgccccactgccagagactaaagagggcgtggtggccttctggacccgcatggtggcactggcaggctacaatgctacactgaggcgaatggcgtttgctgccatgcggaggcactgccactgactgtgggcggaccggcggacggcggtgactgaaggagacgggcagccggtgaggtcaatgtgctagttgggtcagcgtggtatggtctcatccatggaccatggtgttcattagagcgagacgaagacatcagattgagacttgatgttcttactctgttcttatcgacttctctgctctgttactggggagttccgaattgctaactcagacagacagtgctgacaatgtgtttgtgtttgaatgtaaacagaacaagaacagaaaaatagaagattgatctgtattttcccttgact

SEQ ID NO: 110794 - DNA, 1585 bp, Zea Mays
acattattcaggtccaggtcacatgatgcacagacagcccgtccgacgccgcgttagctacttgcctacttcagctatatgaaacggcaaaagtcttcccctcgttccccaatctcctctccatcgaaaccctagcacgacgcaattcccgtcttcccacgccgtatcgccgttgctatgggcaagaagcggaagctcgagcccaaatcggcggcagggttcacgccggttaaggcctccccgaccaccaggtctgccaccgctaaggccgctggtctatccgaggtcctcgcccccgtcgaggctacgatggagaagctgccgcagggggcaggcggcgaggatgtagaggaaatcgaggaggtggaggtcgaggaggaagtggaagtggaagaggaagaagaaggcgagagcgaccaggcttcgatccaggcgctgctggattcgttccccaaggaccagctcgtcgagctgttacgcgacgctgccatcgctcacggcgacgtgctaaccaccatccggcgcgtggccgacgccgacccggctcagcggaagatcttcgtacacggcctcggctgggacaccacaaccgacaccctcaccgaggccttcggcccatacggcgagatagaggatctcaaggtcgtcaccgaccgcaacacgggcaagtgcaaggggtacgggttcatcctcttccgtcaccgctccggcgcccgagctgcactacgcgagccccagaagaagattggtaaccgcagcaccgcctgccagctcgcctctgttggccctgtccctggtggtgcgcccaacagcgctgcaccagccccggttcaattgcagttgccaccagtgtcagagtatacacaacgaaagatatttgtcagcaatgttggtgcagatatcgatccgcagaaattgcttcagttctttgcgaggtttggtgagatcgaggaaggcccgcttggtcttgacaaggtcactgggaaacccaagggatttgctctttttgtctacaagaccattgaaagtgccaagaaggctcttgaggagccacataagcattttgagggagtgatgctgcactgccagaaggcgattgatggaccaaagccgaacaaattaggaggagctggaggttttttcggtgctggagcttcaagtgggggcaaggggtttgctggttatggagctactagtcattctctgcccggaactgttggtattgtccagccaatgtcacctctggcacctggattggcttcattgcctggtggtatttctgctgccccaggtgtggatcctgctctggggcaggccttgacagctttgcttgccacccagcaggggggtgggctgagttttaatagcattctgggggtcggtgctaatggatcggggttgcctccgcaggggccaactggtgcattgggtggtagcagcgtgcaggggatgcaaggtggttatatgggtggctacggtggttctggtgggtatgggggtgcttcttcaggaggccctggaagacattacatgggtcattaggtaagatttggcaggtagatgcatctaactgcaggaaactaca

SEQ ID NO: 110795 - DNA, 1812 bp, Zea Mays
acattattcaggtccaggtcacatgatgcacagacagcccgtccgacgccgcgttagctacttgcctacttcagctatatgaaacggcaaaagtcttcccctcgttccccaatctcctctccatcgaaaccctagcacgacgcaattcccgtcttcccacgccgtatcgccgttgctatgggcaagaagcggaagctcgagcccaaatcggcggcagggttcacgccggttaaggcctccccgaccaccaggtctgccaccgctaaggccgctggtctatccgaggtcctcgcccccgtcgaggctacgatggagaagctgccgcagggggcaggcggcgaggatgtagaggaaatcgaggaggtggaggtcgaggaggaagtggaagtggaagaggaagaagaaggcgagagcgaccaggcttcgatccaggcgctgctggattcgttccccaaggaccagctcgtcgagctgttacgcgacgctgccatcgctcacggcgacgtgctaaccaccatccggcgcgtggccgacgccgacccggctcagcggaagatcttcgtacacggcctcggctgggacaccacaaccgacaccctcaccgaggccttcggcccatacggcgagatagaggatctcaaggtcgtcaccgaccgcaacacgggcaagtgcaaggggtacgggttcatcctcttccgtcaccgctccggcgcccgagctgcactacgcgagccccagaagaagattggtaaccgcagcaccgcctgccagctcgcctctgttggccctgtccctggtggtgcgcccaacagcgctgcaccagccccggttcaattgcagttgccaccagtgtcagagtatacacaacgaaagatatttgtcagcaatgttggtgcagatatcgatccgcagaaattgcttcagttctttgcgaggtttggtgagatcgaggaaggcccgcttggtcttgacaaggtcactgggaaacccaagggatttgctctttttgtctacaagaccattgaaagtgccaagaaggctcttgaggagccacataagcattttgagggagtgatgctgcactgccagaaggcgattgatggaccaaagccgaacaaattaggaggagctggaggttttttcggtgctggagcttcaagtgggggcaaggggtttgctggttatggagctactagtcattctctgcccggaactgttggtattgtccagccaatgtcacctctggcacctggattggcttcattgcctggtggtatttctgctgccccaggggccaactggtgcattgggtggtagcagcgtgcaggggatgcaaggtggttatatgggtggctacggtggttctggtgggtatgggggtgcttcttcaggaggccctggaagacattacatgggtcattaggtaagatttggcaggatgattataactattttactgtggccagaatgccagatgattctacatgttcctgcttggcacttataaacttgctgttttaagctgtttctggctactcaattatggctgtggtcaaagttttcataggaactttggttccctccacctatcatttcaaaacgaaattaccgtttagattttcaaaagggcatcttatggctgcaagactattgtagaagacttcatgtggatctaaagcattgtggtatttaatgatattactgtttttgtacggttttcaaaaggccaaattaaggcttgcaaaactattgtaaaagacttcctgtgggtttaaagcactgagctatttaatcacaacggttttgtttcat

SEQ ID NO: 110796 - DNA, 1777 bp, Zea Mays
acattattcaggtccaggtcacatgatgcacagacagcccgtccgacgccgcgttagctacttgcctacttcagctatatgaaacggcaaaagtcttcccctcgttccccaatctcctctccatcgaaaccctagcacgacgcaattcccgtcttcccacgccgtatcgccgttgctatgggcaagaagcggaagctcgagcccaaatcggcggcagggttcacgccggttaaggcctccccgaccaccaggtctgccaccgctaaggccgctggtctatccgaggtcctcgcccccgtcgaggctacgatggagaagctgccgcagggggcaggcggcgaggatgtagaggaaatcgaggaggtggaggtcgaggaggaagtggaagtggaagaggaagaagaaggcgagagcgaccaggcttcgatccaggcgctgctggattcgttccccaaggaccagctcgtcgagctgttacgcgacgctgccatcgctcacggcgacgtgctaaccaccatccggcgcgtggccgacgccgacccggctcagcggaagatcttcgtacacggcctcggctgggacaccacaaccgacaccctcaccgaggccttcggcccatacggcgagatagaggatctcaaggtcgtcaccgaccgcaacacgggcaagtgcaaggggtacgggttcatcctcttccgtcaccgctccggcgcccgagctgcactacgcgagccccagaagaagattggtaaccgcagcaccgcctgccagctcgcctctgttggccctgtccctggtggtgcgcccaacagcgctgcaccagccccggttcaattgcagttgccaccagtgtcagagtatacacaacgaaagatatttgtcagcaatgttggtgcagatatcgatccgcagaaattgcttcagttctttgcgaggtttggtgagatcgaggaaggcccgcttggtcttgacaaggtcactgggaaacccaagggatttgctctttttgtctacaagaccattgaaagtgccaagaaggctcttgaggagccacataagcattttgagggagtgatgctgcactgccagaaggcgattgatggaccaaagccgaacaaattaggaggagctggaggttttttcggtgctggagcttcaagtgggggcaaggggtttgctggttatggagctactagtcattctctgcccggaactgttggtattgtccagccaatgtcacctctggcacctggattggcttcattgcctggggccaactggtgcattgggtggtagcagcgtgcaggggatgcaaggtggttatatgggtggctacggtggttctggtgggtatgggggtgcttcttcaggaggccctggaagacattacatgggtcattaggatgattataactattttactgtggccagaatgccagatgattctacatgttcctgcttggcacttataaacttgctgttttaagctgtttctggctactcaattatggctgtggtcaaagttttcataggaactttggttccctccacctatcatttcaaaacgaaattaccgtttagattttcaaaagggcatcttatggctgcaagactattgtagaagacttcatgtggatctaaagcattgtggtatttaatgatattactgtttttgtacggttttcaaaaggccaaattaaggcttgcaaaactattgtaaaagacttcctgtgggtttaaagcactgagctatttaatcacaacggttttgtttcat

SEQ ID NO: 110797 - DNA, 1819 bp, Zea Mays
acattattcaggtccaggtcacatgatgcacagacagcccgtccgacgccgcgttagctacttgcctacttcagctatatgaaacggcaaaagtcttcccctcgttccccaatctcctctccatcgaaaccctagcacgacgcaattcccgtcttcccacgccgtatcgccgttgctatgggcaagaagcggaagctcgagcccaaatcggcggcagggttcacgccggttaaggcctccccgaccaccaggtctgccaccgctaaggccgctggtctatccgaggtcctcgcccccgtcgaggctacgatggagaagctgccgcagggggcaggcggcgaggatgtagaggaaatcgaggaggtggaggtcgaggaggaagtggaagtggaagaggaagaagaaggcgagagcgaccaggcttcgatccaggcgctgctggattcgttccccaaggaccagctcgtcgagctgttacgcgacgctgccatcgctcacggcgacgtgctaaccaccatccggcgcgtggccgacgccgacccggctcagcggaagatcttcgtacacggcctcggctgggacaccacaaccgacaccctcaccgaggccttcggcccatacggcgagatagaggatctcaaggtcgtcaccgaccgcaacacgggcaagtgcaaggggtacgggttcatcctcttccgtcaccgctccggcgcccgagctgcactacgcgagccccagaagaagattggtaaccgcagcaccgcctgccagctcgcctctgttggccctgtccctggtggtgcgcccaacagcgctgcaccagccccggttcaattgcagttgccaccagtgtcagagtatacacaacgaaagatatttgtcagcaatgttggtgcagatatcgatccgcagaaattgcttcagttctttgcgaggtttggtgagatcgaggaaggcccgcttggtcttgacaaggtcactgggaaacccaagggatttgctctttttgtctacaagaccattgaaagtgccaagaaggctcttgaggagccacataagcattttgagggagtgatgctgcactgccagaaggcgattgatggaccaaagccgaacaaattaggaggagctggaggttttttcggtgctggagcttcaagtgggggcaaggggtttgctggttatggagctactagtcattctctgcccggaactgttggtattgtccagccaatgtcacctctggcacctggattggcttcattgcctggtggtatttctgctgccccaggggccaactggtgcattgggtggtagcagcgtgcaggggatgcaaggtggttatatgggtggctacggtggttctggtgggtatgggggtgcttcttcaggaggccctggaagacattacatgggtcattaggatgattataactattttactgtggccagaatgccagatgattctacatgttcctgcttggcacttataaacttgctgttttaagctgtttctggctactcaattatggctgtggtcaaagttttcataggaactttggttccctccacctatcatttcaaaacgaaattaccgtttagattttcaaaagggcatcttatggctgcaagactattgtagaagacttcatgtggatctaaagcattgtggtatttaatgatattactgtttttgtacggttttcaaaaggccaaattaaggcttgcaaaactattgtaaaagacttcctgtgggtttaaagcactgagctatttaatcacaacggttttgtttcatatgtatggtttttaaagaggc

SEQ ID NO: 110798 - DNA, 1964 bp, Zea Mays
acattattcaggtccaggtcacatgatgcacagacagcccgtccgacgccgcgttagctacttgcctacttcagctatatgaaacggcaaaagtcttcccctcgttccccaatctcctctccatcgaaaccctagcacgacgcaattcccgtcttcccacgccgtatcgccgttgctatgggcaagaagcggaagctcgagcccaaatcggcggcagggttcacgccggttaaggcctccccgaccaccaggtctgccaccgctaaggccgctggtctatccgaggtcctcgcccccgtcgaggctacgatggagaagctgccgcagggggcaggcggcgaggatgtagaggaaatcgaggaggtggaggtcgaggaggaagtggaagtggaagaggaagaagaaggcgagagcgaccaggcttcgatccaggcgctgctggattcgttccccaaggaccagctcgtcgagctgttacgcgacgctgccatcgctcacggcgacgtgctaaccaccatccggcgcgtggccgacgccgacccggctcagcggaagatcttcgtacacggcctcggctgggacaccacaaccgacaccctcaccgaggccttcggcccatacggcgagatagaggatctcaaggtcgtcaccgaccgcaacacgggcaagtgcaaggggtacgggttcatcctcttccgtcaccgctccggcgcccgagctgcactacgcgagccccagaagaagattggtaaccgcagcaccgcctgccagctcgcctctgttggccctgtccctggtggtgcgcccaacagcgctgcaccagccccggttcaattgcagttgccaccagtgtcagagtatacacaacgaaagatatttgtcagcaatgttggtgcagatatcgatccgcagaaattgcttcagttctttgcgaggtttggtgagatcgaggaaggcccgcttggtcttgacaaggtcactgggaaacccaagggatttgctctttttgtctacaagaccattgaaagtgccaagaaggctcttgaggagccacataagcattttgagggagtgatgctgcactgccagaaggcgattgatggaccaaagccgaacaaattaggaggagctggaggttttttcggtgctggagcttcaagtgggggcaaggggtttgctggttatggagctactagtcattctctgcccggaactgttggtattgtccagccaatgtcacctctggcacctggattggcttcattgcctggtggtatttctgctgccccaggtgtggatcctgctctggggcaggccttgacagctttgcttgccacccagcaggggggtgggctgagttttaatagcattctgggggtcggtgctaatggatcggggttgcctccgcaggggccaactggtgcattgggtggtagcagcgtgcaggggatgcaaggtggttatatgggtggctacggtggttctggtgggtatgggggtgcttcttcaggaggccctggaagacattacatgggtcattaggatgattataactattttactgtggccagaatgccagatgattctacatgttcctgcttggcacttataaacttgctgttttaagctgtttctggctactcaattatggctgtggtcaaagttttcataggaactttggttccctccacctatcatttcaaaacgaaattaccgtttagattttcaaaagggcatcttatggctgcaagactattgtagaagacttcatgtggatctaaagcattgtggtatttaatgatattactgtttttgtacggttttcaaaaggccaaattaaggcttgcaaaactattgtaaaagacttcctgtgggtttaaagcactgagctatttaatcacaacggttttgtttcatatgtatggtttttaaagaggcgattgtgtggcttgcaaggctgctgc

SEQ ID NO: 110799 - DNA, 125 bp, Zea Mays
tagggccttttgttgctggaatgatcttggtagcttatctttctcgtatctgaccgtactattgattacatatgtggcagatgcacactgctgtatactatctgactctctacattatcggcaaa

SEQ ID NO: 110800 - DNA, 982 bp, Zea Mays
taggtatagattgtgacattgtcatgttgccatttcattgttgcgtgtattcttgaatggtatacataattgttactttctgtaatataatatctttggaatatgattcgacattgttatctgtccgggaaatcaatagtgcttttcagtgtattgtgaccacagtttaacccttgtttaaaagcagttaaagaaagagttctggtgctggttgatagaattcatggccctgaagtggcagattaccatggtgcatggacgacccaatatcactttatttccttgttttaatgtcacggcaggccggttgaggtctcaagtttgcctttgagacaggtaagtacgaaatgcatacattagcaggtccaagtgatgcaaatagcagcagaaagctctcgagcttgttcgcttatgccgaaaaagggtatctacttattttgtctgtataaattagtataaattacagctgcaagcctgcaacagtctgaacagctggcttatagccgcacgtcatctgtaagagcaagtttaataatagagcctattattggctctaacttcttaccgtgtcatatagagccagcaataaacacactcatgtagtaaaactggctttaagattgactcttagatgaatttcttgtctcttatctcttttatccttttgtcttgaaacctgtgtagcacctaactcttgcatgagagctcactacctctattttttgatgtctctcttccacgtaagcaaaaatgacatgtaattagacttgagtccattattgtacttgctctaatttgtgaattcgtgagatgggagagttgcagtgatgtgctgtctcttcgtctcacggtgttgcccgcaaggagagagtggcaaggtagtgctgagacgtgggagcctgcgccctgcttcggaggctgtgcttcagcttcaaacgggtacacggaccgtaatcaaatgatgtatatgttgaattaggaa

SEQ ID NO: 110801 - DNA, 934 bp, Zea Mays
gaacagctgtcggaagctgtctttccatgatctaggagccgtcgccgtcgagagctgaggcgaagcaacatagaagacgaggggggagtgcgactcctcgtgacttgtgagggagagaagccatggcggagatggagccgagcatcgggaaccatatggccgaagaccaaccgactccggccgcctccactgtcgaggaggccgctatggatgcagataccagcggcgagcggcgtagcgctgccgcgttggtgggcctgctccgcgggttcctcgccgtgcaacagcgccgggccgaggcctactccacgctacgaaggggtttttctgagtatatggcttatggaggtgaattggcctatcaacaactgtgtggcaatattacagcggagttcaatgattgctcaaaacaagttagctctagttgtctcatcttcttcctattcataaaaatcagcatctaataattctttcttcaggtccttgaaataatttccctgctctcaatgccagaatttagtcgcagcgatcttgccgatttactgaagggtgttcaagcacatgagaaagagaagttgcatttggtaagttagcttgggctcttgggcgtgttgtattgccatatgggccatgaaatagtgcttccttaaaataactagattttgtttaagagcggaaacttattccgttctttcatatttatgaactgtaatgatctattgatatatgttttgacatgtcatttaacctaagaatactgtgattggaggaattattagcacatcggagatcgtagtttcatttttcattgttcatatcaggccatgtttttattaaattctgaaggacaccaagctttacctctttcacaatacattattacacacttgaatttgtataaaatgatttcaacttactctaatttcccctgcta

SEQ ID NO: 110802 - DNA, 1101 bp, Zea Mays
gaacagctgtcggaagctgtctttccatgatctaggagccgtcgccgtcgagagctgaggcgaagcaacatagaagacgaggggggagtgcgactcctcgtgacttgtgagggagagaagccatggcggagatggagccgagcatcgggaaccatatggccgaagaccaaccgactccggccgcctccactgtcgaggaggccgctatggatgcagataccagcggcgagcggcgtagcgctgccgcgttggtgggcctgctccgcgggttcctcgccgtgcaacagcgccgggccgaggcctactccacgctacgaaggggtttttctgagtatatggcttatggaggtgaattggcctatcaacaactgtgtggcaatattacagcggagttcaatgattgctcaaaacaagtccttgaaataatttccctgctctcaatgccagaatttagtcgcagcgatcttgccgatttactgaagggtgttcaagcacatgagaaagagaagttgcatttgacagctaagattcaggtgctgaagaaagccggcaggccttcagagcgcctggtgaaccacgcagactgcaggtcgcgcagcatggcccagcacgtgtgcgtgcacgtcaaggagatcacggaggccgccggcaccgaggacgccgaggcggatgcggagtatgacgcggccctcaaggaggccatacagggcgtgcaggttgccgtgagcagcataaacgaacacatggaggaggtgcgctacgagattgacggactcgaggcagagacgatcggtagcaagtggagcgaagtcgaggaagcgttccctggtaccctgtctataaaatagatagatgagatgagatgagatgagatgttgagcgtggaagactgaagaagaatcacgaacagagagattcgatgtgaatttttgggtactgttcagttcagggtacccgtgttattatacgtcctccaatccaaaatttagttctttctggtcttttttccctccacgtttgaatgataatgaatacagagctacatataaattatattaatagtttaattaatgaatgtatatttagtctaaaataaaatat

SEQ ID NO: 110803 - DNA, 1097 bp, Zea Mays
gaacagctgtcggaagctgtctttccatgatctaggagccgtcgccgtcgagagctgaggcgaagcaacatagaagacgaggggggagtgcgactcctcgtgacttgtgagggagagaagccatggcggagatggagccgagcatcgggaaccatatggccgaagaccaaccgactccggccgcctccactgtcgaggaggccgctatggatgcagataccagcggcgagcggcgtagcgctgccgcgttggtgggcctgctccgcgggttcctcgccgtgcaacagcgccgggccgaggcctactccacgctacgaaggggtttttctgagtatatggcttatggaggtgaattggcctatcaacaactgtgtggcaatattacagcggagttcaatgattgctcaaaacaagtccttgaaataatttccctgctctcaatgccagaatttagtcgcagcgatcttgccgatttactgaagggtgttcaagcacatgagaaagagaagttgcatttgctaagattcaggtgctgaagaaagccggcaggccttcagagcgcctggtgaaccacgcagactgcaggtcgcgcagcatggcccagcacgtgtgcgtgcacgtcaaggagatcacggaggccgccggcaccgaggacgccgaggcggatgcggagtatgacgcggccctcaaggaggccatacagggcgtgcaggttgccgtgagcagcataaacgaacacatggaggaggtgcgctacgagattgacggactcgaggcagagacgatcggtagcaagtggagcgaagtcgaggaagcgttccctggtaccctgtctataaaatagatagatgagatgagatgagatgagatgttgagcgtggaagactgaagaagaatcacgaacagagagattcgatgtgaatttttgggtactgttcagttcagggtacccgtgttattatacgtcctccaatccaaaatttagttctttctggtcttttttccctccacgtttgaatgataatgaatacagagctacatataaattatattaatagtttaattaatgaatgtatatttagtctaaaataaaatat

SEQ ID NO: 110804 - DNA, 1745 bp, Zea Mays
taagcacgactataatccctaccgagctatcctatccctatcccctcttttgctttccttcccccgcctgctcaattcttctcgtgctgtcacccctttcttcaatcgcctcccgattcccgcggggctcgcagatcccggaaggacaccccgccgcccccgatgagccgccaccgggtcgagacctgcgactcgtggcggcccccgcggaagaaccacgccggtgcgccgccgctcctccgcgcggggcctcggctcctcgccttcgcctcgctctccgtccgcgacggcggggactccgccgcggccgtcgccaaggcggttgaggaggcggttgtcgtacgatccgatgaggtgaaggaggcggtggccggggaggagaggaagaagacgaagtcgacggagcgcaggctgccccccgcggcgcagctggtgagccatccgctcgcgctgctggcgctagtacccaacagcgccgcgatctttgccgcgggggccgccgcgggcactgtagccaagaccgtcaccgcgcccctcgaccgcgtcaagatcctcatgcagacgcatagcgtgcgggtggcgggagagagtgccaagaagggtgttggatttctcgaggctatggcagacattggaaagaaggatgggcttaagggttactggaaaggaaaccttccacaggtcattcgcataattccttacagtgcagtgcaactcttctcgtatgaagtttacaagaaaattttccggagaaaggatggagagctttctgtatttgggagacttgccgctggtgcttgcgcgggcatgacatctacacttgtaacttacccactggatgttctccggctcaggctagcagttcaatctggacacagcactttatctcaggttgctcttaacatgctgagagaagaagggctggcctccttctatggaggcttgggtccatctcttgtagcaattgcaccttacattgctgtgaacttctgtgtttttgacctgatgaagaaatctgtaccagagaagtacaagaatagaccagaaacatctctggcaaccgctcttctttcagcaacatttgcaactttgatgtgttatccgctggacactgttaggagacagatgcagatgaaaggcacaccatacaatactgtttttgatgctattccaggcattgtggagcgtgacggtctaactggtctttatagaggttttgtgccaaatgcgttaaaaaatctaccaaatagcagcattaaactgaccgtgtttgacacggtgaagacactgatagctactgggcagaaggagatggacaaattaattcaagaaaatgaggagaaaagaagctaggaaaagagccttggtcaatcttgaaggctttggtagaaagcatgcctcgttgcacactccatatcgctatgtttcctcgtttgctggtgacatattttaggatctaggcagcgcatctttctgttccttttcaaatagatctagtttccagtgctttccgtagcatccacattcatagagatagaggttcgcattgagttgatctctttatctagtgtcggtagcattcccctacagatcttacctattctaatagaggatagtgtatcaatgtgaccgccccagattccttaaatgtaattatacataatagccagaacaatcaaatgtcatggagcacaggagcatgttctccttgtcaatgaattagcatctttgatttaaagaacata

SEQ ID NO: 110805 - DNA, 886 bp, Zea Mays
cggcgatcttggggcccgcgcgcgcccggatgccggactggaggcgcttgatctccggcttggcggcgacggtgccggtcccgacggccacgtggtcgcacttggggaacacccagccgtagaagtccggggacacgtccccgcccacgtacatctcggcgaggtcgtcgtagtacgccatgccggcgtcggggaggcggatgcgctcctggaacgcgatggccgtcgtgtagtccccggccccgacctcgcgcgccacgcggctgttggcgccgtccgcgccgacgatggcgtccacctccagcacgctccgtcccgctcccacgccctccggggaggacgagatgtagtggacgaggtaggggtcggcgggccccgcggggagcgagagcgaggtgacgaggcccgggacgagctcggccccggcctcgacggcgcggcggcggaggaaggagtcgagcacctcgcggcggagcatggggatgtgcgccccggggggcagcgcgcgggagaagtcggctgcgaggttggagggggagagcacgcgcatccgggtgacgcggcggtcaacgaggtcccgcgggatggcgaactcgtccagcatacagagtgggatggcaccgccgcagggcttggcgcccgcggggctgcgctcgaggaggaacgtccgggcccccgccgaggccagcgcctcggcagccgacgcgcccgcggggccaccccccactacggcgacgcgcagcgtgcgcgctgacgacgatgaggaggtggtggtggctgagcaggagatgatgatgcgcgctggcgaatagcaggcggcggcggccatggttgtcgctgtggtttgggcgactccgggagattcactatgggctggacgctggag

SEQ ID NO: 110806 - DNA, 1442 bp, Zea Mays
ttcttttccacacccttttcccgattcctttccgccccgccccgccccgcgcagtcgccctccccaccccacccacccaccccaccccacccggtccccactttccactcccaaccccaccagaccttcaaccgctacatttccgtcactaccggagccgccactcccacgaacgcgggcggcggaacggaagcgaaccagttatctagtggagttgcctccttcaagctactctaatgtcctttctattcaagtctagcaatggcggcaccactgaaaaaatcccatccccagaagaacagcgagaaaaaataaatgaattacgcaaggagcttggtgaacactcatcagcagccattaaagacttcctttcagatgcctcgttagcgagatttcttcgagcaaggaactggaatgtgcagaaagctagtaaaatgatgaaagcagctgtgaagtggcggcttgcattcaaacctgaaaacatctgttgggatgatattgcagaggaagcagagactggaaagatatatagagcggattataaggacaaacatggcagaactgttcttgtattgaggcctggcttagagaacactacctcagcaataggacagatcaaatatctagtctactctctggagaaagcaattatgaacctgacggaagatcaagagaagatggtatggctgacagatttccagtgctggacattgggaagcacaccactgaaggtgacccgtgagactgtcaatgtcttgcaagactgctatcctgagaggttggggcttgcaatcctttacaaccctcctaggatatttgaatcattctggaagatagtgaagccgttcctagaccatgagacccgcaagaaggtgaagtttgtgtactccaacgacaaggagagccagaagataatggcagaagtctttgacatggaggagctcgactcggcattcgggggaaagaacccagcgacatttgagtacaacagctacgcagagcagatgcaggacgacgacaagaagatgggatcttcgcacggctcagccaatagcttgcttggatcagctgggaaggaggctaatggcgcagactcggacgcctcaagcgaggcctccttctacagtggaactgactctccgacacatgagaacggtgaacacagcatcgcgaagaagaatggttgagctgagttgaactgctttgattgctcaaactgagggagctgactaatgtagttggtcaacataacagttatatctagcttgaacgattgtcaggaccgatggcgatgacagattccaggctggttagatcaccttgtcgggtctaggcggaatgtatatttgctgctcatgatattatagtatgtaagaccataaacggtgagtttgtgatgcgctatatatcttggaataaagttcaacttcttcgttttctta

SEQ ID NO: 110807 - DNA, 1390 bp, Zea Mays
ttcttttccacacccttttcccgattcctttccgccccgccccgccccgcgcagtcgccctccccaccccacccacccaccccaccccacccggtccccactttccactcccaaccccaccagaccttcaaccgctacatttccgtcactaccggagccgccactcccacgaacgcgggcggcggaacggaagcgaaccagttatctagtggagttgcctccttcaagctactctaatgtcctttctattcaagtctagcaatggcggcaccactgaaaaaatcccatccccagaagaacagcgagaaaaaataaatgaattacgcaaggagcttggtgaacactcatcagcagccattaaagacttcctttcagatgcctcgttagcgagatttcttcgagcaaggaactggaatgtgcagaaagctagtaaaatgatgaaagcagctgtgaagtggcggcttgcattcaaacctgaaaacatctgttgggatgatattgcagaggaagcagagactggaaagatatatagagcggattataaggacaaacatggcagaactgttcttgtattgaggcctggcttagagaacactacctcagcaataggacagatcaaatatctagtctactctctggagaaagcaattatgaacctgacggaagatcaagagaagatggtatggctgacagatttccagtgctggacattgggaagcacaccactgaaggtgacccgtgagactgtcaatgtcttgcaagactgctatcctgagagatagtgaagccgttcctagaccatgagacccgcaagaaggtgaagtttgtgtactccaacgacaaggagagccagaagataatggcagaagtctttgacatggaggagctcgactcggcattcgggggaaagaacccagcgacatttgagtacaacagctacgcagagcagatgcaggacgacgacaagaagatgggatcttcgcacggctcagccaatagcttgcttggatcagctgggaaggaggctaatggcgcagactcggacgcctcaagcgaggcctccttctacagtggaactgactctccgacacatgagaacggtgaacacagcatcgcgaagaagaatggttgagctgagttgaactgctttgattgctcaaactgagggagctgactaatgtagttggtcaacataacagttatatctagcttgaacgattgtcaggaccgatggcgatgacagattccaggctggttagatcaccttgtcgggtctaggcggaatgtatatttgctgctcatgatattatagtatgtaagaccataaacggtgagtttgtgatgcgctatatatcttggaataaagttcaacttcttcgttttcttactc

SEQ ID NO: 110808 - DNA, 1469 bp, Zea Mays
tcggatgaatcaagctttgattcgtgggcagacgagaagacatcaaatgaggaatcaggccaggacagggcacttaataagaagccagataagatcctaccttgccctcggtgcaacagcatggatacaaagttctgctattacaacaactacaacgttaatcaaccaaggcacttctgcaagaactgccagcggtactggactgcagggggcaccatgaggaacgtacctgttggcgccgggcggcgcaagagtaagaacgcgtcattgcactaccgtcaactactgatggcccctgactgtatgctggggcctagagtggacatatcaaagccagtgctccctgaaggtcttgcatcatctccacctgccccgacacagccagccagtagaaatggaacggtcctaaaatttgggcatgaggtaccattttgcgagtcaatggtgtcggcgctgaacattgatgagcagaacggcaacagccctggaggaccaacagcaagaggtgaaaacagggaagataataataaccctggatccggcacaccaccatacaacggtgtgcctgaaaccatggcccccgtcgtcggcaagaacggggcaccagttcattgtaacggggttgccccagtgcctcagtattaccttggaacccctttcatgtacccttggaatgtaggatggagcaacgtgcctgtgatggtgccaggtaaaagcatgcccgaacctgctcctgctccagagagctgcagtactagctcagctgtatggatgaaccctcccatgatgccaggctcaagacctcctcctagtccagcgtttccataccctctcgtgccacccgggctctggggctgtttttccggatggccagccacggcttggaacgtaccatggaccagaaccaacgtctgcgtgtcgccgccgccgccgccgccgctgtcgccgtcgccatcaagcaacagcagcagctgctcgggcaacgggtctcctactctgggcaagcattccagggacaccaatccgctgagagaggagaaaagagagaagtcgctgtgggttcccaagacgctccggatcgatgaccctgatgacgccgccaagagttcgatatgggccaccctcggcatcaagcccggagaccctggcactttcatcaagcctttccagtccaaggtcgagagcaagggccagaggtcggacgctgctcaggtcttgcaggcgaacccggcggcgatgtcgcgctcacagtcgttccaggagagctcttgacttcatacgcaaagtctgccttatatatagttttggtactgtaatccttacatgctggtagagttttgtggcatgcgaaaagtgacttcgtacctgaagcctatcttattgtttgtttcggtactgtattccttactacatgctagtagagctgtgcggtatgtggaaaggacaacagagagcttcttgtatagcca

SEQ ID NO: 110809 - DNA, 174 bp, Zea Mays
atgggctctgggcaaatgtcaatttttggtccctggaacaattccacaccaacatcattcccaccacaacaaccatggcagccatctctactctacgccgacctagctcgggaggaagcttctgacccatcaagcacccgcctccgcgagcagctcccgaagcgagctcggtga

SEQ ID NO: 110810 - DNA, 166 bp, Zea Mays
tattttaattctattttactcctcacatgtttttcatgtcaacaattactcaaacacttctttatcgtaaatatatacacatttatagaagtaattaaaatatttcctcattacacaagcctattaatattctactcggtacactaattccgctaattggccgaaa

SEQ ID NO: 110811 - DNA, 219 bp, Zea Mays
atgactccgaaagaaaatacatcaaatttttctgtgagcttgccagacgctgcatactcaggtgccaaatacccaaaggtgcccattactcttgttgaaacatgggtgttattattagtagtgaactttgcaagtccaaagtcagcaaccttatattcaaatttgaagtcaagaagaatgttagatgccttaatgtcgcggtggatgatctttggatga

SEQ ID NO: 110812 - DNA, 1137 bp, Zea Mays
atgacgcccggcgtcgaggcgctacatgcatgtggaacagacagattggtgttcaaggcactggagatggtggtctacttccgcactggcatccgcccacggttgtggaatgaaaccgacgcctcatggagggaagacacctgcgctgaagccgccgcttgtatgctgctgctcgtggtaggccgcgtcgtcagatggacgatggcgaccccattgtcggtcaatcggcgcagcgagcgcacctccccaatcgcagccacgaaatccgtgctgtcgcactacgccgccaagtggctcccggacgtggcgcctcccacgtcgccgtccgcgtcggggcacttcctgccgccagagagccccacggccacgtggctgaagaagcggctcctcctggagtccctcgtggccgcgctccctctggacccgccggcgggcggcgacggctgctgcgccgcggccgtcgccgacgatggcatcacgtgcgacttcctgctgaagctgctccgcgtggggagcatggtgggcgcggacgcggcgctgctgcaggacctggaggcgcgcgcggcgaggcggctggaccaggcgacgctgggcgccgtgatgataccggcgttcggccacagtggcgagcatgcgtcggcgctgctcctggacatgcccctcgtgctgcgcctcgtgcgcgggttcctcaaggagggcggcggcgcggtggccgcacgcgtggccaagctcgtggacgcgtacctggccgaggccgcgctggaggccggcctgcgccctgttgagttcgaggagctcgcgcgcgccgtgcccgcccacgcgcaccccgccgacgacgcgatgtaccgcgccgtcgacacctacctcaagccaccgtgtcagtgctcgtacacagtgtataagtgttcttgcgttgcaatcggcaaccgccatttctcgcagtcgcactggtcaaaagctatgagagaccattggtttggggttcgctcggagacaccttttcgtgcaggggggaaaggcaggggcggcaaagtctgtgttcttgaaccgatgatgggtagtgagggtgccttgggttgtagacaatcccaattcccagcccagcaggtcgggttcgaatctgtgctattcagatag

SEQ ID NO: 110813 - DNA, 953 bp, Zea Mays
atgtccgaatgtccactgatccattactcggcatggctccatctccggcaggcgcacccaggcaccgcgaaggaggagcgcaagtcactggcgtggctgatcgacgcgtgcaagctcacggtggaggccgcggcgcacaccgtgcagaacgagcgcatgccggtgcgcgccgtggtgcaggtgctcttctcggagcacgacaagctcaaccgcctcgcggagttgagcgcctccttcagcggccagcgcagccccagccctagccccaactcgacgctggagctccccagccgctgcccctccaagcgcgaggtcctcgtgcagcaccaggaggtgcgccgcctccgcgacgacgtcgctaggctccaggtccgtccgtcggcttgtcttgagttcccgagcccgcacatgtacaccaacttcggtggtgctccgactgacgctgaaacgtacgtgtgctctatgcagcgcgctgcaggcccaggtggacaggctgggctccgagaggcgccagcgcagcgggggcggcggtggcggcttcttcaagtggagcgcgttctggttcgacggcggcatggcgccgacgtcgctagggtcgatgactcagagagcggcatggagcgccggatgccacccaaggggaagaagagcgccacagcgacgcccaacgccaagtggcgcaagtccacgtcctgagatgacaggggtgttgtgttgaagggatggcgatcgacgactgttaatcgtgttttctgctttttggctagggtttgtgattcctctgagtttgaacatcatatgttgtgttgctgtcatctcgagtttgtgttcgtggtgatactatcaaactggaaattgtaccacgcggctgaaagcacctaccgctgacaggcagaagccatgcacgaatagattccaacatggaaaatgtaaaagtcgatgtttagagatgc

SEQ ID NO: 110814 - DNA, 1711 bp, Zea Mays
cgcgaaatgcatgccgtttaatttgatccgagcccacagtctctcctcgggcccaccgcgtccgaccggcgatggcaaagaccccgtcgttcgcggtggcggcggtcgccggaggccgcgggccggttcacaaccggacccagctcctcctcctcctcctcgtggccgtcgcagcctccgcatccacagcagggttcctcctccgcggtgccctgcgagacccttgcgacggccgtggggaccccgccgccctcaacaccgccgtcgccagcgggagtcccctcgggttcatgaggtccaagctcgtgctcctcgtctcccatgagctctccctctctggtggtccacttttactgatggaattagcatttcttctgaggcatgttggctcgcaagtggtgtggataacaaaccagagatcacaagaaacaaatgatgtcacatatagcttggagcataggatgttgaaccatggagtgcaggttttaccagctagaggacaggaggcagttgatattgctctaaaagctgatctggttatcttaaacactgctgttgctggcaagtggcttgaccctgttctgaaagatcatgttcctaaagtccttccgaagattttgtggtggatccatgaaatgcgtgggcattactttaaggttgaatatgtcaaacatcttccctttgttgctggagccatgattgattctcatacaacggctgagtattggaatagcaggactagcgatcgcctgaaaatacagatgccacaaacttatgttgttcacctggggaatagtaaagaactaatggaagttgctgaagacaatgtcgcaagaagagtcctacgggaacatattcgtgaatcccttggagtacggagtgaggatctcctgtttgcaataataaacagtgtatcacgaggaaagggacaagacttatttcttcaagcattttatcaggctttgcagctcatccaacacgagaaacttaaagtgcctagaatacatgctgtagttgtgggaagtgatgttaatgctcagaccaaatttgagactcagttacgtgactttgtggtgaagaacacgattcatgaccgtgtccattttgtgaacaagacattggcagtggccccttacttggcagcaattgatgtgcttgttcagaattctcagggccgtggagaatgctttggaaggataacaattgaagcaatggcattcaagttgccagtattgggcacggctgctggagggaccacggagatcgtcctggacggctcgactggccttctgcatcctgctgggaaggagggcgtggcgcctcttgcaaagaacatcgtcagactcgcaagccacgccgagcagagggtctccatgggggaaaagggctatggcagggtgaaggaaatgttcatggagcaccacatggctgagaggatcgcggcggtgttgaaggatgtcctgaggaaatcacaggagcactccaggtcttgagctttgccgtgcccatcagcttgcgctaacatgttgaactagattttacgggctacgcctacgtggttcaggctgtaaactgtagattgcactctgttggtctactttttcacattcatgttttacctattaggccatgtccgattctattccaattcatataggttctatttcaatccatatagattaagagggattgaggagatttcaatcttagt

SEQ ID NO: 110815 - DNA, 1896 bp, Zea Mays
ccgtttaatttgatccgagcccacagtctctcctcgggcccaccgcgtccgaccggcgatggcaaagaccccgtcgttcgcggtggcggcggtcgccggaggccgcgggccggttcacaaccggacccagctcctcctcctcctcctcgtggccgtcgcagcctccgcatccacagcagggttcctcctccgcggtgccctgcgagacccttgcgacggccgtggggaccccgccgccctcaacaccgccgtcgccagcgggagtcccctcgggttcatgaggtccaagctcgtgctcctcgtctcccatgagctctccctctctggtggtccacttttactgatggaattagcatttcttctgaggcatgttggctcgcaagtggtgtggataacaaaccagagatcacaagaaacaaatgatgtcacatatagcttggagcataggatgttgaaccatggagtgcaggaacagagagggcaccacacgcacggggagggacgaccgattcagctggtggccaggaaccaagcggggaggaactgggcatggagaaagcgtcatgcggggatgaggcatgggcagggaggaaccaagcatgtgaacagccagacagagacatggagtcaggcatggggcgcatggcgagtggggaaccgaaagaatggaaaatagaagccccctacttgacccgtgggaatgggctgggagggggtatccaccaaatccggggccaagttttaccagctagaggacaggaggcagttgatattgctctaaaagctgatctggttatcttaaacactgctgttgctggcaagtggcttgaccctgttctgaaagatcatgttcctaaagtccttccgaagattttgtggtggatccatgaaatgcgtgggcattactttaaggttgaatatgtcaaacatcttccctttgttgctggagccatgattgattctcatacaacggctgagtattggaatagcaggactagcgatcgcctgaaaatacagatgccacaaacttatgttgttcacctggggaatagtaaagaactaatggaagttgctgaagacaatgtcgcaagaagagtcctacgggaacatattcgtgaatcccttggagtacggagtgaggatctcctgtttgcaataataaacagtgtatcacgaggaaagggacaagacttatttcttcaagcattttatcaggctttgcagctcatccaacacgagaaacttaaagtgcctagaatacatgctgtagttgtgggaagtgatgttaatgctcagaccaaatttgagactcagttacgtgactttgtggtgaagaacacgattcatgaccgtgtccattttgtgaacaagacattggcagtggccccttacttggcagcaattgatgtgcttgttcagaattctcagggccgtggagaatgctttggaaggataacaattgaagcaatggcattcaagttgccagtattgggcacggctgctggagggaccacggagatcgtcctggacggctcgactggccttctgcatcctgctgggaaggagggcgtggcgcctcttgcaaagaacatcgtcagactcgcaagccacgccgagcagagggtctccatgggggaaaagggctatggcagggtgaaggaaatgttcatggagcaccacatggctgagaggatcgcggcggtgttgaaggatgtcctgaggaaatcacaggagcactccaggtcttgagctttgccgtgcccatcagcttgcgctaacatgttgaactagattttacgggctacgcctacgtggttcaggctgtaaactgtagattgcactctgttggtctactttttcacattcatgttttacctattaggccatgtccgattc

SEQ ID NO: 110816 - DNA, 313 bp, Zea Mays
aaatccaaaaaatgactaagatgtaaaaaaatggtggtctatttagtatgagtctgggccttaagcgagcccatgctgcagtggcctgttatcctcccaccgttaatagcgagcagtgatcgctgctctgtgaagacagcctcacgccgttcctgccactctaggtccaaggaagcccagggccttcgcccaagcctccaacggccactaccaacttggaacgggcaggccaaccaaggaacagcatgtgcccagaccaagactcggtaccaaacatccgcaccaccttaatgcccccacctgggttacaagc

SEQ ID NO: 110817 - DNA, 384 bp, Zea Mays
gcacgaacacctttccctcctgtagctggatccgcccatcagtgctcgccgccgtggcctcctgcgatgaccagctcgccactgcactgggcgcgccgaggacctcatcatgcggaggtggagagtaggggctcgatggggatgaggtgcgcgacggggctggagacaccggtggcggcgcagtggcggatcccgccggcggtggtggaggcgcggatccggccagtgggggcagtggaggaggcgcggatccggccggtgggggcagaggtggaggcgcggatcctcccggcggcggtggaggcgcggaccctgccggtggcggtggaggcgcggaccctactggcggggatcgacgcagtggtgcggccctcaacagcatga

SEQ ID NO: 110818 - DNA, 318 bp, Zea Mays
atgaccagctcgccactgcactgggcgcgccgaggacctcatcatgcggaggtggagagtaggggctcgatggggatgaggtgcgcgacggggctggagacaccggtggcggcgcagtggcggatcccgccggcggtggtggaggcgcggatccggccagtgggggcagtggaggaggcgcggatccggccggtgggggcagaggtggaggcgcggatcctcccggcggcggtggaggcgcggaccctgccggtggcggtggaggcgcggaccctactggcggggatcgacgcagtggtgcggccctcaacagcatga

SEQ ID NO: 110819 - DNA, 125 bp, Zea Mays
cacggtcaggcacgacacggttagggcacgacccgtttggcccgtttaatagccgtgtcgtgccggcccgtttagactgtttagcccgtttagcccgtttagcactacaccacagaattttagtc

SEQ ID NO: 110820 - DNA, 875 bp, Zea Mays
actcagttccactccaccccgcgcgcaccaagcgattgtgagcactgagcacggcggccggcgaccggtaagaagtgccaagccagaggcaagctccgtcgttcctgctactcgcccggaccgagcgcaggctgctgcaagatccatggccgcttccaactccagcgcgcttctccccgtgttggccctcgccggcgtcgtcttcttacttgtcgcccccgccgtcgtcgccgaggcagccgcgccgcagggcctggagttccacgtcggcggcccgcgcgggtggcgcgtccctgacgccaacaccagctacggctggtggaccatgaagaaccgctttcgcgtcggcgaccacctctacttcaagtacaccaacgactcggtgctcctggtggaccgcaccgccttcgacgcctgcaacaccacggagccgctcgcgaccttcgacgacggcggcaccaagttcgttctcgaccgcccgggcttcttctgcttcatcagcggcgagccgggccactgcgaggagggacagaggctcatcgtgcgggtcatggtccagccggccatcgtcgcgacgccaggcccggcctccggaccagcgacgtcggcgcagccggaccacggcggcggtcattcctccggcgcagccacagcggttgccgcggctgccgtcgcggcggcgctggctgtcttcgccagcctcgtctagtcgtcttgatttgatgcatgtcttagttctgcttatagtttggttcctgtggcttttacgtattcaccactcgtgatgtatctggttctgtgttgccccaagacaattagctagtaactcctatgtgatgcgatccattgttttatatttggattattttgcaaga

SEQ ID NO: 110821 - DNA, 354 bp, Zea Mays
atggcaccgccacgagtggaggattccttgtcgcagttgatggcgaagatcgacgaaggcagcaaggagacgtacaggcagatagactccatgcagtccgccatggagaagatggagaataccatcaagggcatggtgactgatcggagcgacttcaagaggtggagattggagatcaaaaccaaggtggtaaagatgacagaagacgctccagggccaggtgaacgcgaagtcgagtggggaatctcctgttttggtggatccgatgaagccgaagcctactggagggatggtgaccacgtcgaccggagaaccatcggtactagcgagtgcgtcggcatcgatgacacctga

SEQ ID NO: 110822 - DNA, 1197 bp, Zea Mays
ctagcctcgaagcaattcccggtcgcgggtctagtactgtagttctctactctccgcaacttgggagttcaaacccccccgcgcgcgctcggaggtctacaagcttctggatccgtccctggcgccgatggagcggttcgactccaagttccacgagaagtacactgttctcaagaagaggaagctgctagacgaggggctagagcgaaagcgagaggcggagctcaaggagctttacgatgccatgaaagattgggtcagcgaactcaagaaagacaatgcggagctcaacgataagctaatggaaaagcaggatgagctcgagaaggcccgtcaggaattccttgaagatattcttacaagggacactgaaattctgaggctgaagcaactcttagatgagaaagctgaaaaaaacaattctacagcttctgggtttcattgcttaacacctgaagctatcctagaaaattcaacttcaatgtcacctaaaagaaaaacaccactttcccacggcaaggagaagagggtacagttgagtgaaaatgctcctcacagtagccccgcaaaggaatctcaagagctagtttgttctagaagacgtacatgcatcagagggaatgggacaaatgaaattcggagtgcgcatatgcttcgtttgcttcttcaatctttagttcgcatgaaggtctcagtaaatgatgaatcagagatattttcggtttcagtctctcatgaagctagtggttacagcttcaccctcacttggttagaaaaatctgatgaatggtcatataagctctcgtcgttgggcaccctgggaaggatagccgctgattggatgaggcaagacataagattcagcacgaaaatgtgccgtatgttcgttgagcggatatcaagcatcataacaaaaggatgacggcatgctattcgcttcagctagctgtatcagtgtgctaaggctatatggccagcagactgtgcaaaacactgttgcaacagagtggagtttggaatagaggatgggtttgtaaatgggacatccgtaaaaattatctgatgcaatctcattgcgtaaccccgattatggcgtatgttctcgagcgttcgtgggctaggatgatcgctgaggcgtttggctgttttcaaaatgtttttcaaaatacttttgtctatatgatttagttgttttgg

SEQ ID NO: 110823 - DNA, 1440 bp, Zea Mays
ctagcctcgaagcaattcccggtcgcgggtctagtactgtagttctctactctccgcaacttgggagttcaaacccccccgcgcgcgctcggaggtctacaagcttctggatccgtccctggcgccgatggagcggttcgactccaagttccacgagaagtacactgttctcaaggtagcgcgggcacgcccgcttcttcctcatcccatttctgtggcgcccgcggtggtttgacaccgcaaattttgttttccggttaatctattgccgcaccgcagaagaggaagctgctagacgaggggctagagcgaaagcgagaggcggagctcaaggagctttacgatggtacaagtcccggccgaacctatctccgtgctggactcgatttgggcggaactatgggaatgggagggagggttttgggcgaagcgcttgttctttttccctgctttgatttttcccttttgttttgatgattcagccatgaaagattgggtcagcgaactcaagaaagacaatgcggagctcaacgataagctaatggaaaagcaggatgagctcgagaaggcccgtcaggaattccttgaagatattcttacaagggacactgaaattctgaggctgaagcaactcttagatgagaaagctgaaaaaaacaattctacagcttctgggtttcattgcttaacacctgaagctatcctagaaaattcaacttcaatgtcacctaaaagaaaaacaccactttcccacggcaaggagaagagggtacagttgagtgaaaatgctcctcacagtagccccgcaaaggaatctcaagagctagtttgttctagaagacgtacatgcatcagagggaatgggacaaatgaaattcggagtgcgcatatgcttcgtttgcttcttcaatctttagttcgcatgaaggtctcagtaaatgatgaatcagagatattttcggtttcagtctctcatgaagctagtggttacagcttcaccctcacttggttagaaaaatctgatgaatggtcatataagctctcgtcgttgggcaccctgggaaggatagccgctgattggatgaggcaagacataagattcagcacgaaaatgtgccgtatgttcgttgagcggatatcaagcatcataacaaaaggatgacggcatgctattcgcttcagctagctgtatcagtgtgctaaggctatatggccagcagactgtgcaaaacactgttgcaacagagtggagtttggaatagaggatgggtttgtaaatgggacatccgtaaaaattatctgatgcaatctcattgcgtaaccccgattatggcgtatgttctcgagcgttcgtgggctaggatgatcgctgaggcgtttggctgttttcaaaatgtttttcaaaatacttttgtctatatgatttagttgttttggatt

SEQ ID NO: 110824 - DNA, 2332 bp, Zea Mays
gtggcaagctgcagtttttctcactgcagaagggccccactcgtcatccaaagattgattgaaggggaaaatttctcgccgacggcaggtgcctgatagatctatatatctatccccgacgccaccgccgcccgccttgtcctcgctcagatccaaatccgaatcccgatccgcgcgcgcatggatttcttcagctccgtcttctctgcccctgccaaggaggatggtgaggagccgcagcaggagggcgaggaagagccggcggcccaagagtccggcggggggtggattttcggcagcctgatcgatacgctcaaggaggagatcgaggagcagcggaaagtgaatgagtcggccgccgtcgccgcggaggcggaggaggcccagaggggtgccgatggagaggctgtccccggcagcgggtggatcttcggcgggctgatcaagacgctcgcggaagagattgaagcccagcggaaagagcaggaggccattgcagccgccgcggagtcggaggagctcgagcggggagcggaggctgatgcggcggcggctgcaacggcaacggcaacggcagatgaggagggagaatcttctggcggcggctggagctttggcggcctgatcaggacgctcgcggaggagattgaggcgcagcgcaatgagaatgagaaggaggctgcctccacggcggaggaggacggagagcagggaatcgatgcggaagtggcggcggtggatggggaggagggggcgccggctggggaaagctcagacggcgggtggagcttcgggggcctggtgagtacgttcgcgtcgcggtcggagtcggtcctgggaggctaccgccgcgacctcgaggacctcggctcggggctccgcctcgagacggccgcgctccgggccgccgccgcgcgcgccgcctcagcgctacctggcgcgctggaggccggcgcgtctgtcgcctccgacaggcttgagtctgtcggccaggccgttgacgacctcggtgccgccgccgctgggctcctctcgcatgccaacgaggccctccggtccgctgaagctgacggtgttgatggtgaccgtgctgcccgcccctccgacggctctgtttccagtgcgtcctggcgcgcttccttgccgaccaagaagtataccaggttcgaggcccaggtcttggcgttgcgtgcggaccctgccacgttcactgaggagcctgaagattctgagggctttggtaaatggagtgccttgttctcaattgacgagatgaaggaacagatagagacggtgctccatgaaagccctggattggagagctttgtggagaggcttgtgccgtcagttgtggattacgagacattctggtcaaggtatttctttgctgtcaataagctcaagcaggcagaggatgtccgcaccaaacttgtgagcagggccatgtcaaaggaggaggatgaagaactcagctgggatgtcgatgatgatgatgttgaagatgccaatactagtgatcacaaagacagcacaaactcgttggtagataagaaagaggagcaagcagcggagcctgttaactgtgaaacagagggcagtatggaacaagaagcagcagctgaaaatgatttggccgacgataaggaggttgctttggctgcagccaaggatggtaacggtgaatcaagttttgaagcatcgactccaaaggcaagcaatgggaccagacaagaagagaagattgaggctgctgactcatctaaggggggtgatttctcagtggtgcctcaaccattagtgcaggaggaagatcttagctgggaggagattgaggatgttggcgatgaagatcagaagaatggggttagcaaacggtcaagctctgtcagcaaagtggaggatctccggagacgtcttaattctgtggaagatgatgatgaggacctaagttgggatgtcgatgagtagaaagaacgtgtggagccctgcactgagttgtctgaaggacttctaaattagagagactgccatcctaagcataaattgaatctgtatggtgccgatgaagaagctttgtggatggattgccacaatgtgaatattgtgatggacactggtgattcaaattcagtgggggctcattagtttccttgcaagaactcgatagaatggtagtgttttttctgttagtgttggtaatttgtttccagttagcatacgtttgttgcaagtccaacatgtaccaccttcctgtttgaatatgacacatagttcatttcagattcacaaagtaaacatcgaaattgtgaaactattgatccaatgtgcttgc

SEQ ID NO: 110825 - DNA, 149 bp, Zea Mays
aatttaattttagctaggcgtgggatgcacgtgggaatgggatttgcgggaacactggcagaacacggaatgacagccgggaatgagaatggactttgcggggaggggagaatgagaaagacagtgcggggagggggaatgagaatgac

SEQ ID NO: 110826 - DNA, 2345 bp, Zea Mays
tttttattattatattattattaaatggcctaaacggccaggacaatacaaggccgttccttatcttatccggaaatgccctggcgcgctagtgaccggacctgacctgactgggacatccagcaccggaacatggggtgcgcacgctggccactcgccagcggccgcccaccgtcctcctgctgcaccgcactgcagcagctcacgttcctcagggtcacaggcgaagcgaaccgtgaacccgcctgtcggcatccggataggacgtgggcttgacaggccgaggtctagtcgttcgttgatcggcgacgggcgacggatgaggcggcgagccagagaaaaataagggtccgtgggatcgtgggggcaaggccatctcgagttgtcggcgcggagcccgcgccgctggctcgtaacacgagaaaatgtgccggtgtcgattcggctgggcgcaccttacttgaagggaaaaaaagttttggggtgcctgccacgaactcgttttccgcttccgtcgagagggaatatcgaccgtatcgcatctgggacgtgggcagtagaaaaatgggggaataatgtcgtcgtacctataggatatacatataccggcggtgtctcgtgctgatgcgataccaccttctcctacgcatgattcaagtcccagtttatcgctacgctacgcactcgcaactcgaatacaaaaaaccttgcgcgggaaaagcatccatggaccactcgactgaggatactacttttaagtggggttcgagttcgacggccgctctgtggtggggattgcttggtgggatcagcgctagtggcgcaccaaggcgtaaaaaaaaaaaccgatctccaacaccaatctctagagtggatgatccgcattgtttttttgcttacatctttaatctttcttacattttgcaaggcaagacaatcgaacacaggacagtgagtaaactaatataaataacaaagaaagcaatggatttctttcgtcggaggagggccctcaatcacggcgcgggggcgaaatatatttgatgcgcgccgagccgaagccgagccgaaaccggatgcatggaacaataataccaggcggtgcagaaaaagagaagaacgaagagggaaaaaccatggcccctccctgtgacgccttgttgatcaggaggtgttgacctggcggcactgcttcctgatctggccgtttgcgccggtgagcacgtcgacgcggcccatcttcttcatggacatggagaaggcggcgtagaacttgatggggttggtgaggtcggccaccatctgcgcggcggcggcgttctgcgccagcgcggcgtcggaggccagcgtgccctgcctctgctgcaccctggtgtagtacccgctgtcgaaccggaacggcgtgccgccgtccagcgccacggtggccgacgccggcgacgggttggggcacgacgacatgagcgtccgcgcgtaggccgagtccagcagcgggtccacgctgctggcgttcccctggtacaggcgcggggtgacgctggagcagcttgccacgccgatggtgtgcgcccccgacagcgccacgaggtccgtcaggttcagcccccggtccgagaagctctgcagcaggcccgcgaagcccgcgaagggcgacggcagcgcccccgtgttggacgccagcgacaccgtgccgtcgcgccgccccgtctccacctgccacagcgacgccttgaactggtacgacacggcgtcgcgcgccgccagcgccacgatgtcggcgcacgacaccacgcccgggcacgccctctccagctgcgccttgatcgcgtcgatcacctcgtacccgcccaccgacaggttcggcgccgccgtcttctcgctctgcgcggtgtccagcaggatcgacgcgtcgcagccctgcgtcagaagcagctggtggtcagttgcaggatggggtcacggcgttggcgaccgacgaacgacggacgcgacaaggacaggacgcggcacgaacgcgcccccgtccctcccctcccctcccctccccaatcgacatccaagccgaccgccgtacgggagagcggggtccgggggggcaaaatgacaagattcgcgttgcccccggcgcggcgtagtagtactagtacgtggagtattttctttttttcccccgtcgtcctgtcatgtgtctgtgggcgcgccaacccgaggaggtgttgccgtaatgcttacgtattccgcgtaagagcagaacacgaggagagagggtcgacttcaacactgctgttctgcagcgctctgctttgtcgtcagtaaaaaaaccgacaaaagtgcgcttggtgccc

SEQ ID NO: 110827 - DNA, 227 bp, Zea Mays
ttccttgccctcgttctcagcaatgttgaagtaccgcagctcatagacgtttggtccttgttggctgcaatcacacggagccaatctcgcaccttgtgcttcttcaagtacttcttggtcaagtactttagatacctggtgacaatagataaggatactatcagactaaaccgaacagattcagtatgttatattagacggtaagaaacaacaggtatcttttgatt

SEQ ID NO: 110828 - DNA, 211 bp, Zea Mays
tttgagtttatgtgacttattttagaaacttgagctcacaaactttctcttatttggtctctgtatggtggaattatgtcattttataatctctgttcgttcagttagtcgttgtgaactctcttctaatcgctcacttcattggccgtgttgtaccatgatatattgcatggagtaaacaataacatcagttaatcaaattaaaaaaaca

SEQ ID NO: 110829 - DNA, 2712 bp, Zea Mays
aggccgatagtggcacgggttcgcgattgggcggcagcgtgctgcgacgacgggaggtagtgtgccgccagcacggtgaactgccgctcgttgttgcggtactctattgatccctagatttcacaacgaacatggcggaggcggctgccgattcctccaactcggccgtcgatggcggcggcagtaacgtccaaaacgactatcccaccattgaccccacctcgttcgacgtggtgctctgcggcacgggcctcccggaatctgtcctcgccgccgcctgcgccgccgttgggaagacggtcctccacgttgatcccagcccgttctacggctccctctactcttccatccccctctcctccctcacctccttcctatcccctgaggcctcccctcccacctcgtccgcggcggccgccgcctctgattcgcgcaccgtcgtcgatctccaccgacggagcgtgtactccgatgttgagacttcggggacggtgccagagccggctaggcggttcaccgttgacatggtgggacctcgtgtgctgtactgcgccgatgaggcagtggacctcctcctgcggtcagggggcagccaccatgtggagttcaagagcgtggaggggggcagtctcctctactgggagggctgcctctacccggtgccagactcgaggcaggccatcttcaaggacaccacactcaagctcaaggagaagaacatcctcttcaggttcttcaagcttgtgcaggcacacattgctgcagcatcagcttcatctgatgagacgggacagggggatgcatctaccaagatacccgaggaggacctagatctcccctttgttgagttcctcaagaaacaagggcttcctcccaagatgagagcggttgtgctgtatgcaattgccatggtggattatgatcaagatggtgctgacccttgtgacaaactgactacaacaagggagggaattcagaccattgctttgtactcctcgtccattggaaggtttgctaatgcagaaggcgctttcatttatcctatgtatgggcatgctgagctgcctcaagctttttgtcgctgtgctgcggttaagggtgccctatatgtgttgcggatgccagtggttgcacttcttatggatgaggaaaagaagcatttcttaggtgccagattggcatctggtcaggatattttgtgccagcaattgataattgacgcgtcttataagattcctaccttggatgtcccatttgatggttcagattcttggaaagttgtgaggggggtatgcataattagcaagtccgtgaaacagggatcatcaaatgttctggttattttccctccaaaatcgctagaagaacagcaggttgcagcggttcggcttcttcagttgagcagcaatctcgcagtatgccctcctgggatgtttatatcatatctgtctactccctgtaccgatgtctcagccggaaagcaatccataaaaaaagcaatagacactcttttcagtcctcaggcttcagatggttcagaaggccattttgaaaccaccaatgaaagcactgaggatgtgaagccaacactaatctggagctgtttgtatgttcaggagatcacacagggaacatctggttctttattgtcatgccccatgcctgatgaatacctggactacagaaacgtactgggatcaacaaaaaagttatttgcaagtatctatcctgatgaagagttcttgcctaaaaagtcagctcctgtatatgctgatgatgcctctgattctgcagagtaaaaccatctttctaaagggctttatcatttggttgaagaacgccgtcattcgaagatgcaggaaggcatcgttctctttctcgtggtgttccttgaagatcagagggcaaatgagcgtcgcaagggggagcctttgggtttgatgagcagatgtgctggatttccaatgtacaggtggccactggctggtcatattgcatttgtggggaacagttggagggagggatgtgcacatgtggtattcacgaaatgctatgtggacacattctggcgatgctcgcaaatgaccttgtattggctgcctggctggcaaaccttgttgtacacaggatcacagcaaatacgggatacatgctgaacgctcgatatgattccctagttaagacatttgaatgagacagggtagaagggtattcaattgacttctttctctgacttcagtccagctcgatacatgtggattaagatgaatactagaatacctaaacaaagcctggaggtaattaaactgttgcgtgtatttttggtagactaaagcggtgagattttggtcttcaccttgcagaattgggtacccttgcacgagcctatgtaatgtgtttttttatggattagtcttttttcgcaacagtttttttatttgttgatgatttatgaaacatcggtgttgcatctatttctacaagaactatcgtatgacgacacgggaacatggggctcattgcacaaggtcagaaggatatctggcccaatgagattccacgtcagtaacggttcccatctatagcgatgtaattggccaccctttgcccgtgcacaaactatacctacaataaaagcatcttcaacagctcctaaaaaaatagcttctaattgggacatccttaaaagcttttgctctaaacaaagactgc

SEQ ID NO: 110830 - DNA, 441 bp, Zea Mays
atggcgcctccaatgtcaggatccaccccaatcacccacccgttggtggtggcgtcagcactggggatgtcgtcggtcggaagcagcgagagggaggcgagccaggggtcccgggcctcaacctccgccaggagcttcgcccgggccttggcactcgcgcgggaccgcggggtacgcgcggcggctgcaggagcgggcgcgcgacggcagcggcgggggcggaagggtggggaaaagaaggaagcggcggctgtggaccagtgcggcgcggagcggcggaggatgcctgtgccgagagccttcataggttcttggctggcgacggcggctgatgcagctccgcccgcggctgcggcagctgccataattcgaaaggctgcagcgggttttgctggttccgcggtggggataagagcagagcaactccaaaaagaatgttaa

SEQ ID NO: 110831 - DNA, 893 bp, Zea Mays
ctcgaccgccgcgctgccaccgcagcgctcgacgcctcatgacacaccctgcccggcgacccacgacctccacggacaccgccgagatcgccttcctcggcgccactgctatccccgacccgcagtccacgctggccaccccgatgccgctgccggagatccccttcctgcacacatcaacgccgcccccgcctcctccgccggcgccagtcacacaaaagcagaagcacggcagcggcaagcagcggtcgcgaccggggcgcctcatgcggtcggtgcgcgccgcgttccggtcgttcccggtcatccaggcgccgtcctgccgcggcatgccgtcgctgcacctctcgggcctgcagggtgccggtgtccggagccacttccatggcgcaacgcacgccacggggacgttgtacggccaccgccgggcgcgcatcaccatcgcgttgcacgagagcccaggcatgccgccatgcgtgctgctggacatcggcgtgccaacggccaagttcatccaggacgtgagcgcggcggggatggtgcgcgtcacactcgagtgcgagaagcagcatcacgcggtcgacgcgggcatgcggcggctgctcgacgagccggtctggacgaccgaggtgaacggcgagagcgtcgggtacgcgtcgcggcgggaggcgacggagcgcgacgagtgcgtgatgcggatgctgcactccacgtccatgggcgtcggcgtgttgccggccgacatgacccacccgtccgacggtgagctcacctacatgcgcgtgcattttgatcgcctcgttggctccaaggactccgagacgtactacatgcacaaccctgagggcagcgcaaccgggccggagctcacaattttcttcattagaacttag

SEQ ID NO: 110832 - DNA, 348 bp, Zea Mays
atggagtcgcagcggagcttcgactccggcaagaaattccctcgcgcaggacaccaatcagtcgaggcgagctcccaatcatacccagcatggcccgacgatgctcccgcgcagtggatttggttccttggtggggactggtggacaatcggtgttcaaccgcggcagaaatcctgcaactctacgacggctcgcatgtggttcctcctgttggttaatagcggaataggagaagagaatagcatggctttatgggcgagattaatgtccgagttggccggtccggagatcaagcgggatcccaacaacccagcacgaaagaagctccacgacctgagtccgtcctga

SEQ ID NO: 110833 - DNA, 348 bp, Zea Mays
atggagtcgcggcggagcttcaactccggcaagaaattccctcgcgcaggacaccaatcagccgaggcgagctcccaatcatacccagcatggcccgacgatgctcccgcgcagtggatttggttccttggtgggggctggtggacaatcggcgttcaaccgcggcagaaatcctgcaactctacgacggctcgcacgtggttcctcctgttggttaatagcggaataggagaagagaagagcacggctttatgggcgagattaatgtccgagttggccggtccggagatcaagcgggatcccaacaacccagcacgaaagaagctccacgacctgagtccgtcctga

SEQ ID NO: 110834 - DNA, 2179 bp, Zea Mays
gcgtctctgcaagtctgcactcggacggacgagcgaggcagacccgcaggtcgcagccacaacccaagcgcagcgctctgcctgcctccgctccggctcagctcccgccctgcctccgccttccattccaccgcgcggcgctgccgagtgccgacgtcgtccccgccggagtttctggttcctgggttggatctctcggagtcggagcgagcgaggatgggcggcggcaacggtgaaaccacccagctgggggagccactgctggcgaagaaggcgaaggcgtaccgccctaggtgccccggctgccgggtggaccgcctcaacgcggagcgggagggggtcttccctctcaaggacctcttcctcatctggctcgtcaccatcacctgcaccctaccgatccagtctctgttccccttcttgtatttcatgataagggatctgcatattgctaaacaaacacaagacattggattttatgctggttttgttggcgcttcatatatgtgtgggagggcagtctcctcaacagtatggggaatcgtggctgataagtatggaaggaaaccagttatcgtactgacccttattgcaatagttatcttcaatactatgtttggactaagctcaaactattggatggcattaatcacacgatgcctgcttggaatcatgtgtggttatctcgggccaattaaggcttatgctacagaagtgtgccgaaaagaatacaatcatctggctttggcagttgtttcttcctcacgaggcattggtctcattattggtccagctattggtggttaccttgcgcagcctgcagataaatatccaagtatattctctcagacgtccatatttgggaggtttccatactttcttccgtgcctgtgtatatcaatccttgcagttattgctctaattgcctgcatctggtttccggaaactttgcataaacacaatggggatgccgttgataattcagttgaaaccgtagaagaatctcttgctggcaccgacactgaagaaaatggaggtggcggatgtctaaaattatttacaaactggccgttgatgtcagctattactttatattgtatcttctctcttcaggatgtggcttatgcagagacattctctctttgggctgtcagtgacagatcgtttggtggattaagctttactaccacagatgtgggcaatgtccttgcgatgtcaggtctcttcctttttctatatcaaatgttgatctatccgttccttgccaaaacggtggaccacatcacattagtccgtgcagtggcgttattgactctaccggttcttgctagctacccattctttccttcgttgtccgggttcgggctcatggtggtagtaaattgtgcatcttttctgaagaatacattctcggtaactaccattaccgtgttcaacattttgatgaatgaagctgtgactcaggatgtaagagccgcagccaatgggatagctgtaacactaatgtccatctctaaagcggttgctccagctgttgcaggaatcatattttcgtgggcccagaggcgtcaaacagctgcatttcttccaggcgaccacttggtgttcttcatactgaacatcttcacgttcatcggtttcgtcttcaccttcagaccgtttttcgttcgaggcagtgccaagcactgaaacatggatgaaccggacgacgacccatggtatcctatccaggggcaatcgaatataaattttcttccggcgtggccaagggaggtgccgagtctgtaccagtacgacgactcaggccagaacacacggcgtatggtatggtacacagcaaggccgtgttgttgctgtaagttttgtaatttctgtttccttctcggcttcgcagcatgcagttgctgtatatgatggaagaacactctgttactgggcatgttgcgcggtttccacgcgtgtaagtaatgtagaagtcgctatggtaggtatttccataccgtcattagtggatcattgattttttttttgtaagaaggttattgcaatgccctttttccgggcatgaataagaaaaaggaaatatgcttatatgcatggtatgaataagtgagcaatagacttgtactgtgttcttgatttatttaaaatcagactaagagaactggtgacattttaa

SEQ ID NO: 110835 - DNA, 741 bp, Zea Mays
gtcattacccatttacctcagtaccctttgttttggtttgagaaagcttggagcaagtctcatcagcaaactgctgcacatgactaatagtgcacatatgtctagtttgttgtaataattagtaatatatgctaaaacgaagaacaatatctgaggcatgtgaatgaaaacttacttggaactcagttatttgtatattttaaggtttgatggtctattgtactgcagagagagctagatatacttatgtatatgtattttgacaggtctcttcctttttctatatcaaatgttgatctatccgttccttgccaaaacggtggaccacatcacattagtccgtgcagtggcgttattgactctaccggttcttgctagctacccattctttccttcgttgtccgggttcgggctcatggtggtagtaaattgtgcatcttttctgaagaatacattctcggtaactaccattaccgtgttcaacattttgatgaatgaagctgtgactcaggatgtaagagccgcagccaatgggatagctgtaacactaatgtccatctctaaagcggttgctccagctgttgcaggaatcatgtgagtattcacttttcacgtctcagtatttgacaaaatctactgctgtttctttgctgaattatcccttgatcgtggctgttgttctttttttcctctgtagattttcgtgggcccagaggcgtcaaacagctgcatttcttccag

SEQ ID NO: 110836 - DNA, 114 bp, Zea Mays
gtttaacatcattattaatcagttattcctttatttaaaagtgtggtggccgtgctgctacatcccttctttcccaaagcaaagatcaggtgcctgcatcagacaatgcaagag

SEQ ID NO: 110837 - DNA, 408 bp, Zea Mays
ggtggacttccggatcgttcttagggattttgcccgaacttcggtaaaggcacctgatctttgctttgggaaagaagggatgtagcagcacggccaccacacttttaaataaaggaataactgattaataatgatgttaaacaggaagggtcaagtctagggaattattacattctaatctttcatggtagttgaactgtttagtttggtgggctgagttgtctatcttttgtctggtcatgaatgttcatttctaccgctgcattttgattatactatgtcaattatctttcttttatatcctgtataaactatatgcttcccttgttatgctactttcaagggaggtgctgccggatttttgcaatactttctttctctatgtgttgcataagttttgtagaaagg

SEQ ID NO: 110838 - DNA, 1267 bp, Zea Mays
atgctacccttcgcgaccacctgcgccgctgccatcgccaaatcgccggtgcttcaaactataaattctgagtgccagtgcctagactgcttcgagcagcatgacccggtgttcgaccccgtcgtgtcctcctcctaccgcaacgtcacctgcggcgaccagcgctgcgacctcgtggtgccgcccgaggcgctgagggcgtgtcgccgccctgcggaggactcctgcccgtactactactggtacggggaccagtccaacaccaccggcgacgtggccctggagtccttcacggtgaacctcacggccccgtgtgcgtcccgccgcgtggacggcatggtgttcgggtgcgagcaccgcaacccgcgacctcttccacggcgcggcggggctgctggggctcggccggggcccgctgtcgttcgcgtcccagctccgccccatgtacgggcacaccttctcgtactgcctggtggagcacggcagcgacgccgacagcaaggtggtgttcggggaggacgacttggtgctggcgcatccgcaactcaagtacacggcgttcatgcccacgtcgtcgccggcggacacattctattacgtgaagctcaagggcgtgttggtgggcggcgagctgctgaaaatcagctcggacacgtgggacgtgggcaaggacgggtccggcggcacgatcatcgactccggcacgacgctgagctacttcgtggagccggcgtaccaggtgattcggcaagcgttcgtcgatcgcatgagcaggttgtaccctctgatcctggacttcccggtgttgaaccgtgctacaacgtctctggcgtggagcggccggaggtgccgaagctgtcactgttgttccccgacggtgccgtgtgggacttccccgcggagaactacttcgtccggctggacccggacgacatcatgtgcctggcagtcctgggcaccccgcgcaccggcatgtccatcatcggtaacttccagcagcagaacttccacgtcgtgtacgacctgcagaacaatcggctgggcttcgcgccatggcgttgcactgaggtgtagtgtatagccgccggcgaggcctcctgagactgagaggaagaacaatttgaactcagtcctcgtgtgattgattggattgggaggtaaattgggtgtagaattttttggttgggaaggacggtggcacgtacgcaagctctaatacatagtttttttttgcatttatctccaaggagagaaggttaggaatcta

SEQ ID NO: 110839 - DNA, 827 bp, Zea Mays
atggcacgatatatgaagactggaggttttcctatcctcctcaatattttgaaagaagaccgtgaggatgtagagcttgtgagaggtgccctggagacctttatgagtgcattgactcctattgagacatcacaagggccaaatactcagcttcagccagccgaatcctgcagcaaggatgtctccatcgtccacgtcgacatgcacaactatagccttgatgagaagatcaggatgacgctcgaggcgcacattgtcgagaagaccgacgaggtccatgaggtttcttttgtagatcgcatcacagagaaggatgggacagtgatgaggctttcagatggtgggcataagtgcttttgggatagtgataaagcaagattaagattcaaacggaagttctgggagaaggttgtggagatagatgatctatgtggaaaggatggtgcatggtggggtattaaaggttacatgcgagacaatttcaaccatagcaataaggtcacctcgcaaaaagagcattttcagaacagtaggctcgtgaaatttgtgttggatatgtattgggagcttcgtcctgttaccagttcatccttaacacaccaaacaaggtatgacccaacatgtgcagttgacccatcattgaagatggtcacgacgccttgtttcgaagcctagcgagattggatgcctcagtgttcaattgttacatgcacatggtatttgtgcagatttcaggtttaatgttgagcacatacaatatttaaaggttttccgtgttgagcttgttttacttttggccaactgttgatagtgtttttttgtacaaa

SEQ ID NO: 110840 - DNA, 487 bp, Zea Mays
aagtaattgattagtcatattaatagatcgcgaaggagatgatcaaaaagagctattacaaattgagccatcatggcggccaatcaaaccaatagggaaacaatccgatcatcacatcatctcctcaccgaaaaataaaaccaaaccatttaacaaacaagcagaaggggccgtaggatcaattgaggacgcacatcagatctccaaggtgaaagagggtgtgacatcatagagatgcctcagatgcaaattacccatatcttgtgtctcctcatctgcatgaccgcatcaaatacaacggcccccaaaaattccacacaccagcgtcggagaacagaagcgaacaacgagataaattgaagagaaaaagctaaaacgagggaaatggatgcaaccacaactgttcaactgaaaccgccgcagccgcagccatcgaacgtgatgcctggaagaaaaaattgaaggggtcacaggctgcggcggctac

SEQ ID NO: 110841 - DNA, 1673 bp, Zea Mays
caacaaacaagcatcaccatcgacggggcgagggtacacggaacaccagccgtccgatccatatcgacggccaggtaaatcggaggaagcccggaagaagtctccttccagcaccacccttctctcctccgcatccccccggccggttcctccttgccgccgccgtcgctgtgccaagccttgcgaataaccgttgtccgggctgtggggggcagacatggcgctccggaggctgctgcaggggagtgtcctgccgcgggtaaccggcagggtttcggcaccggccgtggcgccgttttcaacggagtccggagagaccatccgtgccacgctctttccgggcgacggcatcgggccagagattgccgagtctgtcaagcaggtattcaatgttgcaggggtaccaattgaatgggaagaacactatgttggtacagaagttgatcccagaacagagagttttttgacttgggaaagcctggagtcagtgcgtagaaacaaagttggcttgaaaggtcctatggctacacctattggaaagggtcatcgatctttgaatcttacattaaggaaagaacttgggctctatgccaatgtcaggccttgcaacagcctcccaggctacaagaccagatacgatgatgttaaccttgtgacaattcgtgaaaatactgaaggagaatatagtggtcttgagcatcaggttgtgagaggtgttgtagaaagtttgaaaattattacccgccaagcaagtttgagagtggcagaatatgcttttcattatgccaaggccaatggccgggaaagggtctctgcgattcacaaggccaatattatgaggaagacagatggtcttttcctcaagtgttgccgtgaagtggctgagacgtaccctgaaattcaatacgaggaggtcatcattgacaattgttgtatgacgcttgtgaagaatcctggtctttttgatgtattagtgatgccaaacctctatggtgacatcattagcgatctatgtgctggtttgattgggggcttgggcctaacacccagttgcaatattggtgaaggtggcatttgtctagcagaagctgttcatggttctgctcctgatattgctggcaagaaccttgcgaacccgactgctcttatgctgagtgctgtcatgatgttgcgccacttgcaattcaacgacaaagcagaccggatccacaacgccatcctccagactattgctggggggaagtacaggactgctgatcttggtggaaaggcatcgacatccgagtttacaaatgcagtctgtgatcacatctgagaatcggatgtggttctttccttctgattgttctgtcttcctaatatctttttgtcgcatatggggaggagctttagctttaagaggttaactggcagcacctcgaacttctttgggtggttaacacggtttgagaccgtcaaatatttttgtcacatatcttgctgtccagaaattttttcaacttcagaatcgagtaaataattctgtaatcaacaacagcactacagcagtaggtagggtttatttcattgtcgttcttgaaatattgggctaactggttagaataccagttgggacatgttaatcctggggttttcatttatgcatacaaagaatcaaaatcttgtgtcaatgg

SEQ ID NO: 110842 - DNA, 1636 bp, Zea Mays
ctccttccagcaccacccttctctcctccgcatccccccggccggttcctccttgccgccgccgtcgctgcgtcctcccgttctgcgacgatcaggtttaacgtgcgtgctgttggctgtcgcagggctgtggggggcagacatggcgctccggaggctgctgcaggggagtgtcctgccgcgggtaaccggcagggtttcggcaccggccgtggcgccgttttcaacggagtccggagagaccatccgtgccacgctctttccgggcgacggcatcgggccagagattgccgagtctgtcaagcaggtattcaatgttgcaggggtaccaattgaatgggaagaacactatgttggtacagaagttgatcccagaacagagagttttttgacttgggaaagcctggagtcagtgcgtagaaacaaagttggcttgaaaggtcctatggctacacctattggaaagggtcatcgatctttgaatcttacattaaggaaagaacttgggctctatgccaatgtcaggccttgcaacagcctcccaggctacaagaccagatacgatgatgttaaccttgtgacaattcgtgaaaatactgaaggagaatatagtggtcttgagcatcaggttgtgagaggtgttgtagaaagtttgaaaattattacccgccaagcaagtttgagagtggcagaatatgcttttcattatgccaaggccaatggccgggaaagggtctctgcgattcacaaggccaatattatgaggaagacagatggtcttttcctcaagtgttgccgtgaagtggctgagacgtaccctgaaattcaatacgaggaggtcatcattgacaattgttgtatgacgcttgtgaagaatcctggtctttttgatgtattagtgatgccaaacctctatggtgacatcattagcgatctatgtgctggtttgattgggggcttgggcctaacacccagttgcaatattggtgaaggtggcatttgtctagcagaagctgttcatggttctgctcctgatattgctggcaagaaccttgcgaacccgactgctcttatgctgagtgctgtcatgatgttgcgccacttgcaattcaacgacaaagcagaccggatccacaacgccatcctccagactattgctggggggaagtacaggactgctgatcttggtggaaaggcatcgacatccgagtttacaaatgcagtctgtgatcacatctgagaatcggatgtggttctttccttctgattgttctgtcttcctaatatctttttgtcgcatatggggaggagctttagctttaagaggttaactggcagcacctcgaacttctttgggtggttaacacggtttgagaccgtcaaatatttttgtcacatatcttgctgtccagaaattttttcaacttcagaatcgagtaaataattctgtaatcaacaacagcactacagcagtaggtagggtttatttcattgtcgttcttgaaatattgggctaactggttagaataccagttgggacatgttaatcctggggttttcatttatgcatacaaagaatcaaaatcttgtgtcaatggaaatttgcagctttattaacgtggtggtattatttatt

SEQ ID NO: 110843 - DNA, 1073 bp, Zea Mays
ctcgtgtgcctcagccctcaggtaatcatcatttggactataccggagaagggatggcgcgcgtgcgcgagccaccgccgatggcatctaacgacgactccgcgtcgctcttggtcgactacggatggtctccagcagcagccgcccctgctaggtcgtctcctttgcggcggctccttcacggcgggaaggcgacgacgaggccggccggcgccgccgccgccgccgccgccgccaccaccaccaccaccaggagccacgacgtcaagaggttcatatgctcgcctttcgcggctgtcttccgggcgatgtcgtgcgcgcgtgattctgcggtcagtacatgcgacggacagcgtagcagcaacgccacggccggggtggccgagcgccttcgggaggcgaggaagaggcgaccaagcctcgagcagctcctcaggatggaagcgccgccaccagcatccgcccgccgcccagatcatcatcgcaagctgggtaaaccacgagaagcggttgctccgtacgaggttataatctcctccggcgccgtgaaggggaaagagcaggagccgctattcccctctcctcaaagtcgtttcgtggctgctgtctccgacgacgccgatgacgccgagcggcggcggcgaaccacgatcgtgcccgtgaagttggagcccggtggccccggccggcggcaaacgaacgcgaaaaggctggtggtcgttttcgcgtctctgcgggcgtgttcttgggctccgaggattaacgacgggaaggtggctgcaggccgtgctcccggcaataaggcggatctgttctattatcgacccattcccatggggcggaggtgccgggttcagcatctggaggagtctccttacgttgcaagtagtgacctgtcgtcgctgctcaaccttgaacagatgtgaggtgcatggtccgggaatagccatgcacaaacttcaattcgtacacatatacttatatgtactctcattattttcctattttccagctgcgtgtatgttagtttttttttgtaattgtattatatgatataaaaatctgtaatcatc

SEQ ID NO: 110844 - DNA, 544 bp, Zea Mays
atgcgggtggaggtggggttttgcaacgtgaagtcagagctgctacgtcaggggatgtggctcggcaacgatagcatgaggcgaacctcccttcttcgtggtctagaatgtttcgaaggtcgggcaaaaaccagaggcagtgcggagggtcaagattggaagtcggagctgcactgtgccttgagccctggcaacgatgacctgttaagacctttcgctttgggctgtttgtctgcttttcgtttggttcgtccgtcggctcctttgggaagagagttggtgaatgctctgcatgcttgcttgacaacgatgacccttagcagttttgtgtgctcttgtgtggggttgtcactgtctgtgtttgtttgggcactctgtgtcggcggcgagtgtggtgccatgttgacgtcccaatccaaccggcgagttaagttgtatggtgtcggcgtgttgatgtcccaatccaaccgcctgttgtttgtttttttgttttttgtttgttgtttagtccgatccggaccacttcttctttattaatataatc

SEQ ID NO: 110845 - DNA, 1582 bp, Zea Mays
gaaacttttattagccgagccgagcgagcgttcgagggcgaggaggaaatcagggaggaggatgccgccgctgccgcggagattgatagtactagtataaagcaggcggagacagccggcccctctggcctcgctgctcccccttcctccccgtccccacccacatgccctgcctccgccccgccccgccctgcccaagctgagttcccccacccccaacaaacaattactagagtagctgcattggcggggaaattaaagcgctagaagctcagcagcaatggcggagcaggcgggcgtcggaaggtactggtgccacatgtgcgccgcggccgttagccccgcggagggcgaggtggagatgaagtgcccgttctgccacagcggcttcctcgaggagatggagaccgcccgcggggccgcgaccgacgacggtgacggcgacggcgcggtggctcaggtgcaccccggcgccgaccgcccgagctccatctgggcgcacgctatcctcagcacggtcgacagctccgcccgtcgccgccgcaaccggcggcagcaggaggccgccagcgacgtctacgactggaacgaccccgagttctcgctgcgccggcggcgcgtcaccgcgttcctgcggctcctgcacgagctccgggaccgccagctgcagcggctggagtccgctgccggcgtcgccctcgaaggcgaccagctgaccccgttcggccggagcctcttcatcggcgcagccggcggcgagcatggcgtggcgctgggcgactacttcctcggccccagcctcgacgccttggtacagcagctcgccgagaacgatgcggcgcggcacggaacgccgccggccaagaaggaggccgtggaggcaatgcctaccgtggaaatcgccggcggcaacgatgacgacgacgcggccagctgcccggtctgcctggaggactacgcgcccggcgagcgcgcccgcgagatgccctgcaggcacaggttccacggcaattgcatcgtgccgtggctcgagatgcacagctcctgccctgtctgccggttccagctgccggccaccgacgacaagagctcatgcagcggcggcgacggtggtttcgtcagtgtcgatgcggatcgtgaaggcagtgacaacggcgggggtgatggtagggcaagctctccgggcaacgccgagctagctgaagctgaagagagtggcaggcggttgccgccatccttgcagtggctcaacagcctgttctcgccgtcggcgcagtcctccggtagcggcggcagcagttcgcatcattgggagaactaagcaatattgccatggttgctgccgcttgaaagcttggcccgttggttggtcccaatgtacataggaaggagcaggagcatgccgggttggtgccatgtaaaaatctggagccttttttcagtttggctcatgttaatggtctctgatatgtatcatggctgtaaaaaagaacagaaatgggcaaatgtatgaacttgccgcgctcttgcgtgaactgggtgctaatcatcgtcttactactcaattttggtttttattaac

SEQ ID NO: 110846 - DNA, 1669 bp, Zea Mays
cttttattagccgagccgagcgagcgttcgagggcgaggaggaaatcaggtgggggaaaacttaaaattagaagtccagcgcaataattgagcaggcagggcccctcctaatcactgcccctaaacatgtgtgccgggccgaggccatggtcgatgcagggaggaggatgccgccgctgccgcggagattgatagtactagtataaagcaggcggagacagccggcccctctggcctcgctgctcccccttcctccccgtccccacccacatgccctgcctccgccccgccccgccctgcccaagctgagttcccccacccccaacaaacaattactagagtagctgcattggcggggaaattaaagcgctagaagctcagcagcaatggcggagcaggcgggcgtcggaaggtactggtgccacatgtgcgccgcggccgttagccccgcggagggcgaggtggagatgaagtgcccgttctgccacagcggcttcctcgaggagatggagaccgcccgcggggccgcgaccgacgacggtgacggcgacggcgcggtggctcaggtgcaccccggcgccgaccgcccgagctccatctgggcgcacgctatcctcagcacggtcgacagctccgcccgtcgccgccgcaaccggcggcagcaggaggccgccagcgacgtctacgactggaacgaccccgagttctcgctgcgccggcggcgcgtcaccgcgttcctgcggctcctgcacgagctccgggaccgccagctgcagcggctggagtccgctgccggcgtcgccctcgaaggcgaccagctgaccccgttcggccggagcctcttcatcggcgcagccggcggcgagcatggcgtggcgctgggcgactacttcctcggccccagcctcgacgccttggtacagcagctcgccgagaacgatgcggcgcggcacggaacgccgccggccaagaaggaggccgtggaggcaatgcctaccgtggaaatcgccggcggcaacgatgacgacgacgcggccagctgcccggtctgcctggaggactacgcgcccggcgagcgcgcccgcgagatgccctgcaggcacaggttccacggcaattgcatcgtgccgtggctcgagatgcacagctcctgccctgtctgccggttccagctgccggccaccgacgacaagagctcatgcagcggcggcgacggtggtttcgtcagtgtcgatgcggatcgtgaaggcagtgacaacggcgggggtgatggtagggcaagctctccgggcaacgccgagctagctgaagctgaagagagtggcaggcggttgccgccatccttgcagtggctcaacagcctgttctcgccgtcggcgcagtcctccggtagcggcggcagcagttcgcatcattgggagaactaagcaatattgccatggttgctgccgcttgaaagcttggcccgttggttggtcccaatgtacataggaaggagcaggagcatgccgggttggtgccatgtaaaaatctggagccttttttcagtttggctcatgttaatggtctctgatatgtatcatggctgtaaaaaagaacagaaatgggcaaatgtatgaacttgccgcgctcttgcgtgaactgggtgctaatcatcgtcttactactc

SEQ ID NO: 110847 - DNA, 1839 bp, Zea Mays
aacatgtgtgccgggccgaggccatggtcgatgcagggaggaggatgccgccgctgccgcggagattgatagtactagtataaagcaggcggagacagccggcccctctggcctcgctgctcccccttcctccccgtccccacccacatgccctgcctccgccccgccccgccctgcccaaggtgattgattgattggttggttggttggttgcttgcttgcttcgtttcatgctttccccttgctttgctgagatccaaaagctgagactcagcttgtggatccatctgttctgtgcgcctactcgtatcttatcgccgccagattgggagcgtatgtgcctgctatctgtggatccatctgtatgttgttttcctgattgaatcgtgtgttggatgcctggtggttgaccttgctcctagtcttttgatttacacgagctttcgacgaagccgcgtctggtctgtctgctccatcacaagagcacgcaaatgctgagttcccccacccccaacaaacaattactagagtagctgcattggcggggaaattaaagcgctagaagctcagcagcaatggcggagcaggcgggcgtcggaaggtactggtgccacatgtgcgccgcggccgttagccccgcggagggcgaggtggagatgaagtgcccgttctgccacagcggcttcctcgaggagatggagaccgcccgcggggccgcgaccgacgacggtgacggcgacggcgcggtggctcaggtgcaccccggcgccgaccgcccgagctccatctgggcgcacgctatcctcagcacggtcgacagctccgcccgtcgccgccgcaaccggcggcagcaggaggccgccagcgacgtctacgactggaacgaccccgagttctcgctgcgccggcggcgcgtcaccgcgttcctgcggctcctgcacgagctccgggaccgccagctgcagcggctggagtccgctgccggcgtcgccctcgaaggcgaccagctgaccccgttcggccggagcctcttcatcggcgcagccggcggcgagcatggcgtggcgctgggcgactacttcctcggccccagcctcgacgccttggtacagcagctcgccgagaacgatgcggcgcggcacggaacgccgccggccaagaaggaggccgtggaggcaatgcctaccgtggaaatcgccggcggcaacgatgacgacgacgcggccagctgcccggtctgcctggaggactacgcgcccggcgagcgcgcccgcgagatgccctgcaggcacaggttccacggcaattgcatcgtgccgtggctcgagatgcacagctcctgccctgtctgccggttccagctgccggccaccgacgacaagagctcatgcagcggcggcgacggtggtttcgtcagtgtcgatgcggatcgtgaaggcagtgacaacggcgggggtgatggtagggcaagctctccgggcaacgccgagctagctgaagctgaagagagtggcaggcggttgccgccatccttgcagtggctcaacagcctgttctcgccgtcggcgcagtcctccggtagcggcggcagcagttcgcatcattgggagaactaagcaatattgccatggttgctgccgcttgaaagcttggcccgttggttggtcccaatgtacataggaaggagcaggagcatgccgggttggtgccatgtaaaaatctggagccttttttcagtttggctcatgttaatggtctctgatatgtatcatggctgtaaaaaagaacagaaatgggcaaatgtatgaacttgccgcgctcttgcgtgaactgggtgct

SEQ ID NO: 110848 - DNA, 480 bp, Zea Mays
atgacggcgcctccggtagtatctcgtcgtccgctggaagcggcaaccggcaacacctcctccatgtccggctccggcgtcgacgtccgcggcaactacgctagcggtggcgccgatgttgaattgctgatgacgacgcttccgctagtttctggttgtgctcccaacgcagcagcgcctccccagttccccacagcgcctgccgctcccagcaccgacatccccgcagctgggttgcatcgtgtcccgctaactcctgggccatggaggcggacccgaccccatcttggtccacgcgtcactgaccgtacacgtgtggacgtggatgtgaacgcggtggacgacggctggacgcattaccagcacggccacccggcggcggcgaggagaaaaccaggaaatctccatccggcgtccccctgctcacgcacgctcctcaccatctttagcctgggccccacctcccgtgccctcctctag

SEQ ID NO: 110849 - DNA, 542 bp, Zea Mays
atctcccgagagctgactaaggctgctgctcgcatttcttctgtagctagcaatagcaatctctcttgctccctgcaagaaaaaaaaagagagagagagagagctagcgagggagaaagatcaataatcgtcaagcaaatcttgacttctgagctagcttccgatccatatatatacacacacgttgctcactgctgtgcacagctgcagcgtgcccatggcgacgataaggaagcatgtgtccgtccccgccatcctgctagcgctggccgtcctctcctgcctgctcctcgtctccgcggcaggcaaccggagggctctgctgccgagggagccagccgacacctacgccggtggtggacgtggacaggtggtgttgccgacgacgacgacggcggcggaggagggtgctgccgtgctgggagctgagctcgctgaagccgagcgggacgagacgatggtggtggatacggcggccaggagggcggggctgctgcagactcaggactacccggggtctggccccaacggccgccatgatc

SEQ ID NO: 110850 - DNA, 2222 bp, Zea Mays
atggccgcgcccggaggcctggaccaggactgtgcacaggacgccgccattaagctcttcggccgcagcatcccggttctccactcctccgtcttcgccgccaccgctgcggccgcatccgagtgtttgtacgggaattttcttccaatacgtgtttcttcaacaagtcactctccgtatttacggccgtatttatggggagatttatgttggtttatcccttacccagattctaatcataaagatacattgcctttgtctgtggagaaatcgctgagaattttcttgttttcgtggggcctaatcttgttggacataagtgcattagcatacttctatagtcggaccaataatttgttgaaaagcaaaagcacaagttctaacaacctcagttgtgtggcatggaatgcaaatcatgtaacacattgggtggttcttgttagcaccaaattatcaaatgatgttagaagcaatgatggcatgccatgccttccaaacatgtctttgattgtcaaaacaaatcccttcccttccaagagcaatatgaagaatggtttacaggcaatcagcagtcagcatgggaaaatggaagctgattccaactctgaggaagctaagaatagtttacaagctatcatcagtcagcctgggaaaagatacgattccaagtctgaggaagctaagactgaatctggtggatctggccaagagaaggtactcaagaagccagataagattctgccttgccctcgctgcaatagtatggaaacaaagttctgctacttcaacaattacaacgtgaaccagcccaggcatttctgccgaaactgcaagaggtactggactgctggggggactatgagaaatgtccctgtaggttctggtagacgcagaaataaggatccatctcatcaccatcatttcaccaaggtgtgtgattataccattgctactaatggagatgtttctgatgcaactcagcgccagtccgttgcagccaagccatgtctccttcaaggttcaggaaaacaaaatgaaacagcgtgcaagtctgtatctccagtcagtaatattaaagagcagaacaatgccgaccttatttccttggtctctggtgataataaggaagagaaatcatgtgcatcttctgcagtggtatctggttcctccgaaaattggatgccagaaaatacagttaaaaaggaggaggataatacttcagcgtacggtaatggtgtgaaagtacctgatcacaaaatgcagcctcaccatgctggacctgtttcggtgttctccagaaatcctgctgcagtcatggcgactaatcagtgctcagaagatggtattcatacgccgggaaatggtacggtcagtcctctttcactgccaccactacccatggtaccaaccccaggaatttgtgcacctgctgttccattccctttccctctcgtgccagccttcgtgagctgcattcctggctggccaagtggactatggggtgcaccatggcctggaagtagtgcccctacattactatctcttcctccaaacggtttagctctttcaggaagcaactctggggtgttaggaaagcatacaagggtagctaatttgcaggaagaacagaaggcagaaaagaagttttgggtccctaaagctctccgaattgacaacccagaagaggcagcaaagagttcgatctgggcctctcttggtatcaagcctgatgacagaatcatattcaagtctttccagtccaaggatctgaaaaatagtgcgactaagacgccagaatccctgcaggccaatccagcagcgttttcccgctctcagacatttcaggagagggcctgatacaaaaataaagtgtcctcaaaacaaaggataccagaggatggtcaatgttcctatttaagctttttcttgagttgatctgtcgctaagcgcagcagtttggcaatcaactcaggcctggccaagatttacattttttttctttctagcgatagctaggttggtgtgaagattctgactgctcaaggagcgcttatgtaaatacagtaggcctgtgaattgatgttgaatgttgatagtcttttacctggcaccggttaatgttctaatgtactccctctcttctcaattatagttataagtcattctggttttcgtaaacacatattttgctattctaattcatcctataaaaaagaaaaaaa

SEQ ID NO: 110851 - DNA, 225 bp, Zea Mays
atgcgccgtagctacgcatcgcgcccaccaggccgccccatctcctattcatcttctccaaaccgcctctccccacccatctcgcccatgttcgcgaaacccagagccgaacccctcccagtcgacctcggctcttcggcgagctgccctccatgtcctggccactcagtcgttcgccgcgtcgatcgcccaggaagatctgcgatgctctcatcgttgccgagg

SEQ ID NO: 110852 - DNA, 222 bp, Zea Mays
cgccgtagctacgcatcgcgcccaccaggtcgccccatctcctattcatcttctccaaaccgcctctccccacccatcgcgcccatgttcgcgaaacccagagccgaaccgctctcagtcgacctcggctctccggcgagctgccctccatgtcctggccactcagtcgttcgccgtgtcgatcgcccaggaagatctgggatgctctcgtcgttgccgagg

SEQ ID NO: 110853 - DNA, 2138 bp, Zea Mays
tgcgcagttggggccggaccgctttcgcacgccaactcgcctcgctttcttccccgttcccacctctctctatctctctctcacacacacagtcacacacacaccgtcctccctccttggtccttggctccccttgctaccttgccttcacagatctcccactccccaacagaactgtcacgtctcggcgcccgggggccgtggtattacggctcatcgcggctcggcagtggtggcgcgcagctgaccggatcgagcagcggatggacggcggcggcgggctgggcggcctgcggtggaccgcggaagaggcgtcgacgatcggaggcatcgccacggtgtcgctgctgcactccttcatccccacgcactggctccccttctccatcgtcgcgcgcgcgcagcgctggccgctctcccgcacccttctcgtcagtcagtacccacctcccttccgcgtgcctcgttccccccatttgctgcggttgccgctcgttactgttcaccgcctcggcgcctccagatctggttatctcctaattctaagaggttgggtgaaggctagctcccaattgatggtgcaagagtgtgccattagggttttactctggttgggctgctctcggtggttggttcccttggatggatccggttttgcatggtgtcattaacaaacgatggcagtttttgtgtcatggtagtgtggtggtgcctggctgctgcctattgcgtgtagcatatgctgagtattgcctgaacatctgaatgagattgcatgggcatcatgttcagatgcgcatgctcctatgatctgattttctgtgtgggatggattcgtaagactgcatttgtgcttctgttaccttcctttctcggtggaatgttgttccatggttcagggaacgcaaatttctaggggaagtgtgtccttgtcttcttccgacttctgctgctttcatgtgtacatccgtctgcggtgactgtgacaaatggctattgttgtagtgttttttagtaatgcaagtgatgtaatgtgttctatcaacgagccaagtttgggcaaacaagttatcaaagctttgtttagttaaaccagttgccagcaaatgcctataagttggttgtgatctaatctggcaatgaaataattgcatcatatttgtcatgatctcttaagaattaatgatgacttaaacaaaaaagttatgattcttgcactacatctattttttatctcatcctggttccactgttttggtgcaccctgtttgcttcatcctgggcagtatacactccaagaacctgcaatttcatattttccaattttttaaattttcaaatgatgcccttctctctatatgattgttactgagaaaagattactaacttctgcagctgcatttggaggtgttcttcatgttgtttctacggctcttcttgggataactgcagttactatggcaaatactatagctggcgaagaaacagtgcataaacttgcctcgctgttgctgatttttcttggagcaagttatatcctcttgtttgccttaggaaaaggtggtcatagccatgcccataatcatccaatggaaaaaatggcagtcgccggtcttgtacttgtacctgcattatcaccttgtgcaacaactcttccagtttttcttgctgttggcaactcttcctcaatgatgattcttgcaatcattgtgctcctcttcagcaccatcacagtgatgacatccttggtggccctttcattctacggtgctagccagatcaagttccactgggtggagcgttacgacaagatcctcgtcggcacggtgctgtgccttgttggagtcttaacatatgtgttccatcatcacgatggtgatgagcatgtgcaccagaaactcgtatctccctagatgcatacatactgaagttccatctctgttgctccctatttgtatacaatcctgattatcgacttactctgccgctctggttttgctggagatacgtatcatctgatcaagtgaatatatttgagcaaactgcgtgaagtttgtatcgttgtggtggtagtggcctctttttcggcactctgaaatggtaccttcctacttttggacgcaataaattgttttctg

SEQ ID NO: 110854 - DNA, 1178 bp, Zea Mays
tgcgcagttggggccggaccgctttcgcacgccaactcgcctcgctttcttccccgttcccacctctctctatctctctctcacacacacagtcacacacacaccgtcctccctccttggtccttggctccccttgctaccttgccttcacagatctcccactccccaacagaactgtcacgtctcggcgcccgggggccgtggtattacggctcatcgcggctcggcagtggtggcgcgcagctgaccggatcgagcagcggatggacggcggcggcgggctgggcggcctgcggtggaccgcggaagaggcgtcgacgatcggaggcatcgccacggtgtcgctgctgcactccttcatccccacgcactggctccccttctccatcgtcgcgcgcgcgcagcgctggccgctctcccgcacccttctcgtcactgcatttggaggtgttcttcatgttgtttctacggctcttcttgggataactgcagttactatggcaaatactatagctggcgaagaaacagtgcataaacttgcctcgctgttgctgatttttcttggagcaagttatatcctcttgtttgccttaggaaaaggtggtcatagccatgcccataatcatccaatggaaaaaatggcagtcgccggtcttgtacttgtacctgcattatcaccttgtgcaacaactcttccagtttttcttgctgttggcaactcttcctcaatgatgattcttgcaatcattgtgctcctcttcagcaccatcacagtgatgacatccttggtggccctttcattctacggtgctagccagatcaagttccactgggtggagcgttacgacaagatcctcgtcggcacggtgctgtgccttgttggagtcttaacatatgtgttccatcatcacgatggtgatgagcatgtgcaccagaaactcgtatctccctagatgcatacatactgaagttccatctctgttgctccctatttgtatacaatcctgattatcgacttactctgccgctctggttttgctggagatacgtatcatctgatcaagtgaatatatttgagcaaactgcgtgaagtttgtatcgttgtggtggtagtggcctctttttcggcactctgaaatggtaccttcctacttttggacgcaataaattgttttctg

SEQ ID NO: 110855 - DNA, 1789 bp, Zea Mays
tgttagctgccattcatgtccttcattttttttctaggtgttttattttaaatgtgatagttgtatcaagttcgaaaaagatgcttcttacagctattcttcttttcgattcatcagtttcgtttcttcctgcagcaccatcacagtgatgacatccttggtggccctttcattctacggtgctagccagatcaagttccactgggtggagcgttacgacaagatcctcgtcggcacggtgctgtgccttgttggagtcttaacatatgtgttccatcatcacgatggtgatgagcatgtgcaccagaaactcgtatctccctagatgcatacatactgaagttccatctctgttgctccctatttgtatacaatcctgattatcgacttactctgccgctctggttttgctggagatacgtatcatctgatcaagtgaatatatttgagcaaactgcgtgaagtttgtatcgttgtggtggtagtggcctctttttcggcactctgaaatggtaccttcctacttttggacgcaataaattgttttctgaaatttcctttccttggttcttttttcctttcaatccattttatttaggaaaaaaactgtttatgctgggtgtaaaagtaaaacccaattgaccgcaaattgtgtttgaaaaaaaaaaactgttggcagaagatgagagcttaggttcagtggggtttttcgcaaattcggcccagtatactgcaaatagccgagccgggcctggggaaaacgcgcggcaggcagagcggccacgacgccgcccgtcgccgccgatccctttcgaccgctcgggtctccctgctccttcgcctttcctcctgaaatccagcgaccgaatccgatcgccttggcgcaggcgttcgatgggcaaccactaccagacgctgggtgtccggcaggacgccaccaaggctgaggtcaaggctgccttccgtcgcagcgcgctacgcgaccaccctgaccgccacgccggctccaccgacgcggccgcccgtgccgacgccgccagccggtttcgccaggcgtccgacgcgtactacgtcctctccgacgacagacgccgcgccgagtacgacctccgtcttcgcggttccacgtcttcctacgcgcgcacctcctcctctggttgggcctcctcgtcggcttcctacgggtacggccatggcggcggttcgtggcgacggactcctccgggtgcaggtgccggcgccggcgcctcggtggggtcaattgattgggaattcttactgaaggcggtcactcggcgagggttccttatcaatctgggattagccagtgtattgctatctggggcaacttttcttgattggactattttagaaatttggaagatgaataacaccgggaaatcatttgaggatgcgatggagaaggtcggaaagacgcaggaggtagatagagcttgaatctttttcatggtacattagtgtatatatatatacactaatgtacaaacctatgtgcatatcgatcgttgtccacatcctcctgatgttactttgtaatatgtatagatctgaacagttttttctatcacgactcacgagcttgtgcttgatccatagaacccctgctgtcgccgtcgtagaaactgaaccatgtaggttcttcgacagcgaaagctcaggttatgctctgattcttttgctgacgaaacgaagtaactgttgaataaattgctgtaattcaagtacgcttcgaggccagctacatggtcgcaggaataaaataataaaa

SEQ ID NO: 110856 - DNA, 852 bp, Zea Mays
atgcatgtaatcctcatggagaagagatgtactcaactaaaagcaggcagcagcctaatacttcttgctagtatacatctcaaaggcatcggctcaaccgacatccgccgtccgatcatgtgccatcggacattcggacggacaaaagctccaatcccaactcatcagatgagccccgagctctccagggccgggaagccacactcgccctcaatggcgcgcaccagtgcctccagctctagcagcgccgccgagtccgagccgtcggccccagctgccacggcggcgtgcgtgtgcgtcgcggtccacgcgcgcgcgcccgggctcctgtccaccggcgctggcgcagcggcggcgcggtcgagcaggaagaaagcggacgtgtccagtgtcgggagcacgcacgcgggcgcggcgggcgtccagctgggcgcggcgacggcggcagcgggggaggaggaggaggagggcccaggggcggggaggccggtgatctcctgcaccatgcgctggaagttggcggggtcggcggtgatgtatgtggtctgcgggcgccgcgacgggcgcggcttgcgcttggcgacgcggccccctctaggtcctcccgccacggcccgggcggcgggcggctggcccggcctgctggacaccggcgcgggagctgcgtcgtggccgctggacaggagctcggaggcggacgaggtcgaggaggacggggtggacggggagaagggccgggccgcggcggagctggcgtgggcaggcgcaatggaggcgcggagcgccgaggtgagcgccgagttctcgaaggcggccgcggaggtgaggcagccggggggcgacgagaagtag

SEQ ID NO: 110857 - DNA, 509 bp, Zea Mays
cttataatacatgagatagctaaacgctgttaaatggtttctagtgttacacaatcagccaaatgcgctggatctggatacatgcatcatgctagtccgatgttgacatggatgctaaaaaatatgctcaacaactctgcgcggaggccatgtggtacagttgaccataaaggtatgtatgatattgcttcatatcagtataacttcagacgcgcccttctgctggaaaactggaacgctcgcttctgatgcagttcactgtcatttccatggagatgccacacaacaagaacttgccaagccaagctttatgttgccgaagtctcagtactgtacagacgaacggacacaagaagatgcagatcctttgaccatcccagtttttttcaccataaggccccttagggagaaagcaccgacttgtctttcggagagaataatccgaagataaatctttctacagaatcagtaaacaagctgggggctcaaattcaggacgaatctataga

SEQ ID NO: 110858 - DNA, 1764 bp, Zea Mays
atatccaagaactcattattagaactacgtcgtggtaaccttatcttctctctctacggaacacacaccgtgtcgttctagcgttctcatcctccatccgcttgctcctgctccctcgagtcaaagcagtggatatggtggcgcgagcagcgagctagggaggctaggtagcagactagtgtcgctattaatcgtaccacgccgccgccgggaaattgcccttctccgccactgccactgaagctatactgtcgcagagagagcgccccaccacccgcggaccagacatctgcgatgaccactctggcgacggacacggcggcgtggacacgggaggaggacaaggcgttcgagaacgcggtggcagcctccgcggcgccgccggccgacgggccgcctgatgatggctggttcacggcgctggtggcgagcgtgccggcgcgaacggcggaggaggtgcggcggcactacgaggcgctggtggaggacgtggccgctatcgaggccggccgcatcccgctcccgcgctacgctggggaggagtcgtccgcggcgacgcccgagggctccggtgccgccggcccctccacgcccaaggacggaggaggagggagcgggcaccgacgcgaagaacggaagggcggcgtcggcgctgacgcggggaagagttgctctaaggccgagcaggagcggcgcaagggcgtgccgtggacggaagaggagcacaggttgttcttgttgggtctggacaagttcggcaagggcgactggcggagcatctcgcgcaacttcgtcatctcgcggacgccgacgcaggtggcgagccacgcgcagaaatacttcatccgcctcaactcgatgaaccgggacaggcgccgctccagcatccacgacatcaccagcgtgaccgccggcgaggtggccacggccggcgcgcccatcacgggcggcggcccgaccgcggcgggggcgatgccgatggggccgggcggcatgaagcaccaccacccggttccgccgatgggcatgtacgggcacgcgcccatgggccacccggtcgccgggcacatggtggcgccggcggccgtcggcacgccggtcatgttcccgccgggccatcactcgccctatgtcctgccggtgggatacccggcgccaccgaccaagatgcaccagtgatcgtctacgaccggcatttgcgcagctgcgcagctgcatccctttgctcgttctttcttgatttcgttgatgatcttgtgtagccaaagctatctatccatcctttcctcatctcccgggtctttgttttttgacgtaacatatagatgacttgagcgagtgcagggcaggcaggcgaataatgagtatcgctacttacaggcttaaggaatgtgtaattagtagcagccttcctgggtgcaaatattcatcatttgtgcaactggggactgacagaatcccatttcccggatgtaaatcgattgtctataatatctcatctgtgcgaaatatgtgttcatcacctgttttggtttaggattgatttggttctactttttttccttctcaagcatctctgtttcagtttaggattgatttggttctccttttttttttccttctcaggcatctctttcagtttgagtttaggattgatttggtattgttttagtttcagtgcccatctatggttttggtattcagtttagtaaaatcattttgggaccagtggacaggcaagtgcagcacgcacgtggacatcaa

SEQ ID NO: 110859 - DNA, 93 bp, Zea Mays
tgacccgggataccgggaggattggaggagattgaggggaaaattagttaattttccactcaatctcctccaatcctcccggtatccccttgt

SEQ ID NO: 110860 - DNA, 99 bp, Zea Mays
cgtaaccgcctggccacgtgaagccgaggtgttgtcgaggtggtcaccggacacgcgcggtggtttgatcaatggaacagggcatgtctagagtgcagt

SEQ ID NO: 110861 - DNA, 1981 bp, Zea Mays
cagcaggtcagaatcaggagaagagacggtgacatgttggcacgtactcgtacttctgtggttttgctggctatacaaacgtacgtacgtggaggccacgaacaaaaaacaaaaggggcaataataatcataataaaatgtatcaaaataaaaaaaatacagcgaataaaatttcgtgttctaggaatatcgtacgtactggtatatcattcgggagctagtagtagttatattattgctctcttggtgattgcctgtgtggagcgaatattagaacatgattagtaggtgcagcaggaaccggaagcgcggtccacaccctgcactggccgacaggtgggcctcgagccagccaggcagccggccgggccggtgctccaccctaccctgtcagtctgtcacgtcatgcaggcgcggtcgttaagccctgatgattgtttcttcccgcgtcgccgccgcgccttattgctggtgcccaatcagtagataccaatcagtttttggacgacggagacgaagaggagcctcggttgcagttgcagtagcatcccaacttccaacctccaaatccaaagtgggttccagttccagagagaggaagcccaacggcggcggcggcggcgacggccgacgtgctcagagacgcggcgtggaggggcgcgccgccgtggcttcgtgcagggggtcggcccgaccgtgtgcccgtgagaggttgacgtcgctgatgggggagccgccgccggaccggaggaggctgtaccaggtttggaagggaagcaataaattcctcttcggcgggcggctgattttcggtcctgacgcgggctccctcttcctgtccacggtcctgatagcaagcccgctggccggcctgtgcttccagtgcgtcaccaagctcagcagctccggcggcagctcaccgctcggcctgccggtcctcctggccaccatactccttgggctatcggatctggcgttcctgttcctgacatcgagcagggaccccgggatcgtgccgaggaacgcgcgcccgccggagcagcaggagcgcggtggggtcgacgaccccgtcgtcgccgatgacgacgacatcgtctcggcgtcgaccgagtgggtggcgatgagcgccgcgaataacccgcacctccggctgccgcgcaacagggacgtggtcgtcgccggcggccatgtcgtccgggtcaagtactgcgacacgtgcctgctgtaccggccgccgcgggcgtcgcactgctccatctgcaacaactgcgtccggaagttcgaccaccactgcccctgggtcggccagtgcatcggcctgcgcaactaccgcttcttcttcctcttcatctcgacgtccacgttcctgtgcctctacgtcttcgtgctgtcctggctcaacatcgccgcgcagagggcgagccacggcgggtcgctgctgaggtccgtcaccggcgagccgctgtctctcgtgctcatcgtttactccttcgtcgtcgcgtggttcgtcggcggcctcaccgtcttccacatctacctcatgagcaccaaccagacgacgtacgagaacttcaggtaccggtacgaggagaaggagaacccgtacaacaggggcgtgctggctaacatgtccgaggtcttctgcaccgggatgccgccgtcgatgaacaacttccgggcatggatggagctgccggcgccggcaccggaggcgttcgacgccgggccgccgctcgcttctagggacaagatcgacctggagatggggcacaagggcggcgtgcaacaccatactggtgttccacccatcttgcaggggctgcattacgcgcaaatggagaagaattacagtgccagcgtccacatcaaggaccggcgatccgcggaggcgccggaccccttcatgatcccggaggcgccgcgacacgctgcagcaggagaagcttggcctccagctgtgtttcatgacgacggagtctaa

SEQ ID NO: 110862 - DNA, 1419 bp, Zea Mays
agcacatctggagagaaatttcagacacatttgagtacactagactgtaagaagattcgattacatggaaacagaattatatttcgtaggcatcgtgtctcaggttctgaacagcgaaattggtaaacggggcaccacacgacacaaagccaaggcagggtggcggtgccgttcatacattcttgagcttcttcatcttggacggtggccacctgcccttcttcctaagcttcctcttgcggacgagccgcttgcgccgctgtctcagtttcttggcaagcttcatccgcgccctctgctccatgatcatcttctgcttcgactcgagcggcatttcctcgatcttggtcgcaggtttcggttcttctggctgctccgccgcaccagcctcagacccctcagccgtggcatggacaggagccgacctcttctcggcgaaagaagcgcaagtagcagtcacgttcagagggctctgtagggatgacaggttcttgcattgcagccttgaggctgcaacaacagtgataacgaaaaggcaaaccacttaaggcccggttattccttgttttgatatgaattggatgagattaaaaaagattataaagaattttaacttgctataaattcaaactcacctaataccgttcaaccaatccatatggatcgaaacgaacaggccctaataggatcttgtgcccacaaatttcacatatttcgatcctgaattcacatgtgggcctaacggagacatgggttcatgactgaaggttgcaacacaatagagaaaataaggtttctgtggcattattaaccaataaattctatatgagtatgatcaaggcgctgcagccaagcaatttcaatacaataaatttcgcaggaaattcagtgtgcttcctgtatcaccggattgacagtaaaataatgtgggcatatactcaactacaggaactagcaagcgaagtgcaacttaacacattgtgatgcttattaaatcttacagtaattggaagtaaataaagcaggcaaggagcaaaatttggtgctgtagcatattgggagcgatgctcactgacgaagaaattgctacacgattattgttcgaactcgaagaaatccccgaccgagccagcaggatcacagacgcgcagaaacgcccggggcgcgaccagcgcacaatcaaaccgctcataaaccttgaaccagcggttcgctgcggggattgcagctggtagggctgcatggcatccatcccaggaactgaccccaaccagccaggacagcatgcagaggggagttggagtcgaacaagacgacggggatagaggacgcgcgtcagctgagctcaccagagaatgagacgttggcgacagcggagataggtcgggagcgaggagcagacggggagacgaaggatac

SEQ ID NO: 110863 - DNA, 139 bp, Zea Mays
tattttttattttatatattagtttcattccttggccatcgtagagaacaaaagttgtctaatcaaccatccaaacagaacaagcaactaaatcgaattaatagatctattaaatattaaaagttatacacttgaaaag

SEQ ID NO: 110864 - DNA, 79 bp, Zea Mays
tttattttcttctctccttgattcatctactatttgtagactaatatattggaaaaatgcacaaacacatagccatatt

SEQ ID NO: 110865 - DNA, 2257 bp, Zea Mays
agaaatatttccggtcctccccattctcagccgcccgctagggttttagtgttttagcctcctgcgtccctcccctgttccctcaacgcttctctcctccacctcttctcgacagccgctgccacccggaaccttctcgcagcgacgctatgtgggctctccgccgagctggtaaccccctcaggttccatgcccaaaaagttgtgagtccccgtggttgtgcgagccttgaggtgctgctaactgctgatgcaaaaaatgttgaagaacaccatgaggcagactgtcagaaagtgtgctactgtcataagccaaagccaccatccttcttattgtcattttcatctggccaatttgcttggagtaggggtttctcctctcagccaggtgcaaattctagtgacaaggatgatgagttagaggatgtattttctgatctcaatgttccaccagaagctggtaaaaaggatgctgggttgacatctgaagatacttctgatgaggatgccactgatgaaattggcttgcctagtatggatgctgatgcaaaacctgagacggagcacattaaaaggacttttggttccacccttctcaagactgtgttggaagctccaaggcatcaagtcacttcagcgcttgagaaatgggcaaaggatggcaatgcacttgataggggcgaactctattatgtgctccttaatcttcgaaagcggaagtggtaccacaaagccttggagcttgttgaatatgttcaaaattcacaactgctcgaactcggagagcgtgattatgctgcacgcgttgatttaacagctaaggtttatggtctacataaagcagaacagtatatcgagaaaattcctgcatctcataggagtgaggttgtgtatagaacacttctggcgaattgtgttgctgaaggcaatgtaaaaaaatcggagcaagtttttaataggatgaaggatcttggattcccagttacaacattttcttccaatcagcttctgctactctacaaaagattggacaagaaaaagattgctgatgttctcacaatgatggaaaaggaggatgtgaaaccatctatctttacttacaaggtccttgtagacgccaagggaatggttggagatgtagaagctatggagaaagtggttgaatcaatggtgaaagatggcattgagccagatctcacgtttaatgctacaattgccagacagtacatatttaatggtcagcgtgataaagcagagacacttttggagtcaatggagggtgatgatatccagaaaaaccgtgctgcttgcaagtttctattacctttatatgcttttctgggcaatggtgatgctgtggaaagaatttggaaggtgtgtgaggataatactcgtatagatgagtgcttgtctgctatagatgccttcggtaagcttggtaatgttgaaaaggcagagaaggtttttgaggatatgtttgtgaaatggaaaaacctctcttccaaatactacaccgctttgctaaaggtgtatgctaatcagaacctcttagacaagggtgaggaactagcaaagcggatggatgaggagggtgccaagtttgggaccccaactttgaatgcacttgtgaagctatatgctgacgctggagaggtggagaaagctgagtccctattgcacaagctatctctgaagaacaacgtcaagcccagttacagctcatacatgacactgcttgatagctactcgaagaaaggagacgtccacaactcggagaaagtgttcaacaagttgagacagataggctacactgggaggatcaggatgtaccagtttctgctccattcttatctacatgctaaggcccctgcgtatggattcaaagagaggatgaaggctgacaacattttccccaacagtgccgtggcaactctgattgccgctactgatccgttcgtcaagaagaaatcagtatcggacttgctcgattagattatggagtagtgtgaggtactgaggtccatcatgttgctatgcgcatgtgctgtttcgataagactgagtagtgtgagaatatatggtgagataataacgtcttagtcttgtaatgaactaccattgactttgcatttagactcatgcgctttgctgaacttgtgagtcatagaaacaggataaagtgcactagagaacttgtgctaattcttgatataatattttttgttatccatttcatttatccagtagaatcaagatga

SEQ ID NO: 110866 - DNA, 2606 bp, Zea Mays
ttgcaaattttcctattccatttcttcttcgtcctcgcaccagtccctcctccttggaagcgagggaggagagtggagggagagggaggagcgaggcaacggtgagctcgggaggcggcgtggggcttgcacgccggccctacccccagctcactcaccacgctcttctctcaccaactctctctctctcttatctccttccaagattcccccatttttttgttgttgtcccccccattcttgctaggatcattccttgatctttcgctcgctccagtacgcccgttttccagctccggagatcccatctcggccacctcctgcggtctccaagctccaagaggccagattccagcacaaatttgaggtcaatttgcccgctgagctcgaatcaatccgctcggcaacaagtgtcctttgttcccccgatccccgggcttcgattcgatcgaatccgacctaattttattgtgtgtgtgtgtgtgtttaaccttctctcgctgcacttttcctttctcctccctgtcgcaaacgcaaagtgggttccatcgcgtcacccgcacggctcctctgatcgggcggagaaagaaagcgcataaaaggcgagctcttgatgcggtcttggtcgtagcaacagcagctccactgctcccggcatcgcctgctgttgtttatccatatacggacggagcagcgggcgctccggcagaggcagtggcagcgcgctccccccgccagcgcgtgctgatgcttgcccccctgctcgccgccttcgctgtcgtcttcctgctcctcctgtccaggccatgcgcccgtgacatgagactgttcctcgcctccctgtgccagcagctcgtgctgtccctgctcgggttcctggcaggcctccgcctgctcagcggcgtcgcggccgcctccgcggccacagagaccatgccgctcatgccctccttcaagaggaagcgggccgcggccacggtggagaatgcggaggaggcggccgccacggccggcggcggcgagacgtcggtgctcgacctgccggagctggccatcgattgcattctggagaagctgcggccggcggagctgcggagcatggccgccgtctgccgctccatgcgcgagcgctgccgcggcgaccacctctgggagcggcacatgacaaacaggtggggccgtgtcctgggccgcgccgccagggacgaatggaggacgcacctggcttccgccagcgagtcccgcgccgcgggtggcggcggcaagcgccggaagtggctcgccgcgctgtcctgcgtttgcccggtggtgtcctggatgcggcccagggccgacggtggcaagtcgtccgcccccgttttggacgattccatcatgtcgtggtacctgtccgtggagagcggcaagttctggttcccggctcaggtctacaaccgcgagcacgggcatgttgggttcatgatgtcatgctatgatgcagcgctcagttacgatttccataccgacacattccgtgcaaggtacccaccacacggtcgacgaaccgtggtgttggaggatggcgtgcaatgggacagggtgagggcaccgcctgttgacacccttgcgcatgacctgcacacctctgactgcctgcatgagctccggcccggcgaccacatcgagattcagtggagaaggaacaaagaattcccatacggctggtggtatggagttgttgggcacttggagtcatgtgatggaagcgaacacttttgtcggtgccatcttagtgataccgtggtgctggagtttaatcagtacacgccgggctcaaggtggaggcaagcgttggtgaagcggaaggagcatagggaggagggcaacgagggcgacgggttctacggcggcataaggaagctccgcggcaaggatgacatctccaagtggaggcagctgtggccaacagacgtcctggagtaagcaggagccgcatcccttctcacaccgagattgatccatcgctcaaatgacacgcctttctttcatcatattgaccaaattcgtcgtctctgtcgcgctgttgtaaacgggttagcagaagaacacacagggtgacaacaaatccttgttcggttatttctaatacatatggattggatgagattggaaaaaattaagaagaagtttaacttgtttgcgattcaaacacatccaatctcattcaattcacatggattgagagctaaccgaacaagcctgtagttggacaagggtgtaacacttatttgtcaggcgtaccgggcacagaccgcttcctatttgttcgtggggatgtaactgtaagccttgtgacccctaagcagtctgcgtcttgtgcctgctgctgtagcggtagagcagagagagagatcaaatgtaaattacattttttagctcaaattcacgacaaattggttgtcctacctgcgtatgaacgcctgggacatctctcttcttcaggcagcagttttttttaaaatttttattttgcagaggaaatcttgtgtgctccagagtagtttgaatgggagagatttcgggtagacgtgtgctctagttcctgcttttgttttgagcacgagtag

SEQ ID NO: 110867 - DNA, 175 bp, Zea Mays
gatcctctttctgtttggaactacaggagaaaacgacccccttcctccaatcgtatagagctcttgatattattaatttttttatttataccaccgcacagatcgaacctcggatttgttgtacccgagctctattatttttctgcgaatgaaatttctgtacctttgactgaca

SEQ ID NO: 110868 - DNA, 1197 bp, Zea Mays
atgacgtccctgctgctgggcaaccaaatagcgaggtcggcggtcggcctctgcagcgacagaaggcgggagctgcgtgccgacggcccagccaccgtgctcgccatcgggacggcgaacccgcccaactgcgtgaggcaggaggagtacgcggactactacttccgcgttaccaagagcgagcacctcactagcctcaaagacaagctcaagaggatctgccacaaaacagcaatcaagaaacgctacttccaccacacggaggagctgctacgcggccaccctgcactcatcgaccggtccatgccatcgttacatgagcggcaggacatcatggctagtgccgttcccgagctcgctgccgcggccgcagttgacgctatcgccgaatgggggcgtccagccacggagatcacgcacctcgtggtgaccacctactccggcgcccacatgccgggcgtggactggctcgtggcctcactgctcggcctgcgctccaccgtgcgccgcaccatgctctacatgaacggctgctccagcggctgcgtcgcgctccgtctcgccaaggacatggccgagaacaaccgcggcgcgcgcgtgctcgtggcctgcgccgagctcacgctcgcccatttccgcgcgccacacgaggcccacgtcgacacgctcatcttgcagtcactgttcggagacggcgcgggcgccgtcattgtcggcgccgaccccgtctccgtcgaagaaccggacttcgagatgctgtccgcttcgcagaccatgataccggagagcaagcaggtcgccgccggccagctctgtgaggatgggttccacttcaacccttccagggacatcccgtccctggtacgtgaaaacatagagcagtgtatggttgacgcgctctcgctgctcggcatcggcggcagctggaacgacctcttctgggcggtccatccgggtgggcgcgccttcttggacagcgtcgaggcggggctcaggttggaaccgcacaagctggaagcgagccgccgggtgctgagtgagtacgggaacatgtctgggccgtcggtcatcttcgtgcttgacgagctccggcgccagcaagagagaaaggggatgggggttattcttggcttggggccaggagtaagtgtcgaaaccatggttttgcaagcaacggatagccaaaagaagatttag

SEQ ID NO: 110869 - DNA, 703 bp, Zea Mays
ctgatccctgcttacgcgcgctccctgcccagtgctgccccttacccctgctcggcttcaacaccgaggcccatatccagcgccacctaatccctccctcattcatgggcatcgtcggctggacctccctaatggttacgtgtgcatctccgtgctccatcatcccatcatggaactcaagcaccgacagcgcccccatctactgcccacctcgctgatcggcgagctcaatcgtgtgcgcgtccctgcttccctctattgccgactgtcgttgaccccggcatggggctcgtccctgcgctcggccttcctctacgcgaacgcgcagagctgtgcctgtcgtgtgctcgtctcagccgagcaccgtttgccccagcgtcactcgcccatggtcgccggttcgtcctcagccctggatgccattcttttccgctcacctcacccagcgccggtccggccgctgtctccggtcttgtccttgtttacacggatcatcgtgggcacgtgctgtggcagcgccttggtggctgtcgagcagcgcaccatgcctgcgcagtctcagccatgaagtcgtccatcatgttcggtgcactctaggtattcgacaaaatagaaccaaggaactgtcgtcattcaaacagcttcgccgcgtcttgcatccccgccggtgagactcgcactcctcgctctgtttaatttctta

SEQ ID NO: 110870 - DNA, 1031 bp, Zea Mays
agagagttcaacggctagtgccgcagacggaaggggtacgtgccaaagagagccctataacttcttctggctatccgttgcttgcaaaacaatggtttcgacacttactcctggccccaagccaagaatcacccccatcccctttctctcttgctggcgccggagctcgtcaagcacgaagatgaccgacggcccagacatgttcccgtactcactcagcacccggcggctcgcttccagcttgtgcggttccaacctgagccccgcctcgacgctgtccaagacggcgcgcccacccggatggaccgcccagaagaggtcgttccagctgccgccgatgccgagcagcgagagcgcgtcaaccatacactgctctatgttttcacgtaccagagacgggatctccctggaagggtggaagtgcaacccatcctcacagagctggccggcggcgacatgcttgctctcaggtatcatggtctgcgaggcggacagcatctcgaagtccggttcttcgacggagacggggtcggcgccgacgatgacggcgcctgcgccgtctccgaacagtgactgcaagatgagcgtgtcgacgtgggcctcgtggggcgcgcggaaaagggtgagcgtgacctcggcacaggccacgagcacgcgcgcgccgcggttgttctcggccatgtccttggcgagacggagcgcggcgcagccgctggagcagccgttcatgtagagcatggtgcggtgcacggtggggcgcaggccgagcagtgaggccacgagccagtccacgcccggcatgtgggcgccggagtaggtggtcaccacgaggtgcgtgatctccgtggccggacgcccccactcggcgatagcgtcaactgcggcagcggcagcgagctcgggaacgacactagccatgatgtcctgccgttcatgtaacgatggcatcgaccggtcgatgaatgcagggttgccgcgtagcagctcctccgtgtggtggaagtagcgtttcttgattgccgatttgtgac

SEQ ID NO: 110871 - DNA, 1311 bp, Zea Mays
gttgcttgcaaaactatggtttcgacaactactcctggccccaagccaacaatcacccccatcccctttctctcttgctggcgccggagctcgtcaagcacgaagatgaccgacggcccagacatgttcccgtactcactcagcacccggcggctcgcttccagcttgtgcggttccaacataagcccctcctcgacgctgtccaagacggcgcgtccacccggatggaccgcccagaagaggtcgttccagctgccgccgatgccgagcagcgatagagcgtcaaccatacactgctctatgttttcacgtaccagggacgggatctccctggaagggttgaagtgtaacccatcctcacagagctggccggcggcgacatgcttggtctccggtatcgtggtctgcgaggcggacagcatctcgaagtccggttcttcgacggagacggggtcggcgccgacgatgacggcgcccgcgccatctcctaacagtgactgcaagatgagcgtgtcgacgtgggcctcgtggggcgcgcggaaaatggcgagcgtgacctcggcacaggccacgagcacgcgcgcgccgcggttgttctcggccatgtccttggcgagacggagcgcggcgcagccgctggagcagccgttcatgtagagcatggtgcggcgcacggtggggcgcaggccgaggagtgaggccacgagccagtccacgcccggcatgtgggcgccggagtaggtggtcaccacgaggtgcgtgatctccgtggctggacgcccccactcggcgatagcgtcaactgcggctgcggcagcgagctcgggaacggcactagccatgatgtcctgccgctcatgtaacgatggcatggaccggtcgatgaatgcagggtggccgcgtagcagctcctccgtgtggtggaagtagcgtttcttgattgccgatttgtggcctggagaaaaaacgatccattaatgtatattgcatcaccgactgatgaaggaaagataatagagacaaacacatctatggaccgtctctattaaatggtcacatcggcaatcaagcaaatgcccgtctctaccaaaaaaagacccgtctctagaaaatggaggcttatcggtcccgcctacttgtcatgttgggcttagagttttcacggtctatctacgagttaacggtccacttgtaaggttgtgcacagtagatcatataaaatagaatatttgcattgtttattaagtgagacttgaaagagctaatgagatatgtgatgaaatatgataaatgctggatgcgcttaaggag

SEQ ID NO: 110872 - DNA, 197 bp, Zea Mays
tttataccagaattactgtctttctctggaaataatcattaatagatcgagaccatttgtttgtcttcctctcaaaatgaaaatggaaaacactcatgcctcctgccctcctctaaaaatcggctgtgccctagtggcatttgctttgattacacgtgaactagagtgtgacttataattgagtgtacttgaactta

SEQ ID NO: 110873 - DNA, 828 bp, Zea Mays
ctattcagttccaatccacgctcggaccgtgcgcagtctgctgcaactgcaagatccatggccgcttccaactccagcgcgcttctccccgtgttggccctcgccggcgtcgtcttcttccttgtcgcccccgccgtcgtcgccgaagcaaccgcgccgcagggcctggagttccacgtcggcggcccgcgcgggtggcgcgtccctgacgccaacaccagctacggctggtgggccatgaacaaccgattccgcgtcggcgaccacctctacttcaagtacgccaacgactcggtgctcctggtggaccgcaccgccttcgacgcctgcaacaccacggagccgctcgcgaccttcgccgacggcgccaccaagttcgttctcgaccgcccgggcttcttctgcttcatcagcggcaagccgggacactgcgaggagggacagaggctcatcgtgcgggtgatggtccagccagcaatcgtcgcgacgccaggcccggcctccgcaccagcgacgtcggcgccgcagccgggccacggcggcggccattcctccggcgcagccacagcggttgccgctgctgctggcgtcgccgccgtggcagcgctggctgtcttcgtcagcctcgtctagtcgcacgccactgatcagcagtttccagcgtgtgcatgcgcactcgcgtacgtgctctatgcatgtcctagttctgctttagtttgggtacctgtggcttttacatattcaccactcgtgagtcaagtatctggttctgtattgtgttgtgtcaggacaattagctagttttactgagtacttgtaatatatata

SEQ ID NO: 110874 - DNA, 223 bp, Zea Mays
ggattcagatcgcggccgcggcgactccccgagcagaagaacccgatcgaacgcggccgcggcgactccccgagcagaagaacccgatcgaacatggctgcgacggtgactccccgatctcagatccctgctgcgagcaaagtgttcgattcgagcagagatggcggcgacatgggctgggctggctttgttgctcgtcacggcgcagttggcgtcagcagcg

SEQ ID NO: 110875 - DNA, 1861 bp, Zea Mays
cactttctgcagagggggcaaaagggtaaagttcttctaccaccgagcgaaccccagcacaccaggtccagtgcccagcctccgtccctctccttcccttacctcgcctcgtctcctctccttgagatctccagggtacgagcgcattcgcgattttggccgcctccgccgccgtccggggagatggcgggtctgggaaaggcgatgtacgcggtggggttctggatccgggagactggccaggccctcgaccgcctgggctgccgcctgcagggcaagtacttcttccacgagcagatttcaaggcatcgcaccatcatgaatatctttgacaaaacccctcatgtgcataaagacgcatttgttgctccaagtgcatcccttattggcgatgttcaagtcgggtcaggagcttccatttggtatgggtgcgtcttaagaggggatgcaaacatcatacaaattggatctgggaccaatatacaagacaattctcttatacatgtggctaaatctaatctaagtgggaaggtctttccaacaaccattggtaataacgtcacagtaggtcatagtgctgtgttacaaggatgcacggttgaggatgaggcttttgttggcattggggcaaccctattagatggtgttgttgttgaaaagcacggaatggtggctgctggagccctcgtacgacagaatactaggatcccttgtggagaggttgagcacacttcctcaactgtcctttgctttgggttcttaattaagccgtctcaagcacctttaccttttttatttcatcgactagtttcaccaagacagggttttcttgtgatgatggaaccccaatgacacagactgcatcgagcactaaattattgttcttcggtgtctaatacatttccatgtggcatacatatttacaggccttgtgcagtggtgactgatgagagagctgtctcactgggtcgcaggttcgaagcagtctctccccatttacggggagaagacttgcctccgtttatgccttcattggatcccactcatgtgggaacctcgggcactgggtctgccctttatacatatttatagtgtccatgagtgggaagtggaacaataatatgctctagaggccttgttttgtatcttatttctgcatgatttcatgactatgctttgttggatttaggtatggggagggaaccctgccaaatttctgaggaagctcacagatgacgagatcagtttcattgcggaatcagctgccaactattccaatctgtccaaggtccatgctgctgagaatgccaaacctcttgaaaagatcgagtttgagaaggtgttgggcaagaagtttgctcaccaggatgagtatgattcctcgattggcgtcgctgaaggggcaccaccagagctcacgtccccaaatccagcccaatgaacctctgtttctgttttctctttggcgccttaatcattttctgttggacagtgctggatcgttgatcggggtactgttccatgacactggtggtttatgtttacttttcctccccaataatcttgggtcgagcgatgttataaagctggccatgcacttcttccagattctgtattcggcatgtttaagatgtgctcccttgaaagacagaccccaaatagacagaaatgcattgtttttacaggtaacatgcactgaactactttgtttcataacctctgaagggtagttttagcaccgtccatattggtcatgagttctgaactatgctttcttgcccggcgtgtatgaaccatctttataaaatctcttaagcacacattcctcctatgaaatgattgatactggattgacacagaa

SEQ ID NO: 110876 - DNA, 1392 bp, Zea Mays
cactttctgcagagggggcaaaagggtaaagttcttctaccaccgagcgaaccccagcacaccaggtccagtgcccagcctccgtccctctccttcccttacctcgcctcgtctcctctccttgagatctccagggtacgagcgcattcgcgattttggccgcctccgccgccgtccggggagatggcgggtctgggaaaggcgatgtacgcggtggggttctggatccgggagactggccaggccctcgaccgcctgggctgccgcctgcagggcaagtacttcttccacgagcagatttcaaggcatcgcaccatcatgaatatctttgacaaaacccctcatgtgcataaagacgcatttgttgctccaagtgcatcccttattggcgatgttcaagtcgggtcaggagcttccatttggtatgggtgcgtcttaagaggggatgcaaacatcatacaaattggatctgggaccaatatacaagacaattctcttatacatgtggctaaatctaatctaagtgggaaggtctttccaacaaccattggtaataacgtcacagtaggtcatagtgctgtgttacaaggatgcacggttgaggatgaggcttttgttggcattggggcaaccctattagatggtgttgttgttgaaaagcacggaatggtggctgctggagccctcgtacgacagaatactaggatcccttgtggagaggtatggggagggaaccctgccaaatttctgaggaagctcacagatgacgagatcagtttcattgcggaatcagctgccaactattccaatctgtccaaggtccatgctgctgagaatgccaaacctcttgaaaagatcgagtttgagaaggtgttgggcaagaagtttgctcaccaggatgagtatgattcctcgattggcgtcgctgaaggggcaccaccagagctcacgtccccaaatccagcccaatgaacctctgtttctgttttctctttggcgccttaatcattttctgttggacagtgctggatcgttgatcggggtactgttccatgacactggtggtttatgtttacttttcctccccaataatcttgggtcgagcgatgttataaagctggccatgcacttcttccagattctgtattcggcatgtttaagatgtgctcccttgaaagacagaccccaaatagacagaaatgcattgtttttacaggtaacatgcactgaactactttgtttcataacctctgaagggtagttttagcaccgtccatattggtcatgagttctgaactatgctttcttgcccggcgtgtatgaaccatctttataaaatctcttaagcacacattcctcctatgaaatgattgatactggattgacacagaa

SEQ ID NO: 110877 - DNA, 1214 bp, Zea Mays
taaagttcttctaccaccgagcgaaccccagcacaccaggtccagtgcccagcctccgtccctctccttcccttacctcgcctcgtctcctctccttgagatctccagggtacgagcgcattcgcgattttggccgcctccgccgccgtccggggagatggcgggtctgggaaaggcgatgtacgcggtggggttctggatccgggagactggccaggccctcgaccgcctgggctgccgcctgcagggcaagtacttcttccacgagcagagggatgcaaacatcatacaaattggatctgggaccaatatacaagacaattctcttatacatgtggctaaatctaatctaagtgggaaggtctttccaacaaccattggtaataacgtcacagtaggtcatagtgctgtgttacaaggatgcacggttgaggatgaggcttttgttggcattggggcaaccctattagatggtgttgttgttgaaaagcacggaatggtggctgctggagccctcgtacgacagaatactaggatcccttgtggagaggtatggggagggaaccctgccaaatttctgaggaagctcacagatgacgagatcagtttcattgcggaatcagctgccaactattccaatctgtccaaggtccatgctgctgagaatgccaaacctcttgaaaagatcgagtttgagaaggtgttgggcaagaagtttgctcaccaggatgagtatgattcctcgattggcgtcgctgaaggggcaccaccagagctcacgtccccaaatccagcccaatgaacctctgtttctgttttctctttggcgccttaatcattttctgttggacagtgctggatcgttgatcggggtactgttccatgacactggtggtttatgtttacttttcctccccaataatcttgggtcgagcgatgttataaagctggccatgcacttcttccagattctgtattcggcatgtttaagatgtgctcccttgaaagacagaccccaaatagacagaaatgcattgtttttacaggtaacatgcactgaactactttgtttcataacctctgaagggtagttttagcaccgtccatattggtcatgagttctgaactatgctttcttgcccggcgtgtatgaaccatctttataaaatctcttaagcacacattcctcctatgaaatgattgatactggattg

SEQ ID NO: 110878 - DNA, 498 bp, Zea Mays
atggagcataccgtttccatgcgcatacggcgtatgcgcgaagttcttcatattgttgatgatgcgatgttggaagcgttcaccgttgggcaagccactgcactcccaccggtgcatgagatccctgaacgccgtgtgcaagtgcaaaatgtgcacttctgcgttctccatggatggacagcggtggttccgctgccggtggtggagtgtggactccccactgtatccccgtcgccaccggcgtcggtggttgacatggggtcgtctgcatccgctcctatggacgtcgatttggaggcaccaccgccacctccgcccactgcaaaggcagttactcgtcgttcaccatctccgtcggcacccgtggtcgtcggaaccatcgctgcccgtcgtgggcagccccctcgcgccgtcgatactccacgcggacacgtcatcctcactggccaccgcccaaatagggtggccccatcttcctcctccaatgggagggcctaa

SEQ ID NO: 110879 - DNA, 1074 bp, Zea Mays
tccccatccactctactttacaccgcaggcagtgagccagccactgagccacaaagctatctatctctgagcgacgtcaagcaccaccgaacgaccaccaccaccacctcgagctacaagctatggcgaagcgtctcctccgctcttcgtcccttcctctggccctggtgccgccgctgctgctgcttctcctggtagcgggatcgctcgcaggggcaacagcgcttggcagcttccctggggaacgtcgtggtcgaagtctgcagcagctgccaaacccgatgcctcagcctgtcccgcagccgcagccgcagccgcagccagacccaaacgtacggccgcaaccggggccgccgaacccactgccaccacagcccctgccgcaaccaaatccaaaccctcagccgcagccgcagccccttccgcaaccacagccaggcccgcagcctgacccaaacccacaacctcagcctcagccccagcccctcccgcagccacagcctggtccaatcccgccgcagcctgacccgaacccacagccacaacctcaacccttgccacagcctctcccgcaaccacagccgggcccgatcccacagcctaacccaaacccaaacccacagcctgtgccgatgccagacccaaatgtgcagcagccacaaccacaacctgctcccaaccaaaatccacagccgcagtctgatcagctatccgggggtccacagccacttcccaacagcgaaccaaggacgttaaacccgcaatacgccatgcttttaagctttgctgctttgctactataatagctctgtaccatatagtagtttttgttgttgtttcctttacgcttgtataaatataataatatgcggagtaatattattattgtgatttttttcttatattttttttgcgagagtgtacgtacgtttgcggggcgcgcctatataggattttagcactatcgttttgatatctggacgtgccttcattattgtatatgcatgattgtataactatgtggcctggacatattatacatacgatatatataataatatcatttcttccttt

SEQ ID NO: 110880 - DNA, 381 bp, Zea Mays
atggcgacggaggtaaaccgggacgccaacgctgacgaccctcctctgccgcaaccggccccttccccgtcgtcggaggggaaggatgccaacaacatcagggacagggtatccttctcgtcgtcctcctccagagcggcccgcccttcgtgctggggaagcatcagaatcattcatcggtttggccggatccggagccggagcctgagcagaatgggcagcgacgagcacgacacgcgcgcaagcctcgggggtcgtgggcgccgctgcggttgcggttgcgtttgcagcggcggcaaggcgggtgcagcggtcgggccgacgaggtccctcctccagcgcaacgatttctactgcgacgattgcaacacgcacgcgtag

SEQ ID NO: 110881 - DNA, 249 bp, Zea Mays
aatactgtctcccacacaaccatcatgtgaggataggaaacaagttcactaagaacgctgattgtgatttggatgttgtccagaatgcactctttgcctggttagaaaaaaactgaagttaatgacaagatcaaataaattgcattagatcaatatcttgaaggcaatatcaaagagcacaaaagtaatttatccatctggaggccacaacctatattaaatataaactaaaagttggcgagaatgtaa

SEQ ID NO: 110882 - DNA, 607 bp, Zea Mays
atgccggccgtgtccgctccctccgtccttgcgccggcaccgccgacggcgagacgcggcgtgctacgcacgcgctgtggcttggcggccaccgcgacgcccgcgtcgtcagtatgtccggttacgggcacctgccggcgctccccgagagaccgagcgcgtgtgcgtgttgacagcctgcctgtgtttcgctacagagagccgtggcccgtggatctgcaggccaaagtgacgagcaaggaggctgggaaggatcagggatccatccaccgttctgtcttctcaggtcgacaggaggccaaaccaggtgcgcgcgtccgtgtcggcgatgagtgcgggcaggagccgggcgcggcagaacgcgatgcgctcagggcctcaggggtggtggtgctgggcgccgtggccttcggctacctctccttccgcgtcggcttcaagccctacctcgaccaggctcaggaggccatcgactccgcccgcgaccccgaccctgacgccgccaccaccgccgcgagggacgcgtccgacgatcccggcgccggttgcccagggggagacctcgggccgtccaaggaccccgccgtcgtactgcgcgactgaggcc

SEQ ID NO: 110883 - DNA, 1497 bp, Zea Mays
gcgctcagttgcttgcttccctccaccagcaagctccgcaagtcttctcttctctgatcaacttggttctctactcttggctgcttgttgcccaccccgctgtcaggtcagtttgctccgctcggaatggcctccccgtcgacggaagccccgctgcctcacccgaccatccgggacgtcatgggccacgacgacgacgacgactactacggcgaccacaccatcgcagaggaggaagaaggggacgaggaggaagaggagtgggacatgagcaagcgcatgtcgcgcctgtccttggagggttccgacggcggcgacgccgacgacgaggccggggttgacgaggaagaggacgacgagttcgaggtgccggaacggtcggacgtcaacgctgccaccgcgtaccgcgcgtggcctccgtacgaggatccgcagcaggccccgtcatcggcgtcgctcccgggcacgccggaccgcggcgcgcaggcggcggggtggcccggggcgagcgccaaggagtacgcgagcgagacggaggcgcggtggccgcccggcgccgacgggcgcggcgggaggcggcagcggcagcaccagcgccggtggcagcggatggggcgcgaggcgtggctggagcgcgcgtggcgcatgcggaagcagcggcggcagctgcaggaggaggtggtgcccgtggtggtcctcggcggcggcggcgactccccggcgagccgcggcggcgtggcgatggacatggaggaggtccgcgcgtgccgcgacctgggcctggacctcccctgcgactggaccgtggagatcccctcctactacgcgctctccggcgtcgacaccgccagcagcggcggcaactcgccggcctccgccggcagctggcgcatctccagccccggggacgatcccaaggatgtgaaggcgcggctcaaggtgtgggcgcaggtggtggcgctcgcgtccgcctctcgtctcggttcttgaggcaccaagagcaagcaaccagcccgcggcggccggcggcgatcagcacgggggtggaaaataaactcaccatgcgtactacacatccgcagtaacttagccttcgcttctcatcatcatgtggctagaagaaaaaagaacaaaaaaaaagagtgtcgtctgttgcctttgcttctgccacagcgtttttttttgtgttccactgtagaaaatgcgtcgtatcgtacgtgtgttcgtgtggtcatgcatagctaggactaggacctgtaggatcaggttttctttcaaaaaaaatggaaaagcaaaatcaaaccgtaaaccagctggattagcatgcatatggttggtttgtgacttgtacaacaacaacaacaaaaaaaaaacagagattgttgagagagctagccgtacgtgcacagtgcgcacgggtcgcttggtgtcactgtgtgacacgtgcagcgctgtggaaccgtgtgtatttttgaactccatgattgttgtacgagt

SEQ ID NO: 110884 - DNA, 135 bp, Zea Mays
ggcggatgagaggacgtgcattatttccatttatttccccctcgtttgttgagttcgttatccgcgtctcggatcccgtttatttaggggacggcaattattagagccgcgcttagacaaaaaaaaaaaaaaaaa

SEQ ID NO: 110885 - DNA, 496 bp, Zea Mays
ttgtaactaacttgtgtctgtgatattgattatgtaataggttacatcttcacgagccatagctcttgttattgggcctgctattggaggcttccttgcacaggtgaagattatggaatttagatagcagtataagttaaattcgaaatgctaatgagtgccttcatcatgtatcccttaatcataactgacctctgatgtgtaaaaaaagggatagtggccgacaaaaatatttctagcatcaggaaggtaaattatttctagtagtacaatttctagcatttaactatttcattgtttttagacgactattataaaccttcaaaaattatgcatctaattttcaggtttccatacttccttccttgctttgtaatatcgttgctagcagcaggatcatgtattgcatgcatttggcttccggtatgccatatcatcttccctattattttctatcttgaatccaaatagttagatcctcttaagaaaataaaag

SEQ ID NO: 110886 - DNA, 695 bp, Zea Mays
ctaaattctgaattctgtcaggtaaactaacctgaacatgctttagtgaatctggaatttagtgttgtgagagctgttttgttgtgacatgctttgggctgttaggtggctgaattctgaatttttagatttggaataacgtctaagtctgaatttccaaagtagtttcttggacagttaacatcgcggatcctttgcacgatgcatcattttaaataacacggtgctgcgtcttgaaatgaagtctgttttcactctcatgttcatgttcatgcacaaatatggaagccacattttgtgtttatcatgctttcctatatctttgtgtacatgtgatttaatgccagttgtgtatttatgagaattttggtttattttgtaggattccggctctcatcaagtgactccttcccctcacgttgactttgcgaacagatgtctcaattctagtggtggagctacgaacaacaatccgatgtcctgatcgagagcgatggagctaatgtttgaacttgtgtgtttgaacttgtgaactaaaaatgtgaactatggatgtgaacttgtgtgaatttgtgaacttatgtatttagacttatgtgaatttgtgaacttatgtatttagacttatgtgaatttgtgaacttatatatttggacttgtgtgaatttgtgatatgaacatatatcaatgtgttt

SEQ ID NO: 110887 - DNA, 2582 bp, Zea Mays
gtcacaaaccgaggcccagcaaaatttccccgttcttgcttcccctccgtgtccactctcgatcttcccttccccctcggcgccggtctccaaacccgcttccgcaattcgtaccgcttccggttccgggggcgggcgggcagcaccgtctcggctctcggatactatggcttccggcgaggggtgggaggcggcggtgcgggcggaggtgggcgccgttgcctggtgggacgacctggacagcgccgacctccgcgccaggttcaaggccttcacggggcagcgcagcgactggcctcagcccacggtcctcttctggaaggaccttctcctccgcgtcgccaggcgactccgcgtctgctccgcccctgcccaccacgtgacgagcgcttggttcgcgcgccccggggggctcacgccgctatgcttgccgcaagttctggaagagatgcgtgcggatggggacgtactgctgaaatccgagctgattgatccatcctcaacgaacctgcaccagctggtcaggagggtgagactcatgaccatcagctccaggaaggcggtttggcaggaggatatcctcgtgttcaaattgttgattgaggaacgagctgccgatattgctaggcaattgagtgactctcattggacatcgacatgtgttgtcacgattagcaaattcaatagcttctttgttgacatggatgatgctcatattgcattatgttttttgacgcaacatgggaaagctaggtaccttttgggcaggaaacaagaccctattgagggtgtcaaggttgcactcactgcttcacaagttcctgctgtatccaaacttgaccatgacaccttgcacttagtctggacagaagagaagttgcaagaacagcttgatgtgcttgatcgacgatgggagatttcaaggcgaagggcattggcatccttcaagtctggagataaactagctgcttatcgttatgtgaggcagtctaaattattctcacaaagccggagcagatgcacacagttgttggaaaggattgaagaagtcatcagcctaattgctagtgctgaatcaaataagaaggtttatgaggcaatacaaattggtatcctggcaatgaaggacaacactgtcagcatagatgaggttaacatccacatgaaggagattgatgagcttgttgctgcacaaagagaagttgatgctgcccttgtaccactccagtcgttagatgatgaaggagatattgatgaagagttcagcaagcttgaagcagaattgcaggatgacgtccctcatattcatgttcaagaaccaatggcaccttccaacgaggaatcacctgatgaagtggttgaatcattgagccataacatgtcaagaattagactggagcccatctaaatgctccattttacgtttaatcaatttgacctgtacatagtgtgatctagtcaaatcatctagtcccaacaatgtgtcttatgtttcttgttacaccatccttataaaagggcaattctgttgcagatattcctcaatgttgcctgctgttttattgagcctccatggttcacctcctacattttttttgaaacggtggtttcaataccctaaaaacttagttcatatactgtttgatgcatatcgtttagtgactggcattttactttattttctcgatttcagcgcttatgctgtccataaatttagttattttcagtgcactgaatctgtggttcatatttgtatatggcatctattggagaaattgaagaacacatcttatcataggagaatcttgtgtaaatggtatagggttttttaggaatcaatgaaatgtatcactctttgtgatgttgatttgtattgtggcaggttttaagttcatcctttcataaagttgacttcctacaaaaatgaactgtctttgttgaactgtgacccgttcttatcattgctacctcaatggtgatggaaaagggagaagaatggatggatcatctgcaggtgcctctcattaagtattggcaacataagtgatttgtctgagatctattctatcttcatgatgatgctggcctttccggaccagtctttctccatatgagagagttgatcagggcatggataggtgctgactgctgaccaaaagaacaagtcgggatggagtagtaaaatatctgttatacaaaagcagaggaggaaaagaaaagataggcgtaggataagctggcaaggcacatagcatttcctcgatttgaggggatcaagatccatcaatggacgatctgaagataggcctgaaaactgacgacaacacctagtcctgaatgataagacctgaattattggaggggactttgcttgtgctttctccacatgcatagatgcatgaatgtatcagatgcctgtccacaccagtcttcaaagttatgtcacatcacgaataaaataggtagggaaaagcaatcctgtacctccatcaagtgatacaataatgttagataccataactagcttatcctcttacacagtttactgtagagtgatttgtgtgcaatggaaaacataagat

SEQ ID NO: 110888 - DNA, 693 bp, Zea Mays
ttatggtatcagggtgtgaaatcttgagaggcaaatcagaccagaacgatagttcatagagagatataggttattttttcaagaaatattttgctgcaatcgaccctgggccccaaattcgtcttgcaaccagggcccaagttcaagggcgaagaaggcctccgtcacccttgtgtatcttgtgtagactttgacgaatgactgattgctggattggatatccacaaaaccaatcacacacggcaaatgcaattcctagcccacctgtgccgttccagtgggccatccctaactccaagcccaactgccttacctcatctcgtcgcgtcattccttccgcctccgccgcacacgcgctcgctggctcgctgctccgcaacgccgtggggaatggtcgcagctaccgccatggccaccgctgcgtctgcggcctcaccgctactcaatgggagccgaaggctgcgcggctccgccatcgcggactcaggctacagcgtacgctgcgccgctgtggcgggcggctaggccgaggcaccggcctccaccggcgcgcagctgtacgcggactgcgtcgtggtgggcggcggcatcagtggcctctgcaccgcgcaggcgctgtccaggcggcacggcgtcggggacgtgcttgtcacggaggcccgcgcccgctccggcggcaacatcaccccggtc

SEQ ID NO: 110889 - DNA, 1131 bp, Zea Mays
atggccaccgctgcgtctgcggcctcaccgctactcaatgggagccgaaggctgcgcggctccgccatcgcggactcaggctacagcgccgaggcaccggcctccaccggcgcgcagctgtacgcggactgcgtcgtggtgggcggcggcatcagtggcctctgcaccgcgcaggcgctgtccaggcggcacggcgtcggggacgtgcttgtcacggaggcccgcgcccgctccggcggcaacatcaccccggtcgagcgacccgaggaagggtttcagggccgcgaggagtcagtggaggagttcgtgcgccgcagcctcggtgctgaggtctttgagcgcctcattgagcctttctgctcaggtgtctatgctggtgatccttccaagctcagtatgaaggctgcatttgggaaagtgtggcggttagaagaagctggagccgtcttccggagacagaagacagttgcatctttcaggaagggtcttgccatgcttccaaattctatcacatccagcttgggtgtggtttggttcacaaaatgtaacgaacaatatacacctcagcatccgcctgggtcgcttgagacagctgcatccttgcagacagagccaactagaatgctgaaggtctattaccgcagagggtcaaaagcaagtcaatttcacgacggccaacaagatggaacaggaagggagttgctggcaatggagaatgggcatacaactgatccaagacctgataccctcacagccatgggtgctccgctgtctgcgacaagaaaagaagagttcctcaacaacatctgtagaagacctgacgcttgtctgctgataccaaataaaaacagcaagaaagcaactcctccctctccaacaacacctgctgctgcgccaagacgaagccgacgtgtcgctggagctggagtggaattcagcatgcaagattggggtggcagggccaccaaaaaagccatgaaagccctgcagattattactgaagatgaaggcatcagtcaggaagccctcaaggcttatgcagagcttttcaagcacccactttctcagctccaggtggaggccttgtcagcccttttcggttggcccacgccaccagaagggcctgtttga

SEQ ID NO: 110890 - DNA, 573 bp, Zea Mays
gaaatgctcaatggattgtatgcgcgcgcgcaggtggacagcgagctgaaggatgacttggtttttggggacccgaacgcgccgcggttcgtgctgtgggaggggaagctgaagcccgctccatccaagcccgccgacctcccgttcttcgatttcatgaatcattaacatccctggcaagccgagggccggtctaggcgcgcttggcttccgcccgcctcctccaggccgcgaggagtcagtggaggagttcgtgcgccgcagcctcggtgctgaggtctttgagcgcctcattgagcctttctgctcagtatgaaggctgcatttgggaaagtgtggcggttagaagaagctggaggtagtattattggtggaaccatcaaccatcaacactattcaggcaggagaggggcaagaatctgaaaccactagggatccccgtcttccggagacagaagacagttgcatctttcaggaagggtcttgccatgcttccaaattctatcacatccaggtttgcttttattgttttgtatatttactaacaaatatgttcgtgtgttgcaacaaaca

SEQ ID NO: 110891 - DNA, 891 bp, Zea Mays
cagttcccctgcgctttcgaaaaaaaaggaacaatatacacctcatcactctttccaaatcgtgctcctgctagtagggtgttacttctaaactacataggaggtgctacaaacacaggaattgtttccaaggttagcaagtctctttcaacaatattgccttgtatttttgtgattatgatgtgtttatatatctttttagtgcccttctttatgaatagaacttttagtaccaatattctgttctttaatatcactataaaaacactaactgcacggaactcctggaaaatttgagctgcttgttatgtagtatgttttaaatatagtctttattcgattgcctgttattggctgtatttttttatgatcccaactcatttcaagactgaaagtgagctggtagaagcagttgatcgttgtcaacagagggtaactgcaaggcctactcgtgcgcccagctaagctctgcaagctagggatctaactggagtcccacatagttcgccttccgttgctcaccatctcattgtaatcgccaggccaacggcctcgcacatgtatatgtacggcactccagagatcaatagacttgctggttgagcattttctctcttcaatcgtgacctccgaaaaatgcttataaatcctacagcagtggatcctttagtcttaggtgtccgagtttggccacaagccatacctcggttcctggtaggacatcttgttcttccggaggccgcaaaatctgccctggaccgaggtgcctacgatgggctgttcctgggaggtaactatgttgcaagagttgccctgggaagatgcgtcgacgacgcgtatgagtgtgcctcgcaaatatatgactttttaaccatgtatgtctacaagtga

SEQ ID NO: 110892 - DNA, 773 bp, Zea Mays
gccacaccagctatataaacacagctgctctcctgctccctttcccttccccccttccgttccgttccgatttgacgagttggtggctgctatagattcactccacccctctccatttctgataagtatccagctagctaccagtgtatgcaccaggcagcagcagcatggcggagtgcaaggacgacgacagcggccggcggtctccgtcgtcgtccatggacagcagcacccaccccccggcgctctccaccgcgtcctcggcctcccgccgcccgccggagaggagggaccagctcagccccgacctgcagctagggctcagcctgtcgccggcgtcctccgccctcctggtagcggagacaaacaacagcatcgtcccttctacgccaaggaaccaagcactcccggattggcccccgatcaaaccgttccttagaagcgccctgactgcctcggcacgccgacggcgaacgctgttcgtcaaggtgtacatggaaggcgtcccgatcggccggaagctggacatgctcttgctggacgggtacagcagcctcctagcgaaactttgccacatgttcaaggcatctatcacttatgctgacgctgtggagtaccatcagcgggttcctcacgagaaggccgcgcatgttctcacctatgaagaccatgatggagactggatgatggttggggatgtaccgtgggagctctttctcggaagcgtaaagaagctgaggattgcgagaaccgacaggtgctagatagcaaac

SEQ ID NO: 110893 - DNA, 367 bp, Zea Mays
agacatcgccagtgattgttgggcacaaactttggatccttgaagaaaacaatgtgtctggctggaaaaacaataaaatacttgctaaacaggccacatttgaataatcataaatatttgatcaaactaaacactattgtccaatcccctcttcctattagcatgcaaagatttaatttgatgcaatgtttcaatttgtactacatttttactagctttgcagatgcttcagacggttatggtcagtgacttttttcttttcagatttgttagaatacacacagaaatttggatctgtctcctgtaatgttgttagcattggtcttaattttatttgctgttgttaggaggggagctgtttgagcgg

SEQ ID NO: 110894 - DNA, 356 bp, Zea Mays
gtgattgttgggcacaaactttggatccttgaagaaaacaatgtgtctggctggaaaaacaataaaatacttgctaaacaggccacatttgaataatcataaatatttgatcaaactaaacactattgtccaatcccctcttcctattagcatgcaaagatttaatttgatgcaatgtttcaatttgtactacatttttactagctttgcagatgcttcagacggttatggtcagtgacttttttcttttcagatttgttagaatacacacagaaatttggatctgtctcctgtaatgttgttagcattggtcttaattttatttgctgttgttaggaggggagctgtttgagcgg

SEQ ID NO: 110895 - DNA, 823 bp, Zea Mays
aaaagaagaagaaaacaatacttaaacgctcggtgtcgcattgcatcatccgtcgttacgtttcccactaggagccctcgcccgcctgagctgtttctgcagagtcataaatcccacccacccccagtgtgtgcaccgatcagtcaatgagtcaaccagcgtgaacaaacaggagacgcatccagcctccagcagagggctccagagatccagcaagatgaaggagggcacggcgaactgtgtggacatcctcatcgccatcatcctgcccccactcggcgtcttcctcaagttcggctgcaaggtcgagttctggctctgcctcttgctcaccttcctcgcctatcttccggggatcatctacgcgatctacgccatcaccaaggactagctagcgcggttccagttgggtgagagctgcaggctcctcctcttctcagctgtgaagctactactactagtctactaccgattggtgaacctgaacctgtcgcttcgttcgtgtccttcgatcgctctctggttacattggtcgtggatcttgttattaccgatttatttatcatacagtaacttgtaacatgcgctgttctgtatttattcagtggtccgcgtaaaatctgcctcaaacctgtgctatagtgtgatgcatgtgtctggaagtcgcttggtgttggcgtgaaggttgagcgtttcagcgcatgtcacagccggcggcctccagtattctacggctgctggcactagtggtagtaccatcagatcgcgtgctggttggtctgtctggttgaaatgcattgtgtgtcatgtccctgttatatca

SEQ ID NO: 110896 - DNA, 1135 bp, Zea Mays
cagttcatatctactccactgccaccttcctctcccgagccgcttctcatgacgtctccgagcgaaaaccctaaccctaatcctaatacaccatttgagatcgggaagcttttcaggccaacgaatcccatgcccaacgccacccccaaccccatcttccccggcgtcactggaggcccggcgccatccggcccctactcgttccctccggtgacccgcccttccaccacggaccctacatccactatccgcaggacccccacgccatgacccgcccaattgtctccttccccatgccaaacccaaacctcaacaccaacccgaacgctaaccccaatgccgtcgccccgggccccaaccccggcgcgcgcctcatgcagctgctcgggaactccgggccgacacagttcgagaccgccgactccatgccgccgcccacatcagagttcgcacaactgcagtcgctcccagcgatgccatccgcgccgccggccaggatgctgagcagcaccagcagcaagatagatcgctgtgaaccggtcgtatatgggcttaggctcgataacatctgtgtgctgaacatcaactctgcactccgttcactcctccgtggtcacacacagggaggctcgattcatttaacaggaaggtctgcgcattcacctccttccgcgccgtcaatggaagccagatctccaaacatgcggtcctcacaacgtcgatcgaatccaatccaatccacagcaaacaatggcatccaatggcagcgacattgtgatgatgtacggaacacggcgctgctggagccatccaagcagcccaagtcagtgactttctctgtcaaggtgagcctagcgcagatgctccgtggcatgatcatcatggacgtggtcaccctggagtaggcacgcattacagattcgtagtacacagctctaaggtattaaaaaatgatgcatcgacatcgtttgttcttttttcactcataatgcaggaaacagaaatagggcatttgatttttgtgcatatattaagtacaatgataaatcatgcaatgtgccagtttttgcccaaatgatacctattccgttggcttcattaagccatatgggagatgctttgtacatttaggaat

SEQ ID NO: 110897 - DNA, 1335 bp, Zea Mays
atggagatgaatgaagaaaggaaggtcagcttactaggactagcagatatattatcagcctcaattggaggattctcatgggctcccttgatttcaaagatctgcaagaataaagtcgaggcagaggcttggtttactggtcttagtgccttgatatgtcgaggacagcatggatcccaggtccaacatatagatggaatccggatcgctggacttccttttgatggtgcaagagaaagtagcctaagtggtagctctactttctcttcggattcctttgagaataagctgagctcgcttgctcgtcttgctaagatggaggttgagtatcgatgtatccagatcatagagattggtcttccaatgggtaaacatattaggatgagagacaccccgggggtctaaaatctgatgttgagtccgcattgcaagttctaaattttgcaatataagttgactgagataggagagcatgaacaagtggatagacttgaggttttaccttctccccattcgtgtatctaaaaaagatctcttcacagctctggaaacaatccaatggatgtggatgtaggaaacacttcaagtgaccaacatgttccggcagagaggttgcacataacatacaagtctgaagctttgttttgtttatgcctaatccttagttgtccttgtttttttataacatgcaggattgaagcatctgaagtaattcttggtaagcatgtgttggaaaaccatatagatcaaatgtcaactgatgaagtcgagcaatcgattaacaggtagtcaactgcaccttacactaggagctaaatagttttattttggaggtatgaaaagagggccttacgccagaagccaaacaatttttattgcattgaaaaagggctgttttctttcatgcttgtaacaaataaccaagcatgttgattgctttgaaattttgtttacttgtgctctcagggactacaagatacaaacagggtaatgatgtggaatggtattgttcgaatcgtatagctaccattctagcaagatgtttacctacaggtcccctggccatgatgtgtcatgatggatgtctgatgaatccagctaaagctctacatttgtaacgaacgctttctgacgagggcacggcgataacacaccttctattctagtatgcttagttagattcaatgttagcgcaaacgactgatgataagtttttcagttagtattttaatttggatttagagtacacttatgtatgatttatttgacaatgcttatttatgagacattgaattgtacttatctatattacattaaatatgatgttattaaata

SEQ ID NO: 110898 - DNA, 495 bp, Zea Mays
atcgatggccggcgccctgcacaatgtccgactccctctccttcccaaacagatagcgacattcatcttcctactccaggcgagcagcagcaaatcaccatggcgcacttcctctctctgctgtccatggcgccaatcagcagccgtgtcctccttgcagcgcccctgctccattttttctccctctgctccctgtgcggtgtgctcacggcacctctccctgccttctctctgtccccagcgaccagcagcaaggacagcccccttccctcgctcctttccgatgtgcctcgcgtgttcaacacaatgcctgcgaggaagatgtgttgttgcagccccgtcgacgctcgccgggtgtttgctgtttttggcgcagacccgctcgcgacgtcgtcgaccctcgccaccgtcaaagtcgcgcttcgtgccttgcagttcgacgaaatgctgagccacgtggacagtccatgcggctaaatcccgactcgttcaggt

SEQ ID NO: 110899 - DNA, 2439 bp, Zea Mays
tggggcacgagaggagataccttggtggagcgcgtgaagagccttaaagtgaagaaggggaaaatggtctcccatccagctcgcgcgaagcctgggagcttctacccccttcttccataggcactaggggaacggacattccaacgatggtgggtggcctgtcgtaccatggagacgcctagaccagctccacaaccactggccaggggtggaacaggcccacgaccccgctgcgtaggtggcgccatcaacgcgtcgcgtggaggtcgccatcctcgggcgtagcgagggaggagcagagcgggtagcatcgcgtcctcgggccctagtgcctccgatgttggctggtcatcacatggcggaggtaccactacagacagtgctccagacgatggtgtagcctctagcatccctctggcatccccagctgtagcgccgagggtgaccacccaaaagcactcctctcgataagctattgatcctttctttttgctttgggccttcgttccttgttctcacttctttgtgactccttgatcaacgcccatgtgttgcataagtcggtgaaggatgcggcgctagcggtgaaggcgggctccatgtctgcttcaacccctgtgcccccggctctggggagtagttcctccagtaaccgcggttgtcacgccatttgtcgtcaggatcaattcgctagctccaccggttgccctggagatggcggagatgttggtgctcaacgcggctccctttgaaccgcagccctccgcagccttcgcgggttgaggctgggcagctgacgtgcttgtccccaaggcatctttgctaatggaggcggttgctctgcttctcccgccattgtatgtcgccccctcttctacgtgtcgtggggggtagacaatctacagcagcggtgcccctggatgcagctcagcttccagaacgaccgatgttgtccaccacttccccctcctcagtgggaggcgtactggttgtgccacctgtagaggctgatggagagagtccccttcctcccttcaatgcaccacgagcggattcagaggactgaaattccaccgagtcggcctcttcgtgggctaacgcgagtctggagattatcagggacatgctcgacaaccttggggaggcggtgttgattgcccaagcattggtgacaccagatctcatcccctatggagagcgtcttctcaagcaactggtggctatggctaaggcgttgtaggcgccagcgtgaagctgaactgctgcgtgtcgaggctgctcattctaaggcaatggaacatgagctcgtcgagcttcatcgtggtgtgaaccggttgcaaagtgaggtggcactccttggttcagattttgacaatgctcggggtgttgcccactgcctctaggatgaggggtactgactccagacaacccttcatgagacaactctccgcgctggtgaggccttgttgtcccttgaagagggtaacactcgtctagaggaggcggacctggagctctcacagacacgcaaaaagattggaggtagccccttcttcccgttctcttgcacccgagtcatttgctcctttgaggttttccttgtcccttcctcttttccttagagcttcagaagttgtccgcccaagccgagtgggcaggagatcggcgtgggaggtggcgatggcgatggagaccaagatgaaagagctttcttgtactttcaaactgcattgctgaggttcaagtccttcggacggtcgttgatggggtatgttcccacctttcgccccggacgctagtggagacgccgctagtcgaccggcttcggccgttgcctggtcacgtcgagcgcgtggtcaccaaagccatgtttcacggcagcagcattgctttggggcggatggtctcgcactttgacgaggttgacatcgcattgatcgtggaaggctttgctaccggtcgaatcgatgaggagctacacgtcattgaagaccagttccggccccacgcgtagtctctcgcaagctgtgtggacgtgaagacccttatgaccgatccctggagccttgtgctacctactgagatcccacatgtcgaagcttgaacgtctttttgtttggacatgttgtaatgcaccccatcttagatgactgaatggagcttcttggatggcatactatttattttcatcctcctcctctgatttcggccttcgctgcctatttccccttgtatcctttgattgtgccattgtgcggcattgatggttagtaggacaactgatgttgtttattgggagatcaggtggctcgaccgccacatcttgtaaagcctgggtcggactcgtactgttagggttccattttggcggggtgattgttgcacattcctcgatttccattgattcttccttaatgaatacaagattttgtgatttca

SEQ ID NO: 110900 - DNA, 659 bp, Zea Mays
ggatatgaactattgcatcaaatggaaccatatattaatcagtagttgggagaggtgatctttgcatgagtccagtagaatttcaaccttctgtaagtgaagatttagtactggagaagaaatctggaaatgggcagcatgatgtcagaggcacacatcatcacagaaccaacatgaaacctgaaaaaccaattgacttgcttaggaaagttgatggcaataatatgtgtgctgactgtggtgcttcagaacctgattgggcatcattaaaccttggcgcacttctatgcatagagtgttctggggtacacagaaatcttggagtgcatatatcaaaggttagatctcttacacttgatgtcagagtttgggagccatctgtaatcaatctctttcagtcattaggcaacatgtttgtcaacagtatttgggaagagacgctgccagatgataattcaagtgctgatggatcagacacatcacagtacctctctgttagcaagcctaaacacaaagatgtattctctgccaaggagaagtttattcatgccaaggtattcactacattcacaactgcttatattcctttgttctttagcaatgtatggggtgttaaaaaccaaattatctccatgcgaaggatgattgcacaaatatga

SEQ ID NO: 110901 - DNA, 1746 bp, Zea Mays
atggagacgaaaccggagccgcaccgccagaaccacgtccgccacgaggaagcccaggagggggagcaggcagcagtcatggaacacggcgctctctcgctgcagcgcggagtcaccaacttgttcggcaggcggcacgacgagaagcaggcggtcggccgccggggcgagatcagggaggtggacttcttctcgagggtctccagaccccgggaccaggacagcggcggcggcggcgggcgcggggtgtccggaggcggacgtgacgacgtctacatcgagctcgacctgctgaccaccaccacagctgccacgacctgcgccggcgacgaagtgatgcagaccaaaaatcaaaagatagaggcttcagctgtggaagcggagctcaggcgggtagtggaggagaaccggcggctgcgcggaatactggaggagctcacccggagctatggcgcgctgtaccaacagcttctccttgtcacgcagggtcagcaccaccaacatcgactgcatcctgccgatctcatgatcagtaggccatcactggctcatacccacctgaccagcaccgcggcctcgcagtacagcgcgtccactcggctgctgctggaggcgcgcgcgtcgtcctccgccgtggcgcagccgcgtgccgtcgaggacgaggttgtcagcggcgccggcgacggagccggggtcgtcgaggcgtcgccttcgctgagcaatggaggaaacaacgacaacgacgccgccgcggccgacggcaagaggaagacgtctccaccgagagagagtggcgagcaggcggcggcgtcgtcggagctgccgggccggaaggcgagggtgtccgtgcgcgcgcggtcggaggcgccaatgattagcgacgggtgtcaatggcggaagtacgggcagaagatggccaaaggtaacccatgcccgagagcatactatcggtgcacaatggctgtggcatgccccgtgaggaagcaggtgcaacggtgcgccgaggacaagacaattctggtgacgacatacgagggccaccacaaccacccgctaccgccggcggccacgaccatggcgaacaccacgtccgccgcggctgccatgctcctctccggcccggccaccagccgcgacggcgcggctgccctcctcggccacccggcggcagcgctgttccaccactccagcagcagcatcccctacgcgtccacaatggccacgctctccgcctccgcgccgttccccaccatcaccctcgacctcacccagcaggcgcccggaggcctgctgccccacggactgcatcgcccgcccggaggaatgcaccccgtggtggccgccccggcggcggcgatgccgtttcctgcaccatcgccgctggcgatgttccttccgcagcgagcgcccacggtgccgaccgggctgccggtcgcgccgcggcagcagcagcagcagcagtcggtgatggagacggtgactgcagccatcgccgccgaccccaacttcaccacggcgcttgcggcagccatctcgtcggtcatggcaggagcagcgcatcaggctcagcagcctactccacgtgcgagcaacatcatcggcatccccggggatgaggccaacggcggcagcgcgggtgccgccacagcaggtccgagtccgacgacgacggcagccggagcacatgcggcgtccggcggatcgcctcggttcgcgacgcagtcctgcaccacgtccacaacttga

SEQ ID NO: 110902 - DNA, 1166 bp, Zea Mays
gggtaccataaataaatacctttgtttccgccaattattcgataaccaagaacaaaccattgttggacgcgttcccctcctgcacgcaacctcatctcgtcctccagatccaggatggccgtcctccttgagaccttgcctccccgagtgctctcggtgagctactttgtttcgatttatcaggaaatccgtttgcttcatgttgtgcaggctcatatctgattgctggattcggcaaacccgcgttggatcctgtatcgatctggagaaatcgcgaagtcgtcgtcgttcggttcggagcggatctgaggcgacgatagatggaggcggcgggatctctcggtctgcagtcctgctccacctcgatggatgatgtctctgcgctgataattattggatcaatttcgataattattagtagatctatgagatatgccgcctggaagaggcgaggtaagctgcagcatgtaaaaaagagaaaaaagatgtgacatcctagaggaggaggcctttgccatgatgggtgcgctcgcatggcaggccaggcaataataaaaagatgattattgcgtgccgggggaggagatcgcacgggggttgatgtttttggccccgggttctcctccctcatcttgttccgtgttcctgtatgcgttgcttccgctcctgttggtccgctacgcacgccggatttttgcatcgagcacggagatctacaacaaaaacatggagctacgacgcgattcccaagggatacttgtttcttgtaagtctgttagcatgtttgaaccatagcaattggcggacgtgtgtaaaactgcagtatgatggattccactattcatcaaccgaaattatggcgcgcttcaatcgtggctacgctgatggggaactgatccgttatggtgtgcttggatcgtggctgtgtggagatgtgtggaactcattggttataatggtgatgctgatggaactgattttgctcccgttggacggcctgattggttactttgccctgttgactgtttgagaacgtaccgcccaggtttacttatacttactgctttttgacggtactgtacatacagttcgacaatttatttattggcagttcaattcatccatttagctaggggcacgagagcatgagttcccctggagatcaa

SEQ ID NO: 110903 - DNA, 1094 bp, Zea Mays
gggtaccataaataaatacctttgtttccgccaattattcgataaccaagaacaaaccattgttggacgcgttcccctcctgcacgcaacctcatctcgtcctccagatccaggatggccgtcctccttgagaccttgcctccccgagtgctctcggtgagctactttgtttcgatttatcaggaaatccgtttgcttcatgttgtgcaggctcatatctgattgctggattcggcaaacccgcgttggatcctgtatcgatctggagaaatcgcgaagtcgtcgtcgttcggttcggagcggatctgaggcgacgatagatggaggcggcgggatctctcggtctgcagtcctgctccacctcgatggatgatgtctctgcgctgataattattggatcaatttcgataattattagtagatctatgagatatgccgcctggaagaggcgaggtaagctgcagcatgtaaaaaagagaaaaaagatgtgacatcctagaggaggaggcctttgccatgatgggtgcgctcgcatggcaggccaggcaataataaaaagatgattattgcgtgccgggggaggagatcgcacgggggttgatgtttttggccccgggttctcctccctcatcttgttccgtgttcctgtatgcgttgcttccgctcctgttggtccgctacgcacgccggatttttgcatcgagcacggagatctacaacaaaaacatggagctacgacgcgattcccaagtatgatggattccactattcatcaaccgaaattatggcgcgcttcaatcgtggctacgctgatggggaactgatccgttatggtgtgcttggatcgtggctgtgtggagatgtgtggaactcattggttataatggtgatgctgatggaactgattttgctcccgttggacggcctgattggttactttgccctgttgactgtttgagaacgtaccgcccaggtttacttatacttactgctttttgacggtactgtacatacagttcgacaatttatttattggcagttcaattcatccatttagctaggggcacgagagcatgagttcccctggagatcaa

SEQ ID NO: 110904 - DNA, 2319 bp, Zea Mays
gggtaccataaataaatacctttgtttccgccaattattcgataaccaagaacaaaccattgttggacgcgttcccctcctgcacgcaacctcatctcgtcctccagatccaggatggccgtcctccttgagaccttgcctccccgagtgctctcggtgagctactttgtttcgatttatcaggaaatccgtttgcttcatgttgtgcaggctcatatctgattgctggattcggcaaacccgcgttggatcctgtatcggttagtccttgcctgcaaggttcttgttgttttgttttggtggtcgagcatcgcatgttctgcttctggatccagatctggagaaatcgcgaagtcgtcgtcgttcggttcggagcggatctgaggcgacgatagatggaggcggcgggatctctcggtctgcagtcctgctccacctcgatggatgatgtctctgcgctgataattattggatcaatttcgataattattagtagatctatgagatatgccgcctggaagaggcgaggtaagctgcagcatgtaaaaaagagaaaaaagatgtgacatcctagaggaggaggcctttgccatgatgggtgcgctcgcatggcaggccaggcaataataaaaagatgattattgcgtgccgggggaggagatcgcacgggggttgatgtttttggccccgggttctcctccctcatcttgttccgtgttcctgtatgcgttgcttccgctcctgttggtccgctacgcacgccggatttttgcatcgagcacggagatctacaacaaaaacatggagctacgacgcgattcccaagtatgatggattccactattcatcaaccgaaattatggcgcgcttcaatcgtggctacgctgatggggaactgatccgttatggtgtgcttggatcgtggctgtgtggagatgtgtggaactcattggttataatggtgatgctgatggaactgattttgctcccgttggacggcctgattggttactttgccctgttgactgtttgagaacgtaccgcccaggtttacttatacttactgctttttgacggtactgtacatacagttcgacaatttatttattggcagttcaattcatccatttagctaggggcacgagagcatgagttcccctggagatcaatttcatgttgctttttttttgcgaagttccattttctattttcaatttgattagggctagtttgggaacttattcttccaaggtttcctaaggaaaattagttcatttttttttttgggaaaatgaagtttccaaaagggtttcaaatccatggtggtgtgggaattgattgcagtaaaggcgatgggtaagctgataccggtgggttgagaattagaccatcagtagcttactctttcccatatttaaactataatctacactacaaaatagtgcaaaaggtgttcatagtgacctatgaataatataatctacactacaaaaatagtccaaaaggtgtttgtagtgaccatatatgggtgtacattgtacctttttacattgtatttgtagtgatcatatatgggtgaactactgtacttttttatattgtagatcgtattatttatagtgtgcagtttgaatataggtaagctgatggtcttattgcctgtcaagttcatatataatagttttgggattaattttttttgcgtcatagaaattcataagcatgtgagtttatcacatatatacatcagaatattaactagaatatatttaaaattggtttcgttcatatactcggaattgtgcccagcgggattatataatttaacaaagaacatggtacagaattataagccgtgactttataccattatattaaacgtaattgggaatatttaaattgtttttcattctaattgactgcattttgtttaagtctcaagggtgccgtgcttttaatctagggcctaaaattgggtgattaaggggctgtttggttcgtggtcatactttacctaaggttagtcgtttgaactgaaaaactaatcttagtcagaaaagttaagcaaagtgtagtaagttagtcatcaaaccaaacaggctctaaaagcaagttaaaatccaccggaattgactgcattttgtttgtcttgttttcatcaatccaccggaattcagtgattaaatctcgcaagttaaaatttttcttaatttgctcaatatttttcagcgatatccgttcttttgaatgggtctattcacagaaggtttggttgtgaacacgaatattcaattgatatatgtgtactttttaaaggta

SEQ ID NO: 110905 - DNA, 1517 bp, Zea Mays
gataaccaagaacaaaccattgttggacgcgttcccctcctgcacgcaacctcatctcgtcctccagatccaggatggccgtcctccttgagaccttgcctccccgagtgctctcgtccttgcctgcaaggttcttgttgttttgttttggtggtcgagcatcgcatgttctgcttctggatccagatctggagaaatcgcgaagtcgtcgtcgttcggttcggagcggatctgaggcgacgatagatggaggcggcgggatctctcggtctgcagtcctgctccacctcgatggatgatgtctctgcgctgataattattggatcaatttcgataattattagtagatctatgagatatgccgcctggaagaggcgaggtaagctgcagcatgtaaaaaagagaaaaaagatgtgacatcctagaggaggaggcctttgccatgatgggtgcgctcgcatggcaggccaggcaataataaaaagatgattattgcgtgccgggggaggagatcgcacgggggttgatgtttttggccccgggttctcctccctcatcttgttccgtgttcctgtatgcgttgcttccgctcctgttggtccgctacgcacgccggatttttgcatcgagcacggagatctacaacaaaaacatggagctacgacgcgattcccaagtatgatggattccactattcatcaaccgaaattatggcgcgcttcaatcgtggctacgctgatggggaactgatccgttatggtgtgcttggatcgtggctgtgtggagatgtgtggaactcattggttataatggtgatgctgatggaactgattttgctcccgttggacggcctgattggttactttgccctgttgactgtttgagaacgtaccgcccaggtttacttatacttactgctttttgacggtactgtacatacagttcgacaatttatttattggcagttcaattcatccatttagctaggggcacgagagcatgagttcccctggagatcaatttcatgttgctttttttttgcgaagttccattttctattttcaatttgattagggctagtttgggaacttattcttccaaggtttcctaaggaaaattagttcatttttttttttgggaaaatgaagtttccaaaagggtttcaaatccatggtggtgtgggaattgattgcagtaaaggcgatgggtaagctgataccggtgggttgagaattagaccatcagtagcttactctttcccatatttaaactataatctacactacaaaatagtgcaaaaggtgttcatagtgacctatgaataatataatctacactacaaaaatagtccaaaaggtgtttgtagtgaccatatatgggtgtacattgtacctttttacattgtatttgtagtgatcatatatgggtgaactactgtacttttttatattgtagatcgtattatttatagtgtgcagtttgaatataggtaagctgatggtcttattgcctgtcaa

SEQ ID NO: 110906 - DNA, 392 bp, Zea Mays
aggtgtggatctttcctcaacacggtgaggtcatccgtttgactgctagcctaggcgtgctgtcccggatggatggtggttcaaatccaccaagattctttagtagtcggaacttattgctcaccaaagaacttaccattgctttaggatgttttatttttgtatataggcttagccggttagggcctgtttggatcagtttataagaaactgttttttgaaaattgaggtggttccaaatatatcactagactttcaaacagcatcttagttaaacaggaccttagttttgatacgaggcctgcactcagcccggcggcgatcaaaatcgaacgtgtgggatctctgatatttgactaggtctggtcggtagcaaaccaaacatgtaagaa

SEQ ID NO: 110907 - DNA, 2541 bp, Zea Mays
cgggagagggtaccataaatacatttgtttccgccaattattcgtcgataaccaagaacaaaccattgttggacgcgttcccctcctgcacgcaacctcatctcgtcctccagatcctggatggccgtcctccttgataccttgcctcgcgagtgctctcggtgagctactttgttttgatttatcaggaaatccgtttgcttcatgttatgcaggctcagatctgattgctggattcggcatcttacgggcttgaatagagctaggactgggagaaaacaacaaacccgcgttggatcctgtatcggttagtccttgccttcaaggttcatgttgttttgttttggtggtcgagcatcgcatgttctgcttctggttccagatctggagaaatttctaagtcgtcgtcgtcgtcgtcgttcggttcggagcggatctgaggcgacgatggctggaggcggcgggatctcttggtctgcagtcctgcttcacctcgatggatgatgtctctgcgctgataattattggatcaatttcgataattattagtagatctatgagatatgccgcctggaagaggcgaggtaagctgcagcatgtaaaagtctgcgtgcgtcgacagcaaaaaagagaaaaaaagatgtgacatcctagaggaggcctttgccatgatgggtgcgctcgcatggcaggccaggtattaataaaaagatgattattgtgtgccgggggaggagatcgcacgggggttgatgtttttggccccggggtctcctccctcatcttgttccgtgttcctgtatccgttgtttccgcgcctgttggtccgctgcgcacgccggatttttgcatcgagcacggagatctacaacaaaaacatggagctacgacgcgactcccaaggtacaatcggtaattatgttcaaacaatttttaagtcgttctgcgctccttctattacgagcaacgttttatattctgtgcttgcataatgaatcgaagaaatcctgacaccaatcgaactgaagatcctgaaacgcacgttaataccgttgacgtccgcttcacccagctcgattttcagtcttgtaatactaatcgctccatgagtctgaagtgtgcaaaaatttaggtcgcagctacacaaatttacatgctggttctgttcaacccgtgaatctcctaaggtcacagcgtttttatttcattctatattatatttcagtctggactaatgttgagatctccatatgtatctacgtctaagcatttttcatttgtatttaccatgttggtcaattgggatatttgtttcttgtatgttagcatgtttgaaccatagcaattggtggacgtgtgtagagaagattgcaaaactgcagtatgatggattccactattcatcaaccgagatcatggcgcgcttcaatcgtggctacgctgatggggaattgatccgttatggctcgtggctgtggagatgtggaactcattggttatagtgtgcttcaatcatgggtcatggcgatgctgatggaactgatttgttaccaaggtttaagttttcgctaccgttggacggcctgactggtactttgccctgttgactgtttgagaacgtactgcccaggtttacttaatacttgctgctttttgacggtactgtacatattgttcgacaatttatttcttggcagttcaattcgtccatttagaatttctaggggcacgagagcatgtgttaccctggagatcaatttcatgctgctttttgtaattgatcatgctgctttttgttacaaagttccctattctattttcaatttgattgagggttgcaaaattcatggcgttgtgagggaattgattccagtgaaggcgatggcgactggtaatttgatatcggtgggttgggaattagactatctccaccagattgtctatattcaaattacgctctacaaacaatataatttacactatgggtctactatattgtagattgtactgtttataaattgtagttttaatatctaattgtagattgcattgtttataaattgtttatagattgtttataaattgtaggtgttttaattatatatggtcattcatataatagagttttgggattaagggcccctttggtagggctctggcttctccaaaaacggctttaactctggctcacgaggtgaaaccacttctttagatgagacaaagttattttaaaaaatcatttggcaaaacggcttataggttgtttttcagaaagatccttatatatgtatatctctcctgtacgtggctagggattgagggcaggaccaaaaaataataatctggactggtgggaggactatagtgcaaaaataacgtgagccgaagccgggtgagccacttttttttagttcattttggaaaagtacttcactggtgaagccatctgaaaaagaggtgtttgacataacttttgcatgagccagagccgaagctgaaaaacattttttatcatatgcagcagagtatctttttaaaatt

SEQ ID NO: 110908 - DNA, 1122 bp, Zea Mays
cgccaattattcgtcgataaccaagaacaaaccattgttggacgcgttcccctcctgcacgcaacctcatctcgtcctccagatcctggatggccgtcctccttgataccttgcctcgcgagtgctctcgagctaggactgggagaaaacaacaaacccgcgttggatcctgtatcgatctggagaaatttctaagtcgtcgtcgtcgtcgtcgttcggttcggagcggatctgaggcgacgatggctggaggcggcgggatctcttggtctgcagtcctgcttcacctcgatggatgatgtctctgcgctgataattattggatcaatttcgataattattagtagatctatgagatatgccgcctggaagaggcgaggtaagctgcagcatgtaaaagtctgcgtgcgtcgacagcaaaaaagagaaaaaaagatgtgacatcctagaggaggcctttgccatgatgggtgcgctcgcatggcaggccaggtattaataaaaagatgattattgtgtgccgggggaggagatcgcacgggggttgatgtttttggccccggggtctcctccctcatcttgttccgtgttcctgtatccgttgtttccgcgcctgttggtccgctgcgcacgccggatttttgcatcgagcacggagatctacaacaaaaacatggagctacgacgcgactcccaagagaagattgcaaaactgcagtatgatggattccactattcatcaaccgagatcatggcgcgcttcaatcgtggctacgctgatggggaattgatccgttatggctcgtggctgtggagatgtggaactcattggttatagtgtgcttcaatcatgggtcatggcgatgctgatggaactgatttgttaccaaggtttaagttttcgctaccgttggacggcctgactggtactttgccctgttgactgtttgagaacgtactgcccaggtttacttaatacttgctgctttttgacggtactgtacatattgttcgacaatttatttcttggcagttcaattcgtccatttagaatttctaggggcacgagagcatgtgttaccctggagatcaatttcatgctgctttttgtaattgatcatg

SEQ ID NO: 110909 - DNA, 1142 bp, Zea Mays
attgttggacgcgttcccctcctgcacgcaacctcatctcgtcctccagatcctggatggccgtcctccttgataccttgcctcgcgagtgctctcggtgagctactttgttttgatttatcaggaaatccgtttgcttcatgttatgcaggctcagatctgattgctggattcggcatcttacgggcttgaatagagctaggactgggagaaaacaacaaacccgcgttggatcctgtatcgatctggagaaatttctaagtcgtcgtcgtcgtcgtcgttcggttcggagcggatctgaggcgacgatggctggaggcggcgggatctcttggtctgcagtcctgcttcacctcgatggatgatgtctctgcgctgataattattggatcaatttcgataattattagtagatctatgagatatgccgcctggaagaggcgaggtaagctgcagcatgtaaaagtctgcgtgcgtcgacagcaaaaaagagaaaaaaagatgtgacatcctagaggaggcctttgccatgatgggtgcgctcgcatggcaggccaggtattaataaaaagatgattattgtgtgccgggggaggagatcgcacgggggttgatgtttttggccccggggtctcctccctcatcttgttccgtgttcctgtatccgttgtttccgcgcctgttggtccgctgcgcacgccggatttttgcatcgagcacggagatctacaacaaaaacatggagctacgacgcgactcccaagcatgtttgaaccatagcaattggtggacgtgtgtagagaagattgcaaaactgcagtatgatggattccactattcatcaaccgagatcatggcgcgcttcaatcgtggctacgctgatggggaattgatccgttatggctcgtggctgtggagatgtggaactcattggttatagtgtgcttcaatcatgggtcatggcgatgctgatggaactgatttgttaccaaggtttaagttttcgctaccgttggacggcctgactggtactttgccctgttgactgtttgagaacgtactgcccaggtttacttaatacttgctgctttttgacggtactgtacatattgttcgacaatttatttcttggcagttcaatt

SEQ ID NO: 110910 - DNA, 397 bp, Zea Mays
ttcctagactgtttattttacaagtaagaatttcttcctagatttttgattatcaacgagaatttacactgaatcttttgtcagaaaaaatgcaagaatttcatataatccagtttattttttattttttgataataaaatttctctggtaaaaaatgctgtagggactaggagttctctaatttataattcatattgaattatcagcaatctcctttatagaagtgacgactatatgtagaaaacaaaaaaaagatggcgttcacgttttctagaagtggtgataatttgaactttgtccaaagtagtactgacatgttccgtgcgaaagattattctcaatgggaagaggaaaacactgtttccaaagctatcatgtcaaaaaaaaaacactaaa

SEQ ID NO: 110911 - DNA, 600 bp, Zea Mays
gatcaaacacaatttctacccgactccagtcctgagtcctgactccatctatcatctgcatgccgttgcacacgggagagggagatagagagcgcgagagatccgctcaacgctgcgctgttcttcaggacggattctctccggacttgtttacggagaaccggggggcggtgaccgttagaggacggcggccgccggcgctaagatctggtggccacaaactagctgcaccgtcgacgagtaccgccgccgttggcgcacattccacatccgagctttgagacgggaaaaaaatataggaagggcttcagagttgggatttcggagccattccctgccgcgtttcatccctaatcatcgaaccgtggttcaggaattcagtatgacatcagaaaaacctcggcaagatgaagtgagcaacgggctgggatgcagggttggatgaggagtcccaagcactgccatgtagtcatagaccctctcactatccttgcgtccagttatatcctagccattgagagaattatgtaaatgaactgctatcagtgctgcatttctatataaaccaatttgatccaattatgtaaatgaattgctatc

SEQ ID NO: 110912 - DNA, 544 bp, Zea Mays
tacgctcccacgctcgcgtcgctcccatgcggggcgacacgggcggctcccaagcccgcccccgctttccctctcttctcctctcctaccacgccacggtcggagctggccgccggcatggccgtccggctggcagggatgatggcggcgaggctctcttcctcgcgttggtggcacgctccgtagcaagccggcaagccatccctcgcgcggctgcgtggagttgacgtgggtggctgctgcggctgtggcggcgctagctggtgcccgcgctggtgtaggggacggcgacggggtctctttctttttccccacgtgtttccctcctttcttggcggcgacagcagctcaacctggggtcgctagcctgtggcccaagcggtcggatccggtgctcgggggtcggatctggaccttgtcgaccggatctgcctcagcagctggcagtaggtgcggtggcggccggtggcggttgcgttggcggcagtggttggggcttgtgcaggtgttgcgtggcgctctcttctttgccacctctcccctc

SEQ ID NO: 110913 - DNA, 159 bp, Zea Mays
caatttatttgaatagtggtcatgcatgtaaacactgtcgttattaatgtcttcttttttctttagaatccaaacccgttacacgacttcgtcaacgagtttttcgcttctagagggagtggtcacaactccaatgaccccgatatgtgatggtgttag

SEQ ID NO: 110914 - DNA, 120 bp, Zea Mays
agctgaaaatttatatattataccaaatccatacacaaactataaacaaatatgtttattatttagaaataaattcttgaattacaatagtatccacatacattgtttgttccgtacaag

SEQ ID NO: 110915 - DNA, 383 bp, Zea Mays
aagtctatagtaaatttggatagaagtaatgccattctcagacaaagaatgattttttagaaaaggcattcgaccactgattcgagcattatgttttacccatgcacaggtttgtttagtttggatagtgcttgctacatcttatggagataatcttctatgtaagttatggcctttacagatgtaggtctatgaaatctcctaaatttagaccactaaacaatctaattgttggatttgcatcaaacatttatttatcaagttttactgatctaagcaactgaaatgacaatgtctagagaacattaacatcaatactcagcctggttctagaaaatgaacaacccaatatacagattattaaaaatgtgaaaaagggaaaa

SEQ ID NO: 110916 - DNA, 1550 bp, Zea Mays
cgttcttttagctttcacatttatcgactcttgttgcatagtcataaagaaatcctccatatgtttaagatctgatatggaaaatatagtagacttctaactttgatgtgcctcataccgtcgcgtggtcgccattgccttgtaagtagatttccatggccaacaagttgtagtcctctatttaggaaattctaatggctcaagtgaaagggaaaaatattcttacagggccaccgatgtatcccgcgcccaggtcgtctccattcggggagctccacggctgcgaaggtgacggctgcgcttccgaccaggatacctggcctctacaccatgtgctacggagtggagtgcactgccgcctctgttgctcctgtatcctcctctcccaccgctcgttgtactgctgtcgctgcttcctcctcgtcacctcaccatcgtgcaactacgacaatggcgacacgctcatggcccctccagcaccaaccgtcacctgtcaggtttgccacgacgccgtcgcacacctcccatgcctctaccccccacccaccgatggtgtcttcgtctgccctccctgcaccgcggcccagaacggaaggcccttcacctacgcgccgccctgcaggcagccactcgacgagcgcaacgccagggttctcgtcctaggggcgcggatagcgctagcgctgctgcagcgacacgcgacagcagcgcgcgaagccgcggaacggctggccatggaggcgcgggacgctcgggcgagggcgcatgacgctcttatcgtggccttcgacctcgatgcggaggaagatctttcgtgtgtcgtgccacaacccaccgagaatgacctagcagcttctgaagaagaagaagaagaagaagaagaagatagtgaggcagagacggatgagggggaggtgatgctggtgcggcgcaacgtgatgccgccgttagtcacgccaacaatcgacacggggggcagtgttgtgccgttggcttccgccgaggccaagcacatgcctccgctgtcacaaccaaagctgctttttgaccttaatgagaatgcggctgagaatgagatagatgatgcccaggctgagcccatgcgacatcaggcgcttaactccttcaacgtgaaggaggtggcgatggctgctggcgcggaagctaccagggccagcccgtcgacgccacagacgttgcagttgtttccgatcacataccaagatatagtacctcggacgctgcaactcttcaatgatgatgacgaggagatgtaggactgtttatgattgagcttgatgttgtcaaactgatgaaggatgcagttgtgacttgtgaggtgttttttgttccatactttatctgaacttcctaaacttattggtcagtgatttcagtgggggtggagggcatttatgctacttgtgtgccccaaaaatgtattccatacatagctgttgaattgttagtttctgtggcatgtatcatctcttacattacagctcggtttgcactttgtgcatgccaatgcatgataccatttgcagttc

SEQ ID NO: 110917 - DNA, 660 bp, Zea Mays
atgttgattgcattgccgcaagcccctaagtgcagggcggatctcggtggctacgatgatgcttggcagcggaggcgacgatgtggtttggctcgacgggagcagcacacagaggtgtggagggagctacatgtagaggcttggcagaggtggaggtgcccatattccagacgcttcctggcaacatataaggacaactttctagcaacatggaatgactgggagatccgcatgcttgtgctcagcagtcccgccctccaccagctggcctacctgctcgcgtactccatctgcttcgagcgcacccaccgcatccagaccttctgggcaccattcctcctccacctcggcggccaggacaccatcaccgcctgccttctccaccgaagacaacgacgtgctctggaagcgccacctgctcagcctcctcacctagatggcctgatgctccacagcagtatcctggaaacaccctcctatgatgagtggaagaataatttcccagaccaagaaacagaggaagatcaacccatcataggccactctatcatccatggtgtgacagctgaccaacaattcctaacccagcacaaggatatccgtgtatcagcatgccgctatgctcaccaccacacagtgcatcacaacccacctatttag

SEQ ID NO: 110918 - DNA, 2833 bp, Zea Mays
atggaagcctctttcttgaggaaagatggcggtgatcaagccagtgcggcgacaatgtccggcgagcacaggaacaagggccttgactgggatttgaacgactggaggtgggacgccaacctgttcctggccacgccggcggccatcgtgccgtccgagtgcagcagcaggaagctgagtcgagctcagggggagatcgacttcggcgtcgtcgttgacaagaggcggaggctctcgccagaggaggacggcagcgccggttgcagcaattctggggtagcagatggagacaacaatcatgtggtgcctgctcagagagggcggagcagcgaggaggagacacccaggaaaggtgccagttcgagcaccactccgtcctgccaggttgacggctgccatgccgatctcagcggtgccagggactaccataagaggcacaaggtgtgtgaagcacataccaggacgactgtggtctgcatcaagaatgtagagcatcggttctgtcagcagtgtagcaggtttcagcttcttcaagaatttgatgaagggaagaagagctgccgctcgcgtctagcacaacataatggaaggagaaggaaagttcaaccacaaactgttgtgaatgggaattccatgagtgaaaatcaatctctaagtaacacctcaatccttctgttaaaacaactttccaggctagagtctggtagctcctctgagccaatcaatcatcctaattctttggttaaccttttgaagaaccttgctgctattgctagcacacagtcatatcaagatattctaaagaatgcaaattcaaattcaatattgtcaaatgctggtaataatgctgcaaatggatctactgtgcatgagcaaactatacggtcaattccaatcagaggagaatcattagcagaagagcctccagtgaaaaggcgggtacatgattttgatttgaatgatgcttgctttgaagaagttgagagccgaacagataaaattgtgttcaagctgtttggaaaagagccaaaagattttcctgtagatctacgggaacagatccaacactggttatcgcattatccaactgatatggaaagctatattaggcctggttgtgttattctaactatttacctccgcctccctaattggatgtgggatgagcttgatgatgatccagcttcgtggatagaaaagcttattagcatatccaatgatggactttggagaaaaggatggttgtatgctagggtacaggactgcctaacactgagttacaatggtagtcttatgtttgcatctccctggcaactggtaattggcgacaagcatcagagactgtgtgtaactcctattgcagttgcttgttcttcgtctgtaaaattctctgtgaaaggtttcaatatagttcagccaactacaaaattactttgtgtgtttggtgacaaatatttaattcaagaagagacacaaatgctacttgaagattcaactgtgcagcaaggccctcaatgcctgaccttctcatgttccttttcttgtacaagtggaagaggattcatagaggttgaagattatgatcaaagcagcctttgtgttccctttgttgtcgctgacaaagatgtatgttctgaaattcggatgttggagcatggattgaatttaatttcatttgatgaaacctcggaaagaatagatgatctgatggcttatcgcaatcggtcgttacattttttgcatgaaatcggatggctccttcaaaggagccatgtgcgagctacatctgagcagccacagtattgtccagaccgtttccctgttgaaagatttagatggctgctatcctttgcagttgatcaggaatggtgtgctgttttaaggaagcttctgaacaccatgttccagggtgatattgacctagatgttccgtcaccaattgaattcgccttaggagaaaatgtgttgcttactgctgttaaaaaacgctcaaagcctttagttgagtttctattaagatacacagcaacagattacgccccagtgggcagtggagccggcgctccagttcagttcttgttcactcctgcgatgactggactgtcaaatattacacctctccatattgcagcaacaatcagtgatgctactggtgttttggatgctttaactgatgatcctcggcagttgggaatcaaagcgtggaagaacgctcgtgacgccactggcttcactcctgaggaatatgctcgaaagagaggccacatatcctatatccaattggtacaggacaaaattgacagaagggtgagcagagctcatgtctcggttaccatccccagcacaattgatactgccggaaagcatgctagccgattgaagcctgccgaccaaatcacatttggtgtggagaaaaaacagcgagggatgaaccaaacattgagctgcagacaatgtgtccagcaggtccagcagcttgcattccactcccggacaaataggttcttgtctaataggccggcgatgctttccttggtcgccattgctgccgtttgtgtctgcgtaggattgatcatgaagagcctgccacaagttggtggtatgaggcctttcctctgggacaagatacgttggggccccaattgatagactgcacaagacccaacccaattgtatcagtgtatgatgaagatgtttgcgccgagcgaagctagattcttgtaatgtacatgtttcttagactaaatgcctaaattgaaatttctgttccatagtaaaacctgtgaaatgctctaatttgcctagcttgtagctccattgcatttgcatcctg

SEQ ID NO: 110919 - DNA, 384 bp, Zea Mays
atgcgcgcagccgccctcgcccaacaaccatgtgctcccgcccccacccccgccgccatgcgtgcagccgcccccgaccatgcgcgatcctcgccgccgcgggacgggtcccagcggaggcagaaacgggtccccacggggaagtcatgcgcgtgggcgagcttggaggtcgacgcgaacgacaggcgcagggccgcgtcgccgtcgtcgcggatggcggccgtcggtacgacgcgcaggaaggggttgttgaggcgcacgtggtgcttcttggcagtcttgggcgacaccatagcgacgacggtgatggcgcgcacgggcgaatggaacggacggagaggccgtgcagtgctctctgctcggtccgaggccatcattggctga

SEQ ID NO: 110920 - DNA, 1203 bp, Zea Mays
cataaaattatcgccatcgtcttgtttccctccatttaaggacgcatcgatcgagcactgcttccacagcaccagagatcctgacagtgacaaccctccacagcaccagagatgaagagaagcagcactcgtgttgctcagcttgctgctctaaccatcctgctgtcgtggatcgccgtctcctctgtcgcatcatcggagtcggaggcccccttacaagtcggttactacagccgcacttgcccacgagcagaggatctcgtccgcaacgttgtccgcgccgccatccgccgtgaccccggcaatggaccaggcctcgtgcgcctcttcttccacgattgcttcgtcagggggtgtgacgcgtcggtgctgctggatgcggcacccggcagcaacgccagcacggtggagaaggcgtcgcaggccaacaaccccagcctccgcgggttcagcgtcatcaaccgcgcgaagcgcgtgctggagcgccggtgccggaggaccgtatcctgcgccgacatcgtcgccttcgccgcccgcgacgcctgcggcatcctgggcgggatcgacttcgccatgccggcggggagacgcgacggccgtgtctccaatgcgtccgaggtgctcaacaaccttccggggccattcaccaacgtccagctgctcgtcgcctccttcgccgccaagaacctcaccgccgacgacatggtcatcctctccggcgcccactccttcggccgctcccactgctccgctttctccttccggctctaccctcagatcgccgaggacatgaacgccacctacggcaggtacctcaggacgcggtgccccgcggcgacggggcgacgcgaccgggtggtggacctggaccagaggacggagctcctgctcgacaaccagtactacaagaacgtgcagacgcgcgaggtgctcttcacgtcggacgtcaccctgctcagccagaacgatacggcggcgctagtcgacctctacgcgcgcaaccggacgctctgggcctcgcggttcgcgtccgccatggtgaagatgggccacctcgacgtgctcaccggcacccaaggagagataaggaaattttgcaacagagtgaactagtagctgtgctagttcaactggttagacaagtggatggattttctcgctctccttagcttagttacatattgtctaatatttttcgttctt

SEQ ID NO: 110921 - DNA, 1134 bp, Zea Mays
atgagttcagcgcctcctcttcccgtcgtcgatgagctgtaccgcgacgacgttgcgggggtgatgtccttgggctcaagagcattcaaggtgctcgaccgaatggccgagagcgcgagagccgacagtctggtggtgaacacgttcgatgagatggaagccgtcatccaggttttcgatgtcttcaatgtctggcggccccgagtggactcctccatcgagcatcttcaaacctctatggcgcagatccgtgcgtccctcccatctctagagtcgccatggtcccagtacactcgccgcaacggatctggccacccaaacgcctacggcgccgccagcatcctcgtcaccgtcaagtgcgtgctctacgaaccccactcgttggctacgacgactccctcgatgatgacccggagtccggtggtggctatcgggtcaacacaagccacatgttcgacgatttacctggccgacgacctcaacttcactgacatctccgttggcgcgctctgggaggagacgatggaacaagcggcaacgactctacaacctagttttcctgagaagaaatcggtgctcctctcctcatccactgatggtaaactcgaaggtatgaaggcctatcatctctggttcgacccctccgtgttggtcatgctgctcaccaggtacctcgttgagcggatgacgctctactacgacaccaacaccgatgactaccacaatgcaccccgcgtcaagaccagggtatccgactttgggtccacctccacccttcgctacctgccaagggggcaaccttcacagatgggcagcgcgtacctgcagcgcctcaggctgctggtggcgtctatggtcgataagaggtgtgctctcgatgcactctcctacaataatctgattgactggctagggaagaacaaaattctggaggaggcattagacaaagagggtagagatggtgttcaagtcacaccaatgccttggccatccttctttggtattaccatttcgaggcacttgttggaatctctgtcattggtgttttactgctcggtgaccatcaaaaagagcatattcacccattgccacttctgtgtgatctgttggaagcattgctttgagtttctataa

SEQ ID NO: 110922 - DNA, 1673 bp, Zea Mays
tttggtatgcacagcacactgtactgttattttatatttatgaagctaacattatggatgtactcacattatgactcagcaaggtcgcaaggcgggcacgttccgcgttctggtggtgctctcgttacatttgccaagctcaatcattgattattgaaccggtagccgaagccaagaatataaaaccctgcagcctgcacgcctagcctcagagcccagcgtccgtctcttgctcatcagcatcagctagccacccgaccaggcttcagaaaacaaaaaaatgaagctctcggcggcagtcctctgcgcgcttgtggctgttcaggcggcggtgcttctcgccaccgtgccgacggcgcaggccagcgagctggaggtcgggtactacagcaagaaatgcaagggcgtggagaacgtggtgaagtggcacgtcatcaaggcgatcaaggccaaccgccgcaccggcgccgctctcgtccgccttatcttccatgactgcttcgtcaggggttgcgacggttctgtccttctggacgcttcctacgacaaccctcacccggagaaggaggcgccggtgaacatcgggctcgcagccttcgacgtactggaggagatcaaggccgctgtcgagaagaggtgccccggcgtggtctcctgctccgacatcctcatctacgccgcccgcgacgccgccagcatcctcagcaacggccacgtccacttcgccgtccccgcaggccgcctggacggcttcgtctccaaggccgaggaggcccaggcggagctcccggactccacccacgacgtgcagcagctcatcgacaacttcgccaggaagaacttcaccgtggaggagctcgtcatcctcaccggggcgcactccatcggccagggccactgctcgtccttcactggccgcctctccgagccacccagccagatcaacccggcgtaccgcgacctgctcaactacaagtgcccccaggggtccaaccctcccgtggccaacaacgtccgcgacgaggactacggcgtggtggcgaggtacatgccggggttcaccagccgggtgcgcaagatccccgacttcctggacaactccttctaccacaacaacctcgccaagatcgtcaccttccactccgactggacgctgctcaccaacaaggaggcgttcggccacgtcgtggagtacgccgagaacgccacactgtgggacgaggacttctccgactcgctgctcaagctcagcaagctgcccatgccagcgggaagcacgggcgagatcaggaacaagtgcagcgtcgtcaaccaccgcctatactaagccagctcccgtacctgcaacaatggaaatcgaagaaagaggtcgatcgtgtccgcacaaccacatatcaaacattgtaaatcaaaatgagccataagatttttgttgtttttgtttcatccattcttttgattctcattcgttttactacacactcatctttttttttgtgtatctctcgtatctgtcaaactgcaataaaactttgttactgacattctattggcaaatgtcattgtcgtgtactcgtgtacaacatacgagtggtcaacctttcattatattagagaaactaagaacttcacctacgcgttgaagcttgttcagtactgccacaaaagaaaaa

SEQ ID NO: 110923 - DNA, 1578 bp, Zea Mays
tcttggctagagttctttactcacgagcgaggagttgtacctctaggttttggccagggcttaagttgtttcgtacctctctgcctttgtatcatagttttgttagacttgggtcgaggacatgtattgttctagaaaaggtgtgtatattgtttaagtccttggtgtgagtgggtgtttgtgttataggccattcccagtgctagatttcattacagttttgaataacttgtaggtgatgaaatgaaacaagacccacaatgcatagttttgtttcatagtttcataggcatacacatttaaatgttgcatattgttatgaattaatgatgtgcaacttcatgcattccttgtcaggctagcgaataaggaccttgatttcccatttctggctcttctaatttccggaggacacaaccttcttgttctcgctcatggtcttgggcattacattcaactggggactactatagatgatgcgattggtgaggcatatgacaaatcagcaagatggttgggccttgatatgcggaaaggtggtggtcctgctcttgaagagcttgctctagaaggtgatccaaatgctgttaagttcagagttccaatgcgacagcataaagattgcaatttttcttatgctggactgaagactcaagttcgattggcaattgaatctaagaacttatgtacagaggatattcccgtttcggctgcatcggaggaggacagacaatcaagggcgaacattgctgcctcttttcagcgagttgctgtgttacatttggaagaaaggtgtgagcgagcagttgaatgggcattgaatatggaaccttccatcaaatactttgttgtttcaggaggtgtcgcatcaaacaagtatgttacgactcgcttgaatcatgttgctgggaataatggcctacaacttgtatctcctcctccaagcctttgtactgacaatggtgtcatgattgcttggactgggattgagcattttgttgccgggaggtttgaggacccacctgctgctgatgagtctgatgatatgcagtatgagctgcggccaagatggcctcttggtgaggaatattcaaaaggaagaagtgttgcacgatcattgaagactgctcgagtccatccatcactaacgtccatgatacagggctcccttcaaaagtagttgagttggaagttggaaactaattattggtctcagctgctttatgcagttgagtttcccgtcttctagttttgggttcacaaatcagctgatttatctgtattcgctgaattgaagtaacaaacctgcaaaagggccgaactagtttaatagtagatgaggctatatacaaattcagttcataccagtgtttttaaggcgttgcctaggtgatgtctaggcgtctaggcgctcgaataattctagtcgccttgcttgcctacgcgtccaggcggtggtctaacgtctcgccttaccgtattaagaacattggttcatacataccagaagatgcttatactccatttgtgtttaccatggaggctggctgtatcaggccccacgcattttgaatgtag

SEQ ID NO: 110924 - DNA, 110 bp, Zea Mays
cttccatcgacaacctcaatattacaagacgttatggaaggttgttgatgtgctagctcaattaatgttattgaatgttgttgatgtgctagttcaattaaaaaaagaaa

SEQ ID NO: 110925 - DNA, 792 bp, Zea Mays
gcttgtgtcaatgtttggccaatatcaagtattctttctatgttgatatgacagtgagctttgtcctagtataagtgtacgcttcttctctagaaactcactattgtgttactatctttgttcacataattgtcgtgcgggccatttcagactattatgtctatatataagatgttgttgactaagtaacttatttacttatatttatgttttcttcatatgttcttgttttacttattctgattctgactctaaagcattatactttgtacttgtatttgtgttgcaggaactatcctctactgatggctacatggaaggtagcccctgcattggctgctggttgtacagctgtgctgaagccatctgaactggcttctgtgacttgcttagagcttgctgatatctgtaaagaagtcggtctcccttctggtgtcttgaacattgtgacaagattaggtcctgatgctggcgctcctttgtcagcacacccagatgttgacaaggtcgcttttactgggagttttgaaactggcaagaaaattatggcatcggcagctcctatggtcaagcctgttacactggaacttggtggaaaaagtcctatagtagtatttgatgatgttgacattgacaaagctgtcgagtggactctgtttgggtgcttttggaccaatggtcagatttgcagcgcgacatctcgtcttcttatccatgtaaactatctcttattaaacccatgtcataggtattacaattcagcctcatgttgcttttggttgatcaataaca

SEQ ID NO: 110926 - DNA, 1393 bp, Zea Mays
ttttcatccttaggtggcgggcgggcgcgtgatccgcgggcgggaggggaaccgcggcgggggcagtctacactttactcttaatagttagtagagatttgaaactaggtctaaaaatatatttgaaaagataataataaaaataaaaaataagaaaatgaaccctaaaacctcagccccggcgcacccgaaccggcaattaggcccgcaaacaacaccgctagccatgtggcgccgcgcctcccacctcctcatccgcaccgccgccgccgccgccgccccgacccgccgcctcccacttcctcacccgccgctacccatcgccccaagagtggcctccgcatcctcatcctatgccacagcggtcgcggcgagggcaccgcggacggtagggaccctgctgcggctcaacgacctgtgtgacaacccgggcgcgcggaagcagaagacgcgcaagggacgcgggatcggctccggcaaggggaagacggcgggacgcggccacaaggggcagaaagcgcgaggcaccgctaggttcggcttcgagggtggccagaccccgctccgccgccgcctgccccgccgtggattcaagaaccccttctcactcacatttcagccctgtggactggggaaaattgcaaaactcataaatgctgggaaaattgattcctctgaattgattaccatgaagacactaaaggaaacaggtgccattgggaagcaaataaaagatggaattcgtttaatgggccgtggagcagaagaaatcaaatggcctattcaccttgaggtgtcaagggcaactgcaagggccaaagctgccgtggaagctgctggtgggacagtaaggctggtgtactacaacaaacttggattccgggcactcctgaaacctgagtggtttgagaagaagggccgcctgttaccaaaagcagcaaggcctccacccaagcagcgagataaggtcgatagcattggccgcctgcccgcgccgacaaagccactccccttcacggtagaggagctggagtttgcagcccagcgtgaggctgcccgcgtgactgcataagatgggagcacgttggcagcacctttttttctgaaagcatgcgccactggatgtgtatcacattagctttagcaggacatgcataagaatggaccgttttgtcttttttttttcttttccctcaaggaatggactgttataaattaaatatccattcatttgaatcagatgttgctgtaatttctgaacttaccttgggttttgattgataaatgccattttttctgaataggctcatgtatgatgtcattttacctgccaccttttgatcctgtaatgacaattgagaaatgccgtttatttctgtgaaataggtgaaaa

SEQ ID NO: 110927 - DNA, 876 bp, Zea Mays
atgtttggtagtgaaggacgacgtccagagagtaagaacgaggcgacacagtatggactcgatatgactgagcaacaataccttgagcattcgattccatggatagctatcaatgatgttgcttggcgtgcgttatatcgttactgggcttcggctgacttcaaggcaaagtctgtgcgacacagttccaatcatggaaccgagtcgtatcacaggtatggaggtgatgatcactttcgtttggcaaaacaaatgtgtttgtcaaatgtacatacaggaaagctagcactggtgcagtgcccagtaatgttcaaatataccttaggaggcatagaggaccagatcctgcaaatccagatgtgttgtgcagccaaaaggaaacagatcgtgtggtacacaatgtttgctaacgtcatcgactcgagccaggtgagggttcagcgtggaggttcatcgaggtctgctgctcatagctcccgtcgctccactcaagatccagcagaagtggagcaactacgagaagaacttaggcgacatcaggattacttgaagcaacaagctgcgcaacatgaatattatgctacacagattcagcaacaacaaacactcatacaacaactagcacaggcccaagggatacacgtcccggtgccccccaccaccacctctcgttcattatccttggtcttcacctccacctatacctacatctccatctaccgaacatcaggcttattaagccgtaggaagttagctaacttcctagagccctctaggaagttaagatatgcgtctgagaacatcattgcatcattccactgggcatacaagggtgttgaggaagactcaaccctagaagatccttatttcttataa

SEQ ID NO: 110928 - DNA, 531 bp, Zea Mays
atggccttactgatgcagacaaggatcaaccaaaatggatgtaccagcacatcggtatccaaaatccaccacccaacccaatcggtacccaatcaaattgtagacttagatgctgaagactctcgtccatcaagctttacttcgaagaggccactaagtcgtgattcgtccaaggaaaaggcaaagaagcaaaggtctgttgacacatcatccactgattctgagtacctcacgcggatgggtgaactatctttggaacggttgtctgtgtataaatcagtagctttaactgagaggaagttggagtccatgaacaaaaacgagaggcaaaaactcatcttggagaggaagaagctaaacctagagaaacttaggatggatccacagaaattgaaggaggacaaggaagaggaggtcatgatattgagcatggatctgagtaaatgtaaccccctacttcgacaatgctacgaggctaagcaacaggagatattggcaagggttactggaaactcgtcgtcaagcaagtga

SEQ ID NO: 110929 - DNA, 923 bp, Zea Mays
caccggcccggacagcttctctctctctctggtactgctagagctacctagctagccagagccaggctctctctctgtagctggtcagtgatcaatactgccgccgcccacaaattccacctctcaagaacagcgctgcatggcggtgtcgttgtagctagcgtcgtcctcgcgtccatcgctatataattaagctagctgctaggagccatcgggagagagagagatcgggagagagaaggaagtttgatccggccggccggatcggatcggagctaggtgatcggtgcagctaactagctctagccatgggcaagagctgcgtgccccccgtcgccatggtgctcgtgcagctgggctttgccggcatgaatgtggtgtcaaagctggcgctggacgccggcatgagcccctacgtgctcatcgcctaccgcaacctcatcgccgccgccgtcatctcccccgtcgcctacttgcttgagagacgaagcggggcgacgatcacaaagaaggtgctcctccagatcttcgtctcctccatcttcgggtacgttgtcgcgcgcgcgctgcttctgcgtgccgccgttgctgctgctgcctgccatgcacggcccttttaatttttagacggcgatcgaacggagcgctttttagacgttcaagtgtcgatccatcggcaccatatatatatgcagggcgacgctgaaccaggtgctgtacttcgtgggcctcaagtccaccagccccaccgtggcgtgcgcgctcaccaacacgctgccggcgctgacgttcgtgatggcggcggcgctgaagatggagtcggtgcggccgggcacgccggcggggcaggccaagctggtgggcacggcggtgtgcgtgggcggctccatggtcatacccttctacaagggccccgtgctggg

SEQ ID NO: 110930 - DNA, 1889 bp, Zea Mays
caccggcccggacagcttctctctctctctggtactgctagagctacctagctagccagagccaggctctctctctgtagctggtcagtgatcaatactgccgccgcccacaaattccacctctcaagaacagcgctgcatggcggtgtcgttgtagctagcgtcgtcctcgcgtccatcgctatataattaagctagctgctaggagccatcgggagagagagagatcgggagagagaaggaagtttgatccggccggccggatcggatcggagctaggtgatcggtgcagctaactagctctagccatgggcaagagctgcgtgccccccgtcgccatggtgctcgtgcagctgggctttgccggcatgaatgtggtgtcaaagctggcgctggacgccggcatgagcccctacgtgctcatcgcctaccgcaacctcatcgccgccgccgtcatctcccccgtcgcctacttgcttgagagacgaagcggggcgacgatcacaaagaaggtgctcctccagatcttcgtctcctccatcttcggggcgacgctgaaccaggtgctgtacttcgtgggcctcaagtccaccagccccaccgtggcgtgcgcgctcaccaacacgctgccggcgctgacgttcgtgatggcggcggcgctgaagatggagtcggtgcggccgggcacgccggcggggcaggccaagctggtgggcacggcggtgtgcgtgggcggctccatggtcatacccttctacaagggccccgtgctggggctgtgggcgtccccgctccactggcgcttcgtcgcggaccacgcgccgtcgcccgccgccgccgccgcacactcgggagccgccgtgctcggggacgtcctcatcatcgccagctgcgtcgcctgggccgtctggttcatcctccacaccaagatgtccgagggcttctccgcgccctacaccagcaccgccatcatgtgcctcatggcgggcgtgcagtgcgcgggcgtcagcgccgccatggaccgcagcctcgacgtctggaagctcggctgcgacatcaggctctactccgtgctctacatcggcatcgttggctccggcatcgggttcacgctcatgtcgtggtgcatccaggtgcgcggcccgttgtacgtgtccatgttcagcccgctgctgctcgtcgtcgtcgccatcatcggctgggccatcctcggcgagaagatacgcgtgggaactgctgtcgggtccgtgctcatcgttgccgggctatacatggtgctctggggcaaagggagggagatggacaggccggacctcgacaacgacgacgacatagccgacgaggagaccgccgtgggccttgttggcttcagcggcaagggcggtggcgcggtcgccatcgcaagcagccgcgtcgaggccatcagcctgccggtgtcgttctccacaactagccccaagcggctgcaacacatccacgggtgaagggtgacgtggccgacgacgtgcgcgcgtgtcactttggacgcgccaagaaatctttcagggagccatggagagagtgagagtgtggtgaaaaaaaaaataaggcaaaatagctagtggacggaggcaagacgacggcggcgacgatcggattggagtggcacacataaagacttattgtatacggttggttgcattgccgttgcagcagcgtcacagcgtggtttgttacaaacaggaaacaaacaaacaggagtgtgtgatgatgtgactgtacctagtggaagctaaggattgcttgctagcttggatggccttcttgttctgtctgcccttcccttgcattggattggatgacctgatttagttcctccaaagagtctcattcatcatacagttctcttc

SEQ ID NO: 110931 - DNA, 1565 bp, Zea Mays
gtacgtttcagtgctgcattagctagctcttgcttgtgagatgaggcagtgcgtttccccttttaattcgattttctttcgagaaacgggcttccttgttcagctggtcgagaccgattgttttgtcgatctgggctcttcaaaaaagagtcgatgcatgacgaagcggggcgacgatcacaaagaaggtgctcctccagatcttcgtctcctccatcttcggggcgacgctgaaccaggtgctgtacttcgtgggcctcaagtccaccagccccaccgtggcgtgcgcgctcaccaacacgctgccggcgctgacgttcgtgatggcggcggcgctgaagatggagtcggtgcggccgggcacgccggcggggcaggccaagctggtgggcacggcggtgtgcgtgggcggctccatggtcatacccttctacaagggccccgtgctggggctgtgggcgtccccgctccactggcgcttcgtcgcggaccacgcgccgtcgcccgccgccgccgccgcacactcgggagccgccgtgctcggggacgtcctcatcatcgccagctgcgtcgcctgggccgtctggttcatcctccacaccaagatgtccgagggcttctccgcgccctacaccagcaccgccatcatgtgcctcatggcgggcgtgcagtgcgcgggcgtcagcgccgccatggaccgcagcctcgacgtctggaagctcggctgcgacatcaggctctactccgtgctctacatcggcatcgttggctccggcatcgggttcacgctcatgtcgtggtgcatccaggtgcgcggcccgttgtacgtgtccatgttcagcccgctgctgctcgtcgtcgtcgccatcatcggctgggccatcctcggcgagaagatacgcgtgggaactgctgtcgggtccgtgctcatcgttgccgggctatacatggtgctctggggcaaagggagggagatggacaggccggacctcgacaacgacgacgacatagccgacgaggagaccgccgtgggccttgttggcttcagcggcaagggcggtggcgcggtcgccatcgcaagcagccgcgtcgaggccatcagcctgccggtgtcgttctccacaactagccccaagcggctgcaacacatccacgggtgaagggtgacgtggccgacgacgtgcgcgcgtgtcactttggacgcgccaagaaatctttcagggagccatggagagagtgagagtgtggtgaaaaaaaaaataaggcaaaatagctagtggacggaggcaagacgacggcggcgacgatcggattggagtggcacacataaagacttattgtatacggttggttgcattgccgttgcagcagcgtcacagcgtggtttgttacaaacaggaaacaaacaaacaggagtgtgtgatgatgtgactgtacctagtggaagctaaggattgcttgctagcttggatggccttcttgttctgtctgcccttcccttgcattggattggatgacctgatttagttcctccaaagagtctcattcatcatacagttctcttc

SEQ ID NO: 110932 - DNA, 1464 bp, Zea Mays
ttattatacagttcttggggaaacgcaacgaaactgacacaacagttgtgtgcgtgcagacgaagcggggcgacgatcacaaagaaggtgctcctccagatcttcgtctcctccatcttcggggcgacgctgaaccaggtgctgtacttcgtgggcctcaagtccaccagccccaccgtggcgtgcgcgctcaccaacacgctgccggcgctgacgttcgtgatggcggcggcgctgaagatggagtcggtgcggccgggcacgccggcggggcaggccaagctggtgggcacggcggtgtgcgtgggcggctccatggtcatacccttctacaagggccccgtgctggggctgtgggcgtccccgctccactggcgcttcgtcgcggaccacgcgccgtcgcccgccgccgccgccgcacactcgggagccgccgtgctcggggacgtcctcatcatcgccagctgcgtcgcctgggccgtctggttcatcctccacaccaagatgtccgagggcttctccgcgccctacaccagcaccgccatcatgtgcctcatggcgggcgtgcagtgcgcgggcgtcagcgccgccatggaccgcagcctcgacgtctggaagctcggctgcgacatcaggctctactccgtgctctacatcggcatcgttggctccggcatcgggttcacgctcatgtcgtggtgcatccaggtgcgcggcccgttgtacgtgtccatgttcagcccgctgctgctcgtcgtcgtcgccatcatcggctgggccatcctcggcgagaagatacgcgtgggaactgctgtcgggtccgtgctcatcgttgccgggctatacatggtgctctggggcaaagggagggagatggacaggccggacctcgacaacgacgacgacatagccgacgaggagaccgccgtgggccttgttggcttcagcggcaagggcggtggcgcggtcgccatcgcaagcagccgcgtcgaggccatcagcctgccggtgtcgttctccacaactagccccaagcggctgcaacacatccacgggtgaagggtgacgtggccgacgacgtgcgcgcgtgtcactttggacgcgccaagaaatctttcagggagccatggagagagtgagagtgtggtgaaaaaaaaaataaggcaaaatagctagtggacggaggcaagacgacggcggcgacgatcggattggagtggcacacataaagacttattgtatacggttggttgcattgccgttgcagcagcgtcacagcgtggtttgttacaaacaggaaacaaacaaacaggagtgtgtgatgatgtgactgtacctagtggaagctaaggattgcttgctagcttggatggccttcttgttctgtctgcccttcccttgcattggattggatgacctgatttagttcctccaaagagtctcattcatcatacagttctcttc

SEQ ID NO: 110933 - DNA, 1226 bp, Zea Mays
tccccgtttgctttgaccatcccaccacgcgccttgccccaccaggccaccacgctatatttagctcccttcaccctgttcctctccccatcgacagcctccgccgcacgttcacacacacagcaagcagaatccagctagctcagctctcactcgctcgctcactccagtgtccagtctcccttcacttcaggacgtcctcgattcgccgccgtctgtcaaccgagatggacgcgctgtggaatggttcgtcgtgcgattggccggcgccgacggtgatcatcagcgacgacgacgcggcggcagcggagctgcggcgggggccgtggacagtggacgaggacgcgctcctggcggcccacgtggccgcgcacggcgaggggcggtggaacgagctggcgcgcgacgcggggctacggcgcaccggcaagagctgccgcctccgctggctcaactacctccgccccggcgtgcgccgcgggggcttcaccccgcgggagcagctgctcatcctcgacctccactcgcgctggggcaaccgctggtccaagatcgcggcgcacctgccgggccgcacggacaacgaggtcaagaactactggaggacgcgggtgcagaagcacgccaagcagctgcactgcgacgtcggcagccgcaggttccacgacgccatgaggaacctctggatgccgcgcctgatcgagaggatccacgccgacgactcagccgccgtcgccgctaatgccaccggcgacgtctcccacttctactccgcgagcccatcgcatgagctgtcgtcgtcctcccagccggcgccggcgtaccgaaacgctgcgcccaacggcagctgcgcgcgtgcgccgtccccggacgcctcctgcgtcaccgggccgtcgtcgtggtcacgggaggcgtcgcccgcgtcgcagttccaatcgagcggctcgaccattgccggaccgtctacttccaccgagctgtgccagaacggatgctccagcgcgacgagcgttgacatgttcgacgagagctggtcggagcttcttgcgcgcgccaaccatgacgacacggatttcggattgggagaaactggagacaactggtggggtctggaggatatctgggaacaaccgctttaaactgatcgctccctacttttgtactactacatactacgtatgctgcccgagacgaaatgacagaattgttgtttctagtgttattgt

SEQ ID NO: 110934 - DNA, 414 bp, Zea Mays
atgggtggcgaggagcggaccccggatccaaagccccggtggaaccccaggccggagcagatccagattctggaggccatcttcaactacggcttctgcggcggtgccccttgctgcgtcaccgggaaccgctgcgagcgtggagaccgctgggctcacagctttgcatgcaagtccgtacatttttttcctcaatacattattattgtatcaccatatgcttggattgtgttcgtatggattggggctccatttaagcagctacctgccatcactaggtccagaaatttttggcagagttccagctctccgctgattctttcgagcatccggtggaggcttaaaagtgcagtgctctctatggcctccggcgcaaatgcagtggaatcatgcgacacaaggtcaatcgtgtga

SEQ ID NO: 110935 - DNA, 1416 bp, Zea Mays
agtccatggcaggccagtcctcaagcctccacctcgacctacggcctgctgctgtctgttgggccgaacgggaggcacgaggcggagagcggagaggcgttccgttccatccaagctgatggcaacgagttctccagggcggcggcgcacgggcacctcctgcctaccagaaggcctccgcaccgagctcttctcatcgccaccatcaccagaaggcttccgcccctctctccagtgtctctttctctctccatcgcatggctctcgcgtgcgccactcacgcgcgccgcttcctcctcgctggcccggcgagatctttccacgcccagccctaccagggtacgccctcctgacctccatcacaaatcccgtgctgcttctttttcgtgactggagtcggatccttccttccggggtacagccaaggtcggcgtggtggagttcttgaacggcgtcgggaagggggtggaagcgcacgccgcgaagctggaggaggctgtgggcggcgacatgcagaggctcctcgaggcccgcacgctgcggctcaagaagcttggcatcccctgcaagcataggaagttgattttgagttttgctcacaagtaccgtcttggtctctggaagcctcaagcagaacccaggaaagttgaataaaattggtttgttcttgaaagctagtctactgttggactgaggcttgtttgggacattttgaatatttccttttgtaatttaggagccacaaatctttgttctctgtctctggccatacttatttgcatccattgtgcaattttttctagaaaatttccaacttcgcgtggaataacaaaccgcaacaggtgcagccccctgtgataatctatcacttattgtctgtattgttcctttggattcttaccaacaacattgcagttgtattaatgtaatctaagcaaattgattaggttcagattctcagaaagatacattactgtgcattagagttccagtcaatttatatgtagacaagtcaaacatgttgtaatgctatggttgtttctgtggttctacactgccctttcaagatgtaattgcattaccttttttgattatgatgctttttagttgaatttcatgtggttggcagacgcaacaaagtgaacactcgagcttggaagtttgtcctggttccagtgcggaaggacaagaaggtcatgtaacagacggctgtaaaacgaaaaatgcagtgcccgtttcattttaaatatgcatcacaagttgccttgtttttcagtgagaatatcttcagtgtaccatggtaaataggggttttacattgtagatgacattatttgcactttgcagtgtttgtagagtgaagattaaggtagtgtttggttgaagagctaagtagaacggaaccgttctgtccca

SEQ ID NO: 110936 - DNA, 1514 bp, Zea Mays
agtccatggcaggccagtcctcaagcctccacctcgacctacggcctgctgctgtctgttgggccgaacgggaggcacgaggcggagagcggagaggcgttccgttccatccaagctgatggcaacgagttctccagggcggcggcgcacgggcacctcctgcctaccagaaggcctccgcaccgagctcttctcatcgccaccatcaccagaaggcttccgcccctctctccagtgtctctttctctctccatcgcatggctctcgcgtgcgccactcacgcgcgccgcttcctcctcgctggcccggcgagatctttccacgcccagccctaccaggccaaggtcggcgtggtggagttcttgaacggcgtcgggaagggggtggaagcgcacgccgcgaagctggaggaggctgtgggcggcgacatgcagaggctcctcgaggcccgcacgctgcggctcaagaagcttggcatcccctgcaagcataggaagttgattttgagttttgctcacaagtaccgtcttggtctctggaagcctcaagcagaacccaggaaagttgaataaaattggtttgttcttgaaagctagtctactgttggactgaggcttgtttgggacattttgaatatttccttttgtaatttaggagccacaaatctttgttctctgtctctggccatacttatttgcatccattgtgcaattttttctagaaaatttccaacttcgcgtggaataacaaaccgcaacaggtgcagccccctgtgataatctatcacttattgtctgtattgttcctttggattcttaccaacaacattgcagttgtattaatgtaatctaagcaaattgattaggttcagattctcagaaagatacattactgtgcattagagttccagtcaatttatatgtagacaagtcaaacatgttgtaatgctatggttgtttctgtggttctacactgccctttcaagatgtaattgcattaccttttttgattatgatgctttttagttgaatttcatgtggttggcagacgcaacaaagtgaacactcgagcttggaagtttgtcctggttccagtgcggaaggacaagaaggtcatgtaacagacggctgtaaaacgaaaaatgcagtgcccgtttcattttaaatatgcatcacaagttgccttgtttttcagtgagaatatcttcagtgtaccatggtaaataggggttttacattgtagatgacattatttgcactttgcagtgtttgtagagtgaagattaaggtagtgtttggttgaagagctaagtagaacggaaccgttctgtcccagttttgttgttgtttggttacaaagtaactagaacggaatgactctaattagagaatattctcctcagatccggaaccattccgctccaaaaaatcaatgggacggagccgttccgttccaatcccgctctcacagtcacgctccgttccattcactctgcaaccaaacaaaaaacagaa

SEQ ID NO: 110937 - DNA, 818 bp, Zea Mays
agctagttgatggttgatccaaggggtaaaagcttaagggttctgtggaggaatcgtagagggttgtttggtggacaagttttatttaacttgctctccctgttattacgagaaattgagaagttgaagggggttaacagggaggtacgcaacaagacaatagagctgatgaggctgattcagaattgggttcagattctgttcaagtaactgaagaagatctgtcttccttgttgtgtttatatttgagtgaaggggtagagataaggattaaatgcacagcttagaagtttggggctcactctgtactgaagaatatccagttttggactgtttgaaggcagtgaacagggagactttatctgttagccttggatggattgagctgggcagcaaagtaactctagtggctaccccattagaaatatcaagtcttggacatctttgtgcttagccacaagtggtgttctcagccacacgcctgcctgtctgtgttcactgaataaggttgatattttgggctgttagagcatatccacaagggatatttgtgtgctagctgtccagattcagtgtctatattgtgcctgtcagtttgtgagtatttgatgcatgaaagccacgtattggagcccaggttgtgctggcatctctgggaactcttcacctccatgcactgcacaggtttagtgacatctgtccttcatctgtggctataaaacttggtccagggaagttttcctccctatcctcaagctccagccaggttgcagcgtgtgtgagggtggtaaatcttctgtccacaccagtgttcacct

SEQ ID NO: 110938 - DNA, 224 bp, Zea Mays
attttagataatttttagaaagaaagatttatttgaatttggttcccttatggaaattatatatgtgaaatctataaaaaaagtactaaacaaattttctgcttttgcatatcatactggatttctatttgtgcatttgaacttgagtgtataatttaaaacctaatttggatttaaacaaatataaatagaaaagaaaatagaaaacaaaaaataaagaaaaa

SEQ ID NO: 110939 - DNA, 447 bp, Zea Mays
atggaacgtgccttcctcacctccctgagaaccctttaccacgactctgacgagtcggtctcttctttgagcgacaaggagctcgagaggtgtgttgaggacaagcgcaatagactctgcttcatcatcgacaccgctagaggcctttgtaccatgtcccttgcagatgatgcggtgggcggcgacggccaggatctcaatgacgactctgcttctaaggtatcacactccatcgatgatcttgttgctgaggtagaagagttgaatgttgctttggctaatcaggataagttgcttaggcttgctgcttgtgagaggaaaggtttcaagagaaagtacgagagcacacttagggagcttgagtctactagagcttcagttgtggtgtctgacgagactgaatgtggtggatttgctctacacatgtcgaacatcacaactttctag

SEQ ID NO: 110940 - DNA, 831 bp, Zea Mays
gccacaccaacgccacgacatggacgccgccgccgccgcctcactgttgccccgcgccgccgcctcctcactgttgccccgacgcgttctctctcctctccatgtttcccgaagcggcctccttccccgtcaaagctccttcctcgctgctcgctgtgcccactcccgtgcccctcctccacatccgcctctgccgcgcgccgactgcgatgatgctgccgccaaggcgcacccgcgcctccgtctccgcctgcttgcggaggagttccgcgcactcccatctgacgcagatcgcgcgcgccggctcctctcactcgcggccgcgctgccgcggctcccggagcccgaccgcgcccagggcaaccgcgtcatgggctgcgtcgcgcgggtgtggctcgtcgctcgctgcaacgcgtcaacgggctggcggatgtggttctcggcggactccgactctgacctctcgcgtgggtactgcgcctgcctcgtcgccgcgctggacggggccaaacctgaggacgtcctcgccgtcgaccccgccgatcccgacctcgcgccgctcggggcggggacaacggcggcctggtcgcgggccagcacgtggcataatgtgcttgtcggcatgcagaagcgggcgcgcacggccatcgcggcgcgcgagggtaggcaccccgggaagccgtttccgtcgctcgtcatcgcgcgcgacggcgccgtcagcgcgcagggcagctatgccgaggcccagggaactttggggaacttgtgtggtgtctctacaactgtaaatgtggaaaatgaagattagttgcttcttaggagtctatgaat

SEQ ID NO: 110941 - DNA, 145 bp, Zea Mays
agcaccagcgagagacctcaagaaggccgaggcgagggttcccgcatgggggcgagaggtccaaagacgacaccctcaatagggtaggggtggcgcccgcgagcgtcaccactgtccgcccgcaagcgggcatggctttcgccag

SEQ ID NO: 110942 - DNA, 1851 bp, Zea Mays
ggtgaacgttacttataaaaaagaaaatttggtggtgaaattgacagaaaatgacaacttaaattatcttgaatgtatcattttattgtaagtcttcgtattgatatctacatgaagcaactcactacaatttaacgtttaattgcaggcgatgtttttatcccctgatgagtccaaggtttcaggccttgtgaatacccttaaagagaaaaaaatcgggattgttgcacacttttatatggatcctgaggtgcaaggcatactgactgctgcaaagaagcagtggccccacatccaaatatctgattccttgattatggcagatagcgctgttaaaatggctgaagcaggatgtgactatattacagttttaggtgttgacttcatgtcagaaaatgttcgggcagtacttgatcaagcaggatttaataaggttgtcgtttatagaatgtccagtgaaccgattggttgttcattagcagatgctgcttcaagttgtgaatatactcattttttgagggaagcttcgagatgttatccatctttgcatgttatttacattaatacttcgctggaaacaaaagctcatgctcatgaacttgttcctacaataacttgcacctcttctaatgttgttccaactatactacaggcattttcccaaataccaaatgttaatgtctggtatggtcctgattcatatatgggtgcaaacatagcagatttatttcagagaatggctacaatgtcagatgaagaaattgcaaaaattcatccagaccacaacagaaaatctttgagttcattactgccacgtctacactattatcagagtggtaactgtatggtacatgacatgtttggccatgaggttgtggagaaaataaaggaacaatattgtgatgcatttctaacagcacactttgaggtccctggagaaatgttctctttggcaatggaagcaaaacaaagaggaatgggagttgttggatccactcagaatatcttggatttcattaaggatcatgtgatgggagctctggacaaaaatgtagatgaacaccttcagtttgtgttaggaacagaatcagggatgatcacttcaattgttgctgctgttcaggaattacttcatttttattcttctcaagagagagcaaacatcaaagtagaaattgtgtttccggtatcttcggatgcaatttctaagacatcgaatggttctcatcatgttggttcttcaatggctactgatttggataatcttactattgttcctggtgtgagttctggcgaaggctgctccattcatggtggttgtgcctcgtgtccctacatgaagatgaataccctggggtcgctaattaaaatttgccatcagcttcctgataaaaacaacaaattatctgtataccaagctaacagaattaatgtcaggacacctctcggaaaatcagttgcagaggttgggtgtgagcctattctgcatatgcggcatttccagaaaacaaggaggttacccaacaagcttgttcaccaggttgtccatggtaatggtgacaaacccttgcaatagctgttcatcaatacttgtatttattttatcaaggcggctggatgatggagtatatctcaagtgaatgccatgtttagctggcataccgaagaaatctccgggacaagattatttgccctgtacggtagacatctggacttgccctgtacgttagacatgttgacatctgcatgcgaattaatgttgaacaaatggggttggtctaattgtaaaaaataattattctgaataaatcttaattgctttgagcgaaactgataaatcttaaactgaat

SEQ ID NO: 110943 - DNA, 581 bp, Zea Mays
cagggcggcatgtcaaatgagatgtacagcaccattgccagagtgacagatggtatttatgaaggaattgcaattggaggggatgttttccctggatcaactctgtcagaccacattctgcgttttaataacataccacaggttaaaatgatggttgttcttggggagcttggtggaaaagatgagtattcactagtggaagcattgaaacaaggaaaggttgagaaaccagttgttgcatgggtcagtgggacatgtgcacgtctattcaaatcagaagtgcagtttggtcatgctggtgccaagagtggtggtgagttggaatcagcacaagctaagaatcaggcactaagggaagctggtgcagttgtgcctacatcatatgaagctctagagagtgcaattaaggaggtatttgacaaactggttgaggaaggaaaaatttctcctgtgactgaaattacacctcctcccattcccgaggaccttaaaactgcaattaagagtgggaaggtccgagctcctacccacatcatttccaccatctccgatgacagaggttaggttgctggcggcatgtt

SEQ ID NO: 110944 - DNA, 976 bp, Zea Mays
ttttggccaacaatggttttctatatcttgagttcatttaatctaaaagtttttttaatgcgcctcagatatgcatcatgctttgtgcggaccatggtccctgtgtatctggtgctcataactctatagttactgctagggctggaaaggaccttgtttccagcttggtgtctggattattgacaattggcccccgttttggcggagcaattgatgatgcagcccgatacttcaaagatgcatgtgataggggcctcacaccatacgagtttgttgaaggcatgaaaaagaagggaatccgtgtgcctgggattggtcacaggattaagagcagagacaacagggataagcgtgtgcagcttctacagaaatatgctcacacgcatttcccttcagtcaagtacatggaatacgctgttcaggttgagacctacaccttgtcaaaagcaaacaatttggttatgaatgtcgatggtgcgatcgggtcactttttttggatcttctgtctggaagcggaatgttcaccaaacaggagatcgacgagattgtggaaattggttatcttaatggtctctttgtccttgcacgttcaattggcctgatcgggcacaccttcgaccagaagaggcttaagcagccactctaccgccacccatgggaggatgtcctgtacaccaagtgagatagagccattctttgcaaagcataaagtattattgtcgcttagggctttcagctgtctgtacacttcataaatcgagcagttgcaaaaaaagctcgaaattgtgattgttgatgaagttaggggcagggggagagacatcgaggggaggcactactagattgtgtgttttgtgttgagttgtttcacgatatacggcctcagaatagaagttccctttgaaatgaagtaacgctcgctgatttatgagttgataaattgcatttgttcaggcacgcaccatttgtgacttt

SEQ ID NO: 110945 - DNA, 1756 bp, Zea Mays
aatattatgtataaaaagtttggtgacaaataaaataaacttattaaactccctcacacattcccatacacacgtttccccataagcccacacaccatccagtgcagtccggcctcttctgtatttttataggagcagtaggcagtagatgctgcctcggctctgcgtgcgaaaacatgtaccggtcgagttcatggtgaccccaccccacagagaatcagagagataggatagcatagcagagcagggggcgcctttgcatcgcgaggtcactcctgtcccctcgcctccgtcccctccacgcagcagcagctacacctacacagctgtgtgtgtgtcggtcgccagaatcccagaaattagatagctggggttgggcgggcgacccgccgcgactgcagcgagaaccttggacatgagttgagaggccctatcttttcatgcccatgtccatctcgcgagtgatgagtgagaaaccgattgattgattgattgatgtgtgatgcctcactagctccttcgtggcaaatctcatcagcaacagagacggctggtgtgacagcttgtgaagaaaacgccggctcgctcgctcgctccgtctctctctctcctcctcgctgcatatctttcctttgccgcttgctgtctccctcgcctctctccagtcttcttcaccaccctgcttcctccctcttcctcttttgtttcatcagagagaaaaaaaactagatttagcgagggcggaccgacgacgcagtagaagcaaccgagacatggagcggcggaggaaggcaatgtggctgtaccccaaggtcgtcggcttcaacccgccggagaggtggggccactccgcctgcttcttcgaaggcttcgtctacgtcttcgggggatgctgcggcggcctgcacttcggcgacgtgctgaagctgaacgtggagaccatggcgtggagccttgtggccacgacggggcagtgcccgggcacgcgggacagccacggcgccgcgctggtgggccaccggatgctcgtcttcgggggcaccaacggcggcaggaaggtgaacgacctgcacgtgctggacctgcgcaccggggagtggacgcgcccgcagtgcaagggcgcgccgccgccgtcgccgcgggagagccacaccgtcaccgtcgtcgggggcgaccgcctcgtcgtcttcggcggcagcggggagggcgagggcaactacctctgcgacgtgcacgtgctggacgtgcccaccatgacgtggtcctcgcccgaggtcaggggcggccacgcgcccgcgcccagggacagccacagcgccgtggccgtcggccgcaggctcttcgtcttcggcggggactgcggcgaccggtaccacggcgacgtggacgtgctcgacgtcgacaccatggcgtggtcaatgtttccggtgaagggtgcatcgcccggcgtcagagcaggtcatgcagctatgagtgttggatctaaggtatatattatcggaggcgttggcgacaagcactactacagcgatgtctgggttcttgatgtcacaaaccgctcgtggagccaacttgaggtgtgcgggcagcgaccgcaggggcggttttctcataccgcagtggccatgaatactgacatcgcaatctacggagggtaagtttgccggaacagggtaagataccacaagattatcaaacatcaaaaactaacagtttggaaaatttacagatgtggcgaagatgagcgtcccctgaa

SEQ ID NO: 110946 - DNA, 2261 bp, Zea Mays
gtgaagaaaacgccggctcgctcgctcgctccgtctctctctctcctcctcgctgcatatctttcctttgccgcttgctgtctccctcgcctctctccagtcttcttcaccaccctgcttcctccctcttcctcttttgtttcatcagagagaaaaaaaactagatttagcgagggcggaccgacgacgcagtagaagcaaccgagacatggagcggcggaggaaggcaatgtggctgtaccccaaggtcgtcggcttcaacccgccggagaggtggggccactccgcctgcttcttcgaaggcttcgtctacgtcttcgggggatgctgcggcggcctgcacttcggcgacgtgctgaagctgaacgtggagaccatggcgtggagccttgtggccacgacggggcagtgcccgggcacgcgggacagccacggcgccgcgctggtgggccaccggatgctcgtcttcgggggcaccaacggcggcaggaaggtgaacgacctgcacgtgctggacctgcgcaccggggagtggacgcgcccgcagtgcaagggcgcgccgccgccgtcgccgcgggagagccacaccgtcaccgtcgtcgggggcgaccgcctcgtcgtcttcggcggcagcggggagggcgagggcaactacctctgcgacgtgcacgtgctggacgtgcccaccatgacgtggtcctcgcccgaggtcaggggcggccacgcgcccgcgcccagggacagccacagcgccgtggccgtcggccgcaggctcttcgtcttcggcggggactgcggcgaccggtaccacggcgacgtggacgtgctcgacgtcgacaccatggcgtggtcaatgtttccggtgaagggtgcatcgcccggcgtcagagcaggtcatgcagctatgagtgttggatctaaggtatatattatcggaggcgttggcgacaagcactactacagcgatgtctgggttcttgatgtcacaaaccgctcgtggagccaacttgaggtgtgcgggcagcgaccgcaggggcggttttctcataccgcagtggccatgaatactgacatcgcaatctacggaggatgtggcgaagatgagcgtcccctgaatgagcttctcattctgcagttgggctctgagcatccaaacggccgctacaacatttccatgtgcaaggttcttagcaaccactggagccaggagaagaggaagtttctcagatcagaagctagagatgcaagtgtgagcaatggggagatggctcagaaaccccgagaagcagaaacggagcaaaggaacccgttcctgcgtggcctagagaatggccgcgtgaagcgaaggagaaccggtgaagctcgcccgaaggaggccgagtcagagcaagaggagcactcgctgtccctttcccaacattcctcgccgtcgcagtcggatcaggagcagaccggagctcacaagcttccggcctcggccaacacgtcgccttcagccctgcagccgttcgctcgtctcaacggcaatggcgctcagctgagggccgccggacccggaggcgtctcctcgaggcctctcaaggcggaccagcttctccgcaccatcgcgccacagcatcggcgggaggtgcagttcctttcctccgaccatcagccgcagccccgggggcctcccggcccaccacaccttattggcgcagaggttcatgggacagtcgatggagcctttgattctgggtacctcgtgaccgccgtcgtgaacgggcagctcttcagaggcgttctgtttgctccgggacctggggtcacagctccgaggccggcggtgcatcaccagatcctgacgagctccgccgtgcctccccagcaacggccgctgctggcgcacgccatccccgtccacgcccggccagtgccgctgccgcaggccacgggcttcgtgctgccggactgtgcccaccacgcgcggcaagggttcccggcgaaggccgtcaagtccgagccggagcgaggcagcagcgacctgcacgatgttgtgctcacgctgggagggcctggagggggcaagtgagcccccccatggaaggcctcaagaactgtcgaggtcctggcctgctgctgttggcctcttggattgctttgtaaattagtctggttgaggaaaaaaataagactagcagcttttctataatctttcccgggtgattttagggttctaatatgtgactttacatatataaatatagtgttagcttgatgca

SEQ ID NO: 110947 - DNA, 2236 bp, Zea Mays
ggcaaatgtactgcatcaggagtgggacgagcggatgggggaaaaaggaggaacaagagaccttttttttttcgctctggtttcgtttctctttctctttcccccgtcgcttgggagggttggaccagtccgtcccgcgtttaagcttccccgctgattggtatgctgctgtgatggtggtgtggtcagtggtggaaatgttaaatgccagcaacctcacgatccatggaactaccagtacgcgacacacagctccacttaccatgccatgaaccccagggatgctgcggcggcctgcacttcggcgacgtgctgaagctgaacgtggagaccatggcgtggagccttgtggccacgacggggcagtgcccgggcacgcgggacagccacggcgccgcgctggtgggccaccggatgctcgtcttcgggggcaccaacggcggcaggaaggtgaacgacctgcacgtgctggacctgcgcaccggggagtggacgcgcccgcagtgcaagggcgcgccgccgccgtcgccgcgggagagccacaccgtcaccgtcgtcgggggcgaccgcctcgtcgtcttcggcggcagcggggagggcgagggcaactacctctgcgacgtgcacgtgctggacgtgcccaccatgacgtggtcctcgcccgaggtcaggggcggccacgcgcccgcgcccagggacagccacagcgccgtggccgtcggccgcaggctcttcgtcttcggcggggactgcggcgaccggtaccacggcgacgtggacgtgctcgacgtcgacaccatggcgtggtcaatgtttccggtgaagggtgcatcgcccggcgtcagagcaggtcatgcagctatgagtgttggatctaaggtatatattatcggaggcgttggcgacaagcactactacagcgatgtctgggttcttgatgtcacaaaccgctcgtggagccaacttgaggtgtgcgggcagcgaccgcaggggcggttttctcataccgcagtggccatgaatactgacatcgcaatctacggaggatgtggcgaagatgagcgtcccctgaatgagcttctcattctgcagttgggctctgagcatccaaacggccgctacaacatttccatgtgcaaggttcttagcaaccactggagccaggagaagaggaagtttctcagatcagaagctagagatgcaagtgtgagcaatggggagatggctcagaaaccccgagaagcagaaacggagcaaaggaacccgttcctgcgtggcctagagaatggccgcgtgaagcgaaggagaaccggtgaagctcgcccgaaggaggccgagtcagagcaagaggagcactcgctgtccctttcccaacattcctcgccgtcgcagtcggatcaggagcagaccggagctcacaagcttccggcctcggccaacacgtcgccttcagccctgcagccgttcgctcgtctcaacggcaatggcgctcagctgagggccgccggacccggaggcgtctcctcgaggcctctcaaggcggaccagcttctccgcaccatcgcgccacagcatcggcgggaggtgcagttcctttcctccgaccatcagccgcagccccgggggcctcccggcccaccacaccttattggcgcagaggttcatgggacagtcgatggagcctttgattctgggtacctcgtgaccgccgtcgtgaacgggcagctcttcagaggcgttctgtttgctccgggacctggggtcacagctccgaggccggcggtgcatcaccagatcctgacgagctccgccgtgcctccccagcaacggccgctgctggcgcacgccatccccgtccacgcccggccagtgccgctgccgcaggccacgggcttcgtgctgccggactgtgcccaccacgcgcggcaagggttcccggcgaaggccgtcaagtccgagccggagcgaggcagcagcgacctgcacgatgttgtgctcacgctgggagggcctggagggggcaagtgagcccccccatggaaggcctcaagaactgtcgaggtcctggcctgctgctgttggcctcttggattgctttgtaaattagtctggttgaggaaaaaaataagactagcagcttttctataatctttcccgggtgattttagggttctaatatgtgactttacatatataaatatagtgttagcttgatgcagctagttttgttctgagc

SEQ ID NO: 110948 - DNA, 998 bp, Zea Mays
aacaatagtacttcaattctgctaacatgtatgttggcacccatcagagaatggccgcgtgaagcgaaggagaaccggtgaagctcgcccgaaggaggccgagtcagagcaagaggagcactcgctgtccctttcccaacattcctcgccgtcgcagtcggatcaggagcagaccggagctcacaagcttccggcctcggccaacacgtcgccttcagccctgcagccgttcgctcgtctcaacggcaatggcgctcagctgagggccgccggacccggaggcgtctcctcgaggcctctcaaggcggaccagcttctccgcaccatcgcgccacagcatcggcgggaggtgcagttcctttcctccgaccatcagccgcagccccgggggcctcccggcccaccacaccttattggcgcagaggttcatgggacagtcgatggagcctttgattctgggtacctcgtgaccgccgtcgtgaacgggcagctcttcagaggcgttctgtttgctccgggacctggggtcacagctccgaggccggcggtgcatcaccagatcctgacgagctccgccgtgcctccccagcaacggccgctgctggcgcacgccatccccgtccacgcccggccagtgccgctgccgcaggccacgggcttcgtgctgccggactgtgcccaccacgcgcggcaagggttcccggcgaaggccgtcaagtccgagccggagcgaggcagcagcgacctgcacgatgttgtgctcacgctgggagggcctggagggggcaagtgagcccccccatggaaggcctcaagaactgtcgaggtcctggcctgctgctgttggcctcttggattgctttgtaaattagtctggttgaggaaaaaaataagactagcagcttttctataatctttcccgggtgattttagggttctaatatgtgactttacatatataaatatagtgttagcttgatgcagctagttttgttctg

SEQ ID NO: 110949 - DNA, 1022 bp, Zea Mays
attcatcgcatcacagtaccattcatcggtcaaagacaaaagatgactgttgtgagcatcatgtggtctttagtgcaggtgcaggtgctggcggcgatggcactagcatttctggtaggcggtgcctggtgtggtcctcccaaggttcccccgggtaagaacatcacagccaactatggtagtgattggctagatgccaaggcaacatggtatggcaagccaacaggtgccggcccggacgacaatggtggcggatgtgggtacaaggacgtgaacaaggcccctttcaacagcatgggcgcatgtggcaacgtccccatcttcaaggatggtctaggttgtggatcctgcttcgagatcaagtgcgacaagccagcggagtgctctggcaagcccgtggtggtgtacattacagacatgaactacgagcccattgcggcgtaccacttcgacctagcaggcacggcgttcggtgccatggccaagaagggcgaggaggagaagttgcgcaaggcgggcatcatcgacatgcaatttcgaagggtcaagtgcaagtatggatctaaggtcaccttccatttggagaagggatgcaaccccaactacctggccctgttggtcaagtacgttgatggagatggtgacattgtggcggtggacatcaaggagaagggctctgacacctacgagcctctgaagcactcttggggcgccatctggaggaaggatagcgacaagccgatcaagggacccatcaccgtccgactcaccaccgagggaggcactaagactgtctacgacgacgtcatccccgccgaatggaagcccaacactgcctacaccacttgatagaccttttttatttttttattcaataaaaggatataaggtgcgtgacaacaacacaaatattgtattatctatgtatctcctatgcaatcccaattttatcatggacacattttaaaatgaatacatatttttaatgaataatcgaaatatatgatacatatgtatcaatt

SEQ ID NO: 110950 - DNA, 947 bp, Zea Mays
cctactcattcatcgcatcacagtaccattcatcggtcaaagacgaaagatgactgtcgtgagcatcatgtggtcattagtgcaggtgcaggtgctggtggcggtggcactatcatttctagtaggcggtgcctggtgtggtcctcccaaggttcccccaggaaagaacatcacagccaactatggtagtgattggctagatgccaaggcaacatggtatggcaagcctacaggtgccggccccgacgacaatggtggcggatgtgggtacaaggacgtgaacaaggcccctttcaacagcatgggcgcatgtggcaacgtccccatcttcaaggatggtctgggttgtggatcctgcttcgagatcaagtgcgacaagccagcggagtgctctggcaagcccgtggtggtatacattacagacatgaactatgagcccattgcggcataccacttcgacctagcaggcacggcgttcggtgccatggccaagaagggcgaggaggagaagttgcgcaaggcaggcatcatcgacatgcagtttcgaagggtcaagtgcaagtatggatctaaggtcaccttccatttggagaagggatgcaaccccaactacctggccctgttggtaaagtacgttgatggagatggtgacattgtggcagtggacattaaggagaagggctctgacacgtacgagcctctaaagcactcctggggtgccatctggaggaaggacagcgacaagccaatcaagggacccatcaccgtccgactcaccaccgagggaggcactaagactgtctacgacgacgtcatacccaccgactggaagcccaacaccgcctacaccaccaaataaactaaccaaataataatatgtatcaaatgacatacttgatagacctttatttttattttttattcaataaaaggatataaggtgcatg

SEQ ID NO: 110951 - DNA, 1854 bp, Zea Mays
tcacattttccatttctttttcatttttctttgttttcttctcatttgacactatataaatgatccgaaaaaattgtatttattaattttcaaagcaataaattcgtaatatcaataataattacattgcttgttttgttgttgtgtaattgttgtcggtaacgcgccacatagtataatatcgttgccaaaataagttttgaaatggacaagctcgcaccgtaaggcagtactcttcttcgagaagccatagcctagcttcccttgcacgacaagcgcacgtcttctatccgaagcttacttcctctataaataccaagtgagccttccatacttcactcaaccttgcctttacaaactcgacaaccatgaatccctacttagaaaacaattttcttgtgcgcttgatggaagaaatggaagaggaagaagaagagttgcagttggcgaggcacatggtcaataggaggcgacgtgcacgcaatgagcgtcgtcatggtggttcgattccagggcgtgttaggattcatcgtgatcacatgagcggcgatgcaagaatccgagcggactactttggagcgaacccggtgtacacggatgctcaatttcgtaggaggttccgcatgcgttgccatgtctttgagcgccttgttgatgttgtgcaacaagtggatccttattttattcagcgtccaaattgtgcgggtgagattggtctttctgctctacagaaagttgttgctgctgttcgaatccttgcttacggtattccagctgatgccgttgacgaatacgtacgtattggggaatctactgctcatgaggcattgaaacacttttgcacggccgtccaaaccgcgtttgctccgtattatctccgtgcaccaaatgcagaagatatcgcacgccttctccaagttggcgagtcacgtgggtttcctggtatgcttggtagtgttgattgcatgcattgggagtggcgtaactgcccaagttcatggaaggggatgtttacagggcgtggtaaacatcctaccatgatcttggaagctgttgcgtcgtatgacctgtggatatggcatgcatattttggtctgccaggtagttgcaacgacataaatgttcttcaccgttcaaaccttttcgaaaggcatctgagcggtgacacacctccggtttcattcactgtgaatggtcacacgtacaatatgggatattacctagcagacgggatttaccctgactggcccgcatttgtcaagacaatccgtaacccctacgacgttagaacccaacactttgcaacaattcaagagtctgctcgaaaagatatagaacgagctttcggtgtactccagaagagatggggtgtggtccgtggacctgcatacggttggagtcctgaacacattggggacatcatgaaaacatgcataatattgcacaacatgatagtagaagacgaaggtccattgtctttgaacacaacctttgaaaacatcggagtgctggaagacacaactcaaggttcaatggaagagcgcaacgacttcgtcaatgaaaggtacaaccaactgaaagaccgcaacaaatatactcaacttcaggtagatctgatacaccatcactgggcgcgacatggatccggagttgcataggacacaatgcaacaagttctgtcatggctgttcttatctactgtcgaactctctttgtttactttacattgttgtactgtctgtgttagtgtcatgtccatttcttatcaagtgtgtgtactgtgtgtcttagtgtccaagtgtcgtagtgtctcatgctgctgtttcaattcaataacaaggagtactactgtca

SEQ ID NO: 110952 - DNA, 1552 bp, Zea Mays
cccgtgccccgtccatttcccatccccaacctctctctctcccccctaggagtgggagctcctggctccatctatccgcctgcagatatcacaagcttttcctgctgctgctgctgcagcagcacctgcagcttctccgtctgcagtgcgagcagctgctaaaaattcccccataagcctctggcttcctgcccccctcactttcttggaagcccagcacaacacgaggatcatattcactccctacagtggcgtactagaataccagttgtgcgcaaacagcggcagcagccgtgatgtacaggtgagctggctctgccgctccactccatggaggatctgtacagcatccacccggggatctcgcgggtcgtcggaggcgcggcgagcgaggcgtccgtcgccggcgccggcgccggcgggccctcgccgtcggatctgacggagctcatgaaggcgcagatcgccagccaccctcgctacccgtccctcctctccgcctacatcgagtgccgcaaggtgggagcgcatccgcatgtgacgtcgctgctggaggaggtcagccgggagaggcgccccgacgccggcgccggggagatcggcgtcgatcctgagctcgacgaattcatggacgcttactgccgggtgctggtgcgctacaaggaggagctgacccggccgttcgacgaggccgcgtcgttcctgagcagcattcaggcgcagctcagcgacctctgcagcggtggaagctcgccggcggctaccgccacgcactccgatgacatgatgggctcctctgaggatgagcaatgctcaggggacactgatgtgccagacatggggcaagaacatagctctcacttaggtgaccacgagctcaaggagatgcttcttaagaagtacagtggatgcctcagccgtcttcgttcagagttcctgaagaagcggaagaaagggaagctaccgaaggatgctcggacggtgttactagagtggtggaacacgcactaccgctggccttatcctacggaggaagacaaggtgaggctcgcagcaatgaccggtctcgacccgaagcagatcaacaactggttcatcaaccagaggaagaggcattggaagccatctgaggacatgcggttcgcgctcatggagggtgttgccggtgggtcttctgggacgacactctacttcgatacaggcacaattggaccctgaatcatacaccacttgggatgacaactggccagctcatattagtaataagatctggcatgtggagtgacgatctgctcggtgaaaattgaaaataaatctgctgagctgaggttgatcagactagtcagttgccctattattttacaagatcatgtgtatatggtgccgtcgtatcagaacaaactgtatgcatgtatgggcgaattgagacctgcaaaaggagtttaattagtagtttcaagtattggctcatggatttgtaatactcgctacccaatttaattgttagataggctgaagggcttataaaggtaaatttacttctgctcttcca

SEQ ID NO: 110953 - DNA, 509 bp, Zea Mays
catactctgcaagccaccgcagtccgcagcgcgccaccgcctggggcacgccacggtgccacggacggtgtcgccgtgctcgaacccgcgtcacggaatagcagcgtcctcacggctcacgctcccggacttcactcgcccgttctccgtgatatcgcgatctgatctcgcccagcgcagcagccagatccgccccatccagccaccagtttcgcggcggagggtggaggtggaggatgtcggcgacggtggaggagcagatggtggtgaaggcgatccgggaggagtgcccctgggagtcgctccccaagcgcctccagtccacgctccagaccaaggacgagtggcaccgcagcagcagcattgttggccacacgggtatgcttgtggtgcactctcactgccggccacggtcacgttgctttaccagtatctgccacctgaaagtatccagatatatcatggagaacactgtcaaatttacaacagaccaggtggtagatctctga

SEQ ID NO: 110954 - DNA, 3263 bp, Zea Mays
ggtttgcagttatacccataccaccttgcagactatatatgccgagtgctgaggatctcgcctttcagatattattgtgacatcctttttgaaactatgaagaatgaacaaccatatgatagtattccgaacttcactgctgctgatgcactaaggctcactggtgttgggagaaacgagtttattgatattatgaacaaatgcagatcaaagaaactaatgtggaaactgaataaatcgattgcaaaagaaatgctgcctacacagcctgttgacttcccagttgagccttggtggggggtttgtcttgttaactttacactggaagagttcaagaaactttcagaagaagagacaacaacaatagacaaaatatgtaaagaggaagccaattcatatgttctttttgatccgaaggttatagatggactttataaaagagggctagtgtacttcgatgtgcctgtttacccagatgaccgcttcaaagtttctaggcttgaaaattttgtttccaataaggatcaatcatatgaagacccaattgaagagctgttgtatgctgtatttgttgtttcaagtgctaatgctactgttgctgaactggctgcaactttacaagctgacctttatcaactccaggcagctgcatcatttgcttgccgattgggctgggctgcgaaagtcatggatgcgaactctgttcttaatgaagaacgtttacctgcgtttcctagtagtattcttagtgatgatgaagaaggttcaaatacaagtatccactcagagaagtctggtcaacaattgaatggcatggattctgatggacccaggaaaatttctggaactgctcatgtgggctttgttgttgatgccaatgttacatcatacttgatgatgggctcactatcgccagggttaaaatctcatgctgtcacactctatgaggctggaaaactgggtgcttcttgcattgcagaactatgtagtgatctggctagcttagagggaaagaaatttgagggtgtgctagaggagtttgcaagtcatgcattcagtttgcgatgcttcttggagtgtttacagtctggcggagtttccgcaaatgaaattactgataatactagtgaagcaaagactccaagaagctctgttcatgatattgacaatgctgctgaccatttgtccaaggtgaacattgagggtgttgctgacaataaccataatgaattttccgagcataaccagtgcgtaggtgagttagataatagtgatgggaatatagtatcaccagctatggttatcttggaaagtgtagaaagcatggtaaaaaatgatgacaagaatgattcaactgtgcagctaaatgtttcaactgaatctcgagttttgaagaacaaaaggaagtacaaagttgatattcttcgatgtgagagcttagcctcacttgccccggctacattagaacggctattccttcgggactatgacattattgtgtcgatggttcctcttccttcttcatcagttcttccaggcccttcaggcccaattcattttggaccaccatcttattcctccatgacaccttggatgaagctagtactgtatacagcaggacattgtggaccagtatctgctgtgttcatgaaagggctacgttttagattgctgcctgaaccattagctggttgtgagaaggcactgctatggtcttgggatggctctgtggtgggtggattagggggaaagtttgaagggaacttactgaagggcaacttattgttacactgcttgaattcgatgctgaaacaatctgctgtactggtgcaaccacttagtatacatgatcttgatacgtcaggaaaccttgtcactgtggatatccctttacccctaaaaaatgatgaccagtcaattgaatctgtggtagcccaaactaatttgccaaaggaacagatattagatttgacttctgtattgaaagacctatctagtaaatttgagctgagcacacttggctacctccgtctactaagacttcacaggatagatgaaccagataaatttgacccagaaaatgtaagctacaagtgggtgcctctgagcttggagttcggggttcctttattcagtccaaagttgtgcgagaagatttgtgaaagggtggttgcatcccatatgcttcagaaagatgatctcattgagcattctgatgtgatgcaaaatgtaagaaggcagctgagagaactttgcagtgaatatcaagcaaccggtccagtagctaagttatttaacaagcgtggaagctcaagggactcaccacgtgccttaatcaatagtattagtggcagatggaatttgtctaatgacccttcaacacctagtggaggagccccaagtgaacacgagaggctgaaatttgttggaaggcagcgaccccgaacagaagttgtgagctttgatgggagcactgtcaggtcatatgcacttgatcctgagcacaatgaagaacaatcatccatacaagacgtaaaaccagatccagaagaaacagacagcaaggatgtagtcttaccaggagtaaatcttatatttgatggagccgaattacacccctttgatattgctgcatgccttcaagcacgtcagcctctgtggcttatatctgaggcatcaactgcttcatcaacattactatgaggggttaattatgctccaatttctacaagttggccgatgaaatttcattagttggggttattcaaaagtattgtctgattcttagaagaacacaatagcgggctgatgctttgttcactataactgagttctttcacaggaattaatcagatgctcctggttaactgggatgcgcgttttgaagcttgtttactgcatcgtatgtttcttggccaatatcttactctacttttcacttgtgtgaaatttccaagtgcgtgctcctacttcaatattgtgaatctttgaggctcgttcagttgagaggctacaggctcgttcagggtgtcaattttacgtttacacatgtaggtctagtttggatattttgggattagagtgttttggagggattggagagggtgtaaatccctaatagatcaaatactctctcaatacatctcaatccattccaatcccactcattactagagtacctaaattaagccgtagtagtttcaatgtagttttggcataaatagcacagctttcttgtttgcggtgaccccgttcccgtggtt

SEQ ID NO: 110955 - DNA, 3271 bp, Zea Mays
ggtttgcagttatacccataccaccttgcagactatatatgccgagtgctgaggatctcgcctttcagatattattgtgacatcctttttgaaactatgaagaatgaacaaccatatgatagtattccgaacttcactgctgctgatgcactaaggctcactggtgttgggagaaacgagtttattgatattatgaacaaatgcagatcaaagaaactaatgtggaaactgaataaatcgattgcaaaagaaatgctgcctacacagcctgttgacttcccagttgagccttggtggggggtttgtcttgttaactttacactggaagagttcaagaaactttcagaagaagagacaacaacaatagacaaaatatgtaaagaggaagccaattcatatgttctttttgatccgaaggttatagatggactttataaaagagggctagtgtacttcgatgtgcctgtttacccagatgaccgcttcaaagtttctaggcttgaaaattttgtttccaataaggatcaatcatatgaagacccaattgaagagctgttgtatgctgtatttgttgtttcaagtgctaatgctactgttgctgaactggctgcaactttacaagctgacctttatcaactccaggcagctgcatcatttgcttgccgattgggctgggctgcgaaagtcatggatgcgaactctgttcttaatgaagaacgtttacctgcgtttcctagtagtattcttagtgatgatgaagaaggttcaaatacaagtatccactcagagaagtctggtcaacaattgaatggcatggattctgatggacccaggaaaatttctggaactgctcatgtgggctttgttgttgatgccaatgttacatcatacttgatgatgggctcactatcgccagggttaaaatctcatgctgtcacactctatgaggctggaaaactgggtgcttcttgcattgcagaactatgtagtgatctggctagcttagagggaaagaaatttgagggtgtgctagaggagtttgcaagtcatgcattcagtttgcgatgcttcttggagtgtttacagtctggcggagtttccgcaaatgaaattactgataatactagtgaagcaaagactccaagaagctctgttcatgatattgacaatgctgctgaccatttgtccaaggtgaacattgagggtgttgctgacaataaccataatgaattttccgagcataaccagtgcgtaggtgagttagataatagtgatgggaatatagtatcaccagctatggttatcttggaaagtgtagaaagcatggtaaaaaatgatgacaagaatgattcaactgtgcagctaaatgtttcaactgaatctcgagttttgaagaacaaaaggaagtacaaagttgatattcttcgatgtgagagcttagcctcacttgccccggctacattagaacggctattccttcgggactatgacattattgtgtcgatggttcctcttccttcttcatcagttcttccaggcccttcaggcccaattcattttggaccaccatcttattcctccatgacaccttggatgaagctagtactgtatacagcaggacattgtggaccagtatctgctgtgttcatgaaagggctacgttttagattgctgcctgaaccattagctggttgtgagaaggcactgctatggtcttgggatggctctgtggtgggtggattagggggaaagtttgaagggaacttactgaagggcaacttattgttacactgcttgaattcgatgctgaaacaatctgctgtactggtgcaaccacttagtatacatgatcttgatacgtcaggaaaccttgtcactgtggatatccctttacccctaaaaaatgatgaccagtcaattgaatctgtggtagcccaaactaatttgccaaaggaacagatattagatttgacttctgtattgaaagacctatctagtaaatttgagctgagcacacttggctacctccgtctactaagacttcacaggatagatgaaccagataaatttgacccagaaaatgtaagctacaagtgggtgcctctgagcttggagttcggggttcctttattcagtccaaagttgtgcgagaagatttgtgaaagggtggttgcatcccatatgcttcagaaagatgatctcattgagcattctgatgtgatgcaaaatgtaagaaggcagctgagagaactttgcagtgaatatcaagcaaccggtccagtagctaagttatttaacaagcgtggaagctcaagggactcaccacgtgccttaatcaatagtattagtggcagatggaatttgtctaatgacccttcaacacctagtggaggagccccaagtgaacacgagaggctgaaatttgttggaaggcagcgaccccgaacagaagttgtgagctttgatgggagcactgtcaggtcatatgcacttgatcctgagcacaatgaagaacaatcatccatacaagacgtaaaaccagatccagaagaaacagacagcaaggatgtagtcttaccaggagtaaatcttatatttgatggagccgaattacacccctttgatattgctgcatgccttcaagcacgtcagcctctgtggcttatatctgaggcatcaactgcttcatcaacattactatgaggggttaattatgctccaatttctacaagttggccgatgaaatttcattagttggggttattcaaaagtattgtctgattcttagaagaacacaatagcgggctgatgctttgttcactataactgagttctttcacaggaattaatcagatgctcctggttaactgggatgcgcgttttgaagcttgtttactgcatcgtatgtttcttggccaatatcttactctacttttcacttgtgtgaaatttccaagtgcgtgctcctacttcaatattgtgaatctttgaggctcgttcagttgagaggctacaggctcgttcagggtgtcaattttacgtttacacatgtagtagtttcaatgtagttttggcataaatagcacagctttcttgtttgcggtgaccccgttcccgtggttagtataaaagtgttttcgttctttcttcaaaaggtgaaattcaagtttacatttatattaccttgaagaagcatgtacatacacttcagtacctgtaatggtagtattgcaatgatgcagatatacatcagaaattcttaaagcacgaa

SEQ ID NO: 110956 - DNA, 531 bp, Zea Mays
atggctcgttcctcagcgaaccaggatgacatgctgttgttgctgttcctggccgtgcagccggcccgacctcaacgcgtgtctcctctgctcctggagcagccggaggcggtactgcctctgcccctgctgtatcacggagatgagcctcatgacgaggtagaacggaagcaggatcccgctcgcccgcagcaagtataccgtgaggaggccgaaggcgaactggttggccgccccgaccgtgaccacggtgaccaggtgcctcagcagcaggacgaccgtgaacgtgacggccaccgagcggcaccaggacgcgctcctgccggcggcgcgcgcgcactcggcgtactccgggtcgctggctccgatcaacgccacgtccaccagctcctgctcctcctcctcttcaggctcgtgctgcggcctgggcacccccacgctgtctctgcgcatgcaccacgaaagcccagatcagcaacgcgcgtggtggttgccaggctctggctggtagtggtaatggtaggtaggtag

SEQ ID NO: 110957 - DNA, 114 bp, Zea Mays
gaccaaaggtttttaatgtgcatccacaaaacatcttagttttattttggtcgtatatatattctatattttttgtttatgtattactgttgtatgtatatgggccggtctggc

SEQ ID NO: 110958 - DNA, 330 bp, Zea Mays
atggggatcacctctacatctatgcatgatgaagtgagattgaagaccgacaaaccaccagttcaaatgccagcactgaaagtttactcaagaaaacgttcatcaggttttcaacagcaacaagatgaccaagatgatggtctagctatgtatgatgaattggcatctatggaccaacataatttagctccttcctcccccatcttgggctctggcgttgtagcagccttgactgtaccgccgaagcctattgatgcttctctgatttcaggccaccaggggactgataacgaagtgtctatccaacacctgaacatacacgaggcgtag

SEQ ID NO: 110959 - DNA, 960 bp, Zea Mays
attactttacatggatgcaaattcacgtggtccaatcaacaagatgagcctgttctggtcaagcttgatcatgtttcttgcttggtggactgggaaaatcttttccccgatgttcttctccagagcgctgcaacccaagactctgatcattgtcctttgcttttgggccttaaggataataagtctggtagaaggcgctttcattttgaatccttttggactaaattagatggcttccaagaaacgatccaaattgcatgggattctgttcaagctgttgtatgccatgcccctttctaactcttgatatgaagctaaaagagactgcacaaaggctgcaggcatggagtgaaaaggaggtgagtcatgtgagaactcaattagctttggccaaggaacttttgcacaggttggagattgcacaggatgatagagctctaaacctggctgaattatggctaaaaacccgactgaagaaacactctctgttgttgtcatccttcaagcgtaccatggcaaggttgagatcaaagaatttcatggctcaaagacggagatgctaacacaaacttttttcatctgtatgctcgccatagaaaaagaaaaaaaaatgttgcaaatttggtaggcggagaccgtatcctattctaacaagtcatgaggacaaggcgactgttgtggaccagttttattctaatctcattgggaaatgtatggacagagacgggcattgatctagaagcgcttggattgcacagacataatttacctgttttggatgctcctgtctctgatcaagagatgtgggaaactatcaaagaattacctccaaatatgtggtgttattttttatgcactaacattttgttgaatattttgtataccgttgcaacgcacgggcatctacctagttgacaattataacattaactcaaaacataccattttaggcatttttgc

SEQ ID NO: 110960 - DNA, 766 bp, Zea Mays
aagccaagctagcacatccatccaggtcatccatcagctcttccctctgctcacaactcacaagcaacagttctgttggagcttatcaatctctcgattcccaggaggaacggaaccaaaggtctgctggtcgcgcgcgtgccactagtcaggagacgggatgggcaaccttgtctcgcagtgcgtcgggaacggtgccggcgcgcggcctctggtcatcggggcgacggacggcagccgaacgatggtcgaggagaacaccgcggtcgcggagctgatgatcgacgcgccggggcacgtggttgctcgcgccacggacgtggcgagggagcgacggttgcgggcgatggcggccgacgaggtcctgcgcgctggcgtggtgtacctcctcgtgccggcaggccgggccggtgcgcggctaggcggccgtgaggtcgaggccatcgggaggctggtctctgggaagaagggttcgaggaagagcaggcccggcggcggcaggagggtctttccggacgtcagcgccgaagaggacgcggctgaaagaaaggaggttgtgtgtgctgttaaacgggcccatgatcatggatttgggcccaggcaatggaggcccgccctggataccatctatgaggcctagattttttcttcttattagagagagtaggaaaccccattctttggtttatatgtttaggaacttaccatgtacaactgtatacattcgtctaaccgtgcaactaaaaaacgaagacagaaaaaatat

SEQ ID NO: 110961 - DNA, 1284 bp, Zea Mays
atggtcgcgcttcccacagaagccgcccgcgtacaggaaacgaaaagccgcccgacccacgcgtcctctggaagccgggctattcgcgatagggtttccaccgcgcccgcgactcagctctctccctcgaccgccgccgcctcctccgccgcatcgggtcggggacctcgaccacactcccctctgctcatccgccgcatcgtcatcttctcagggttttgcccgtgccgccgccagttcgtctgcaaggttggactcctcccgtatcccaactcctcgtcttcgcagatttcggggagtgagctgtttttccctgttgcatcagaagctccactcctacgaagatgccttcgtttagtgacaatggggtttaagttagaacatggtgaacctagcagtcagatggacaagtctggcaaagtcattgcaaagtgggataatagagcaacaaaagtttacacagaaatttgtgtagaagaggtcaatgcacggaacaggccacaacaatttctaaatgtcgaagggtatgctaacctcataaggaagtttaaggaacgcactggtcgcacttacaccagggatcaaatgaagaataggtgggactccttaaagagaatgttcatccagtggaaaactcttaatgaaagggctacaggtcttggtcgagaccctcatactggttctatcagtgctccagatgagtggtgggctaagcaaaatgaagatgcaaattcaacatctgatgatcatgtcgaagccactttaggtgggggtgaaaacagcacacctgacccatgctcaaatgcgactgggaagcgtaaggtgcatcatgattctcctaaaccaaagaagaaaaaagatacgagggaagagtacatgaaacgcctagtggaggcttttgagtcgcgttcaatgaccactaacaagtccatcacctctgctgagaccaaccctgttcgtgttgaggttattgcgcagttgcaacaagtgatcgatgatggttcaccagaaggcagcgacctacatttgtttgccactcatctgttgattgagaaaaagtatagagatatgtgtgaccctgctacacacacatatgatgatgacacagatgacagagatggacaattgcttgttgccctatatgatgtagacatttggggcaggccttctagtgaggtttctagaagaacaatggttgaaacaggtgagagtagtagtagcacatctgatgagttagacatgagtgcatttcgagatggaattgctaatgcattagtgtcgtag

SEQ ID NO: 110962 - DNA, 479 bp, Zea Mays
cacggacgacaccagcagcagagccccgagcaatcccttctcgcccttttcacttttcagatccagccagccagccagccatcccactccgcaccgcattcctcgcagtggcagagcttgcagcggtggtctcttccccttcctcctgtctcctcctcgctcgatctcctctcccaagcagcgagaagcggatggggagggcgccgtgctgcgagaaggtggggctgaagaaggggaggtggaccaaggaggaggacgaggtcctggcgaggtacatcaaggagcacggggaaggatcgtggaggtcactgcccaagaatgccgggctgctgcggtgcgggaagagctgcaggctgcggtggatcaactacctgcgggcgggtctcaagagggggaacatctcggaggaggaggaggacatgatcatcaagctccacgccacgcttggcaacagtttcattcttctttcttctccccgc

SEQ ID NO: 110963 - DNA, 1523 bp, Zea Mays
cacggacgacaccagcagcagagccccgagcaatcccttctcgcccttttcacttttcagatccagccagccagccagccatcccactccgcaccgcattcctcgcagtggcagagcttgcagcggtggtctcttccccttcctcctgtctcctcctcgctcgatctcctctcccaagcagcgagaagcggatggggagggcgccgtgctgcgagaaggtggggctgaagaaggggaggtggaccaaggaggaggacgaggtcctggcgaggtacatcaaggagcacggggaaggatcgtggaggtcactgcccaagaatgccgggctgctgcggtgcgggaagagctgcaggctgcggtggatcaactacctgcgggcgggtctcaagagggggaacatctcggaggaggaggaggacatgatcatcaagctccacgccacgcttggcaacaggtggtccctgatcgccggtcacttgcccggtcgaacagacaacgagatcaaaaactactggaactcgcacctgagcaggcgggcggccgacttccgcgacggcgtcgtcgtcgacatcgacctcagcaagctgcccggcggcgggaaacggcgcggcggccgggccagccggggcgccgtcgtggccgcggccaaggagaagaaggccaaggagaaggacgacaggggcaatagcaaggtcgcagaagcggagcagcagctcagggacacggaggacgacgacggcggcagcgtctccacgccgaggcctcagtctgatgactgcggcaccgcccagagcgaagaggagcaagcgcaggccagcgccagcggcctgacatccgatgggcatgggcccgaggaggaggaggaggaggacccgctggctctgagcgaggagatggtgagtgcgcttctggccccggaaagcccaaagctggaggtgggccccgatggctcgtgcatggacagctacagtggccctccgtcaggggaaagcggctgtgggtccagtgggccttctggcgacgtggcccaggacctggacctagacgacgacaaggccatcatggactgggacttgatggggctggacatctcgaccgccggtgacatgtgggaccagctggtgtgggactacgacgaaacgttggtcacggaaccggaaggaggggaggaagggcaccagcagcaggacgatgtcatgtcagacctcttcttcctggacaatctctaggaggtgcgaggatagcatgggcatggctgccgtgatgctttatgctttttaatttgatccggtacttgtaggtttttgggtgtgttcagttcagagatgagtggcggtgtcagagacgagataaggggagtgctccagtgacatctttgtttgctggccggatctcacgaacccgtagaatggcaagaatgtagaaaaataagcacgcaatatcacttggaaacctttcatcagtagagcctgtctaacatctacagacggagaaatgcaaaaaaaaaaaaaaaaggttgctgg

SEQ ID NO: 110964 - DNA, 115 bp, Zea Mays
acttggtacacggacacttcaccacacgaggtccaccggaaaatgcgagatccacgaattgttttgcaaccctaacccattactttgagtgacctagagtcacgctattgaatcc

SEQ ID NO: 110965 - DNA, 251 bp, Zea Mays
gattaatttacaatgaacaagaaattatgcatcaattgtaacaactacccaaaaatcatgcatcaaattttaactaacaaactaattataataatatgcatcaaagaaagaagaaaaataccttcacggagaccgtcaaggtggtgatggtcgaggagacgcgggccggctgtagttagagtggagagagagaccggagactagagtcaaatgggcctacaattagatggaaacacggctttaggtttcat

SEQ ID NO: 110966 - DNA, 352 bp, Zea Mays
aggcaccatgcgcctcgcttcggacgaagatgcggagatgggagatcgggcttgtctagtgcttgtgtagtgctcgtcacaatgcgccgtgcacaaccagctagggaaattttgggcgctgcgggtgaactgcactcaacgataaacggctggtcgctaggattcgtcctcgctgcgcaggctccatcgacaagccatcgcccagctcggtcggagggaggtggaagaaggtccgtgcaccgttcattccgtgatcgacgataacgattagaagattataccccccccttcgttgttgtgatctcgacccttgatcttagatcgtagggttctgggaggctcaacatgttcg

SEQ ID NO: 110967 - DNA, 243 bp, Zea Mays
cgtgaatgcacaactagaataaatcaacatacaaaacgaaaagatgatccagcatgttgtgcaacaatcatgacccttttagggcttgttcggttacaccaatccagaaggggattgaagggaaataaatcccctcgtagttaaaaatgactaggaggggatttaaaccccctccaattcacttttggattggtgtaaccgaacaagcccttagggttttattttactaggcttacaattata

SEQ ID NO: 110968 - DNA, 876 bp, Zea Mays
atggagttcggggttcaccgaagcgtggctatggcttttcccatcgcacaacaacacttcggtggtgacccccacggtgctattagtttgcccaagggtggaccctacccctatgtcttgactacttgcactttccccatcaccccaaccctaactgaattagagggcaagcactgcgctagtagagcgaacgacggcgagcacggtgctggcggagcgaagcaaacgacggcaagggactacctacgggctgatggcgtagcacggtgcgacggctccccctctgggcaagctcgacggcggcaggtccggctcttccccatcgacggcgcgacggtgtttgggcgatgcggccagtggatggcgcgggccccaagcgatctctgggctgagccagcttccctctccccaagtgacagcactctgcccactggtgtcgatctggaggcgacgatcgatatagacactgggttgtcgttgataatctgcccagattgtagggacgtgagggtgtttgctgccactaccaagtttgggtctaatgagggaaagagatatttcaagtgtcctaggaagacttatggacatggaacatgtactaggtattggttcgaggaagaatatgtggtgttctttcattataacggatatctaccaatgacttcctcgatcgttgcagcagcttcgacaatagaagttcctaagattgtgagaagaattgttagcttagagaaaaatctgaatgaggtgaaggacaaagttggcaacaacagggaaggaatgggaagctgcatttgtcttgtgtgcggatgtgtgaatgtaacactattcctgttgttggccatcgttttgcttgtagttgtagtgctcaagtag

SEQ ID NO: 110969 - DNA, 357 bp, Zea Mays
atggctgaggtgaaggtcatgcaggctcgtgctgatggactaggagcggtgaagggacacgcacttgtgcgaggacgtggtggagtggatcatgttgacggcgtggtcgaggactggtgggacacgtgtctgatcgtggaggacgtgcatgaggtgcggtgctcacggcaggtttggtggtttgggcctcaaaaccacccagcgctacggatggcgggttttgctgagtttgggcctcaaaactcggcggtggcggttctagagggaaccggtggcggcatgcggtgtgatcacggaggttgcgtcaaggcgaagcaactccttgtgaaggacgtggtcgtcggatcgaaaacctag

SEQ ID NO: 110970 - DNA, 604 bp, Zea Mays
atggagcttccatcagttggaagtgacggagatctcctcctcgacgcgcagatccggctgtcctcgccccactctcctctctcgccgcaatcccagctctctcccgcccggatcgccgccatcccatccgctctccagaatcaccaggccagcgataagcaattaatggaggtagaggcttgctacaactacggcttcctccctgcagacagaggcaggcaccaaccaccacctccaccacatgccacccttcctcgcgctgcagaggatgcaggtgagctgtgggagtacttcccttgccccttttgctacatcgaggtggaggtgcccttcatctgcaaccaccttcaggaggaacattgctttgacaccaggaatgctgtttgccccatctgcgccaacaatctagggaaagacgtggctgcacatttcagactgcagcacacgcatcttctcaagaggaggaagccctataggccaagctcatgccctgcggcagccaccagccaagcaacataccaagtgaactcttactatgaagaggcagaaccacagcagcactagatcccagacgctctccagaatcccatccgcctagatccca

SEQ ID NO: 110971 - DNA, 1200 bp, Zea Mays
atggagcttccatcagttggaagtgacggagatctcctcctcgacgcgcagatccggctgtcctcgccccactctcctctctcgccgcaatcccagctctctcccgcccggatcgccgccatcccatccgctctccagaatcaccaggccagcgataagcaattaatggaggtagaggcttgctacaactacggcttcctccctgcagacagaggcaggcaccaaccaccacctccaccacatgccacccttcctcgcgctgcagaggatgcaggtgagctgtgggagtacttcccttgccccttttgctacatcgaggtggaggtgcccttcatctgcaaccaccttcaggaggaacattgctttgacaccaggaatgctgtttgccccatctgcgccaacaatctagggaaagacgtggctgcacatttcagactgcagcacacgcatcttctcaagtgtagtgtttggcaagcggctggtgtcggctggaaggaggtttcagtcaatggggcagtacgactagggagaactcaagaagaggtgctaaagagaaactatggcccagaggttgatgtttggagtgcaggagtgattatgtacatattttccctgccagagccttctatcagaggaactaatatggataagggtaccattttgaaaacattaacagttttggacactcagcttcctgttaaacaagcatttaaaataatgcatgatgagggtcttgctctggttcctctttgggatgaccgccagggaaccataacaggcatgctcactgtatcagattttgttttaatcttgagaaaggggatattgtgcattggtgtgctaaaacgttctaggcagcagaaagcaatatcacgggagcaagcagccaaagatctgcaagagttggagaaatggagagaagaacatgaggcattgttacttgctgaatgctttctcgaagttcatattattggttactgcatgtacaggggggaagagctgcttgcgtactggtggagagaggatcattggttgaaagcgatgtttctacatatgaggtctgtaattaaggttgaggaagagttggttggggttcctgtgaaaggtggactatatgagattagggatatcagtgcgcttgtacgtttaaggccaacgtgggaggatcttcgcagctacttaaggccgcaaacgttttga

SEQ ID NO: 110972 - DNA, 717 bp, Zea Mays
atgactgcaaaatcggagcagacaccacgaataacggagctgcatgtaagggtggactgcaacggctgcgagaacaagatcaggaaggccctgcgtgccatcgatggtgttagcgaagtgtatatagatcaagcaagccacaagatcactgtggtcgggatggccgacccatggaggatggtcaaggccatcaggaaggccaagagggtccccaccatcttctcccacaccgacccggccgccgcagccgaggctgatcagccgccgcctcccgctgccgaagccgaagaagccgaagccaaaggggaggcccaggcgccagcgccagcgccaccacctcccgccgacccgccagcagccggcgacagagcagaggagaccgcgccagctgatacgtccgcgccggaggagcacaaggaggccaaaccggcagaaaccccggcggctgtggacgccaccgtggtggtgcgcacagtacgtgaccacccgtacgggtacggcgctggcggccatggccaccgcatgtgcagtgaggcgaaccaccccgtagacagcttttacagccaccatcgcccgacgagcccttacgtggccgagtacggcgccggcggcggctatgctggctttccggtgcaagaaggcaggggcaaagaggatgccatcaatatcacttgtatgttcagcgatgagaacccaaacgcatgcagcatagcgtaa

SEQ ID NO: 110973 - DNA, 765 bp, Zea Mays
atgggcgtcagcgacggcgacggcaacggcaacggccccaaggcgagcgaggaggcggtctcgtgcgaagggagtcccgagtataggttgccgttctccaagccgcacgtccccagcccaccgcaggtgaccgacccgacgaactacgccatgactggcaagatcctgctcgccgcggcgggggcgttcgcgggcgtgctcctggcgctcgtcgcgctgcacctctacaacagcacacggcggcggcgcctcggcggcaaccagcggcggctgttccggagcctggccatcgccggtggcgacgaggaccgccgcgacggtgacggagagggagcgcctcccccccatcgcggcctcgattccgctgtgctcgccgcgataccggtcgtgctgatcgaagcgggcgcggatgcggggggcggggactgcgcggtctgcctcgcggagctcgagcccggggagaaggcccgcgcgctgccgcggtgcggccaccgcttccacatcgagtgcattggcgcctggttccgggggaacgccacgtgcccgctctgccgcgccgacgtcgtcgtcgtggcgccgggcgctatcgtgccagccgagggcggggcgctgtcggaggaggtgcggatagacgtggccggggacgccgtcgccgcgacgcccaatggatccacggtagtgccggtgatggggaggttgcatagcggccgggatcttgagaaagccaggcgggtctttgcttccacccgattctcttccttctga

SEQ ID NO: 110974 - DNA, 1094 bp, Zea Mays
gtcgccacgcgcactcaccgctatcttgatgattgtgtctgtctcgctctcgctgctccgttcctgttcttccgctccttctccccacctcgttttggctgatcaaagttcttgttcgcgaacactttcctctgcctgacactctgagttcttggttaatgagcctgtatagacccatcggccatcaccagttcactactcgccaatcgacatgtcaggacagagctcaagctcctatggtgacactgatcctggcacagacagggcatacagcaccacctccagcagcatccggtggggtccgcacggccgcggcatgacggcctgcctcgtcgtcgtcaatgtcgtgctcgtcgccctcgtctacctctacttctggagggtgttctcccgcagaagcgccgcgtccccctcagcagctaaccccacggaccacgacgacgatgcgtcttccacatcgacgccgccgtcgccgctatcgtcccaggaccagcacggtcgcatcgtggcgtcgctgccgacgttcgtcgtgcgctccgggtccggcgccggcgccgagtgtgcggtgtgcatcgcggagctgcgggacggcgacgaagggcgcgcgctgccgcggtgcgggcaccggttccacgcggcgtgcgtcgacgcttggctgcggcggcggcacaccacatgcccgctctgccgggccagcgtcgtcgtcgccacggaggaggtggggcccaccaagggcagtggcgtaacggacacgacgacgacgaccgtggctctcgaggatatggacgcaccggtctagtcattatgactgattgattgcattagttttgttttgtgtacttgtgtgggaaacgacgacgtcaggtagtagtcttgggtcaatggagtgtagtaagggaagcattatcttgttcggatgactccaaaccagcaaactggttttgcaagcaagatataactgttttggcgtcagttaaaaaggaaaatcaacattatctcgtagcgtcattagaagtatgttatcttgtataaaaaatatcaagtatatacgatcgtcggtttcaaaaacactataattttagcttttacctaaa

SEQ ID NO: 110975 - DNA, 898 bp, Zea Mays
cagctccgtctctggtcagctcgccagaccgcggtcgtcctttctcctcggctggccgcacagaactttcgctatccatggccgacgtcgaagctcccagggcgccgttcttccctgaagctcccctgcaccacgcctctctctctctctggtctccatccgagctcgcccccggctccttggttctcctcgccggcgccctgtcttttccccaacctcgccggcgctcctccctctgctagcacggacgactgccccaagttccatggcgcgcagctcgcgcccaagctcctctctgccgagcagttcgcccggcctctggccttcttccttgcgcatggccgcgcgcccatctccctgctcagctcgccgcgtcgaactgcccagtgcctgctcggaccaccccagcgccgcgcgcctggctcgcccgtctgcgatccacctcgtccatggccgcgcgcccatcttactcctctggtctgcgcccctctggctcggccgtctccagctcgcccggtcgagctccctagccgccgcgccgcggactccagcgctcggtgcccagcttccagcaccgcggcttcccagctccctctctcttctccatttccctcaagctcgccatggccaccgctcccagtcttcagctcgccgcgcccagtcgagttcacccctgcgcgtagccgtgggtttagctgcggagcgttcctgctccccggcctccgtcgtgctcggcagcaagtaattcatgtggaagcagcagctgcgatcccttgcgtcgtgctcgccagatcgagtctcacatcatcgatctgcgcagttcttgttcggctatcggttccgcctacgtcgatctcctaattgccatggatagtgtatcgacgtcccattacaacag

SEQ ID NO: 110976 - DNA, 3468 bp, Zea Mays
cccaaaaaaaaagtcagtaaccaccccacagtactactgagtactgacccactccacactttcgtcttcccgtgcttttgtttctcggactagggacgctctctcccctcctgcaggcagtcaccattacgaaaaaagccaacacccggacggaaaggttggagcggggaggaaaactcgcgcaagatcccgccttttccgtcggggtctgacggccccgctcccccaccggaagccaggcggccgcaaagcagaggccgtaggcggcggttgctgaaacctatatcacgccaagcgcctgcgtagtcaagggctactcgagccttgcccctcccatggaacagcgggacgcgacgcagccagaggcggcggcggaggagcgcgaccaggagcggccctccattattcctcctcccaaggaaaacgaggataaagatctgaagctaccttctcgtgtggtttctttattatttggtggtgatatatcgacgtcagcacaaacatttgagaaatggctctcattagtacgtaagaggagtggggctttccggccatctgggttcccacatcgaggttcaaggattgaagtcatgccaagtgggagcttctcactatttggtagcggggacttaagtgaacacttgattagagaagcaccaacaagaaaagatccattggactgcgatcaatctcctgaaataagcttgtgggagagacttgggaactcttctgcactggacattgagtcatctgaattttcatgggacgtgttgttgtctctgcatcatacagaacatagtagtagttccgaacaaactgaagacgaaatgaataaagctcttgaggtgactgtgaactctggtggcgtagtgttctttgctctatttagttctccaggtaacattggagttccagaagcggcagctgttataaagttttcgtcatcaaagatggcaacacaggcagagcgtttgggttatgagtttgcaagattgctcggagtccatacaccacaagctagagtagtatataattctagctcagagtggctggcgattaggcatgctgcagaaaatgcacgtacagtagcagtttcaaataatgatgaggttggtgagatgacgtgctcagagttgttagaagctcttgagctaagccgctgccttcttctaatgagttatattcatggctccccactgcttgagagttcaaaggctttccattcacgagaagctgcttgtgttactgcttcatcactgggaagggttttgatgcttgatctgatactgcggaatgaggacagactcccatgccgtcagcttggttggcgtggtaatcctgcaaacctgatgatttcagataaatcatccttacccaatttggacaggttggatgatttcaagagctctacagatagttccaaccaactaattacacattttttgcatagagagaagcggtcacactctttgaatggaaaatttggttcaccagggttggatcccatgtcaccaaaactagaaccattgataaatgaaaaggaaaatgctgaaagaacaaatggcgattttcgcattgtagcaatcgatactggtgtgccccgccgcccccctgtggggcgacgtgtcaaagatcatgagaggtaccccaaagttgtggaactcattttgaatagttcggactactcagcaagcatcctatatgaaatttctggttgtaagcttggacatccacgacctgatgaggttacttccagtgattcttgttgctccctttctgatgaagataatgctggagtgattcatgaattccgaggatcattccgtgcagctcttagggacctggaggggttccatctatttcttctccagctttaccaaaaactggatggtgttttgcgagttttcttgtccataattactaaaacctctgaagaatctgacaataatgatgctgccctttccgattttccttcacctggagccagctatagtactcctcgccttcctagtaagcatctgaacaatgagcttcatagtgattctgaaatgctgaaatctgcaatgaagtcctcttctgtgggatcccgcggaagctcagattcagtttctcctctgcccagggagagttggaacaacaagtccttcaagggaagtgcagaggctccccgtagtttaagaatgacaatgaaacttcgtgatttttacaaaaccccaaaggttgatcctgaattgctcaaagagattgagcagtggaacgaagcacttaagaatgatgtgatcaaattttgccaagagaacaattttcattctggtttctttgatggaactgaaaacaacatggtagctgatgcctatgaattgaaggtgcgtcttgaacacatcattgaaaggatagccttgatttctgatgctgcaaatacagaacgaccttctcttgttgtcaacaacttgttcataggtggggctctggctgcaaggtctaagtacaccctacagcatttgggcattacccatgtactctgtttgtgttcaaatgagattggtcaatccgattcccaatttcccgatctttttgaatacaagaacttttcaattagcgatgatgatgatgcaaacatcagtgatctttttgaggaagcatcagacttcattgatcatgtggatcatgttgggggcaaggttctagttcattgctttgaagggaaaagtcggagtgccacagtcgtacttgcctatcttatgcttagagagggctttactcttgcaaaagcctggaacttactgaagaaagtacaccgtcgagcgcagccaaacgacggcttcgcaaaggctctcctggcccttgacaagaggctgcatggcaaggtatctatggactggcaacacaagcggccagaaatgaaggtgtgtccaatctgcagcaagaatgttggtctaagtacgagttcactcaagctgcacctgcagaaggcacacaagcgtctatctgcaggcagtgtcgacagcgccatgaccatggagatccaaaaatcgatcgagtcactccagatcagccgaggaggaagcctgagcccgtcccagaagctgaccaaggtgttcagcaatgagctgagcttctgatctgttttcctgtactatagatgaggcaatgtacttggctcacattgtaataacttgtactatcagactgaacttgtgactgtaggtttagttcacacgcctatatgattagcacacgaatgttcaggtgtgaagggtgcaacactaaagaatgttcaggtcttgtatttgttgcctgcagtatgcagttttcttctaaagggatctactctcaatctttgtatagagttactaattttatgggtacttttctagtgtacattcctgtttggtcacctagggctggtaagatatgagctctgttttcagcaagcaccgtagaaaagtttggaggttttgctgggtc

SEQ ID NO: 110977 - DNA, 3490 bp, Zea Mays
cccaaaaaaaaagtcagtaaccaccccacagtactactgagtactgacccactccacactttcgtcttcccgtgcttttgtttctcggactagggacgctctctcccctcctgcaggcagtcaccattacgaaaaaagccaacacccggacggaaaggttggagcggggaggaaaactcgcgcaagatcccgccttttccgtcggggtctgacggccccgctcccccaccggaagccaggcggccgcaaagcagaggccgtaggcggcggttgctgaaacctatatcacgccaagcgcctgcgtagtcaagggctactcgagccttgcccctcccatggaacagcgggacgcgacgcagccagaggcggcggcggaggagcgcgaccaggagcggccctccattattcctcctcccaaggaaaacgaggataaagatctgaagctaccttctcgtgtggtttctttattatttggtggtgatatatcgacgtcagcacaaacatttgagaaatggctctcattagtacgtaagaggagtggggctttccggccatctgggttcccacatcgaggttcaaggattgaagtcatgccaagtgggagcttctcactatttggtagcggggacttaaggtttgctttgtggaatccattgtgaacacttgattagagaagcaccaacaagaaaagatccattggactgcgatcaatctcctgaaataagcttgtgggagagacttgggaactcttctgcactggacattgagtcatctgaattttcatgggacgtgttgttgtctctgcatcatacagaacatagtagtagttccgaacaaactgaagacgaaatgaataaagctcttgaggtgactgtgaactctggtggcgtagtgttctttgctctatttagttctccaggtaacattggagttccagaagcggcagctgttataaagttttcgtcatcaaagatggcaacacaggcagagcgtttgggttatgagtttgcaagattgctcggagtccatacaccacaagctagagtagtatataattctagctcagagtggctggcgattaggcatgctgcagaaaatgcacgtacagtagcagtttcaaataatgatgaggttggtgagatgacgtgctcagagttgttagaagctcttgagctaagccgctgccttcttctaatgagttatattcatggctccccactgcttgagagttcaaaggctttccattcacgagaagctgcttgtgttactgcttcatcactgggaagggttttgatgcttgatctgatactgcggaatgaggacagactcccatgccgtcagcttggttggcgtggtaatcctgcaaacctgatgatttcagataaatcatccttacccaatttggacaggttggatgatttcaagagctctacagatagttccaaccaactaattacacattttttgcatagagagaagcggtcacactctttgaatggaaaatttggttcaccagggttggatcccatgtcaccaaaactagaaccattgataaatgaaaaggaaaatgctgaaagaacaaatggcgattttcgcattgtagcaatcgatactggtgtgccccgccgcccccctgtggggcgacgtgtcaaagatcatgagaggtaccccaaagttgtggaactcattttgaatagttcggactactcagcaagcatcctatatgaaatttctggttgtaagcttggacatccacgacctgatgaggttacttccagtgattcttgttgctccctttctgatgaagataatgctggagtgattcatgaattccgaggatcattccgtgcagctcttagggacctggaggggttccatctatttcttctccagctttaccaaaaactggatggtgttttgcgagttttcttgtccataattactaaaacctctgaagaatctgacaataatgatgctgccctttccgattttccttcacctggagccagctatagtactcctcgccttcctagtaagcatctgaacaatgagcttcatagtgattctgaaatgctgaaatctgcaatgaagtcctcttctgtgggatcccgcggaagctcagattcagtttctcctctgcccagggagagttggaacaacaagtccttcaagggaagtgcagaggctccccgtagtttaagaatgacaatgaaacttcgtgatttttacaaaaccccaaaggttgatcctgaattgctcaaagagattgagcagtggaacgaagcacttaagaatgatgtgatcaaattttgccaagagaacaattttcattctggtttctttgatggaactgaaaacaacatggtagctgatgcctatgaattgaaggtgcgtcttgaacacatcattgaaaggatagccttgatttctgatgctgcaaatacagaacgaccttctcttgttgtcaacaacttgttcataggtggggctctggctgcaaggtctaagtacaccctacagcatttgggcattacccatgtactctgtttgtgttcaaatgagattggtcaatccgattcccaatttcccgatctttttgaatacaagaacttttcaattagcgatgatgatgatgcaaacatcagtgatctttttgaggaagcatcagacttcattgatcatgtggatcatgttgggggcaaggttctagttcattgctttgaagggaaaagtcggagtgccacagtcgtacttgcctatcttatgcttagagagggctttactcttgcaaaagcctggaacttactgaagaaagtacaccgtcgagcgcagccaaacgacggcttcgcaaaggctctcctggcccttgacaagaggctgcatggcaaggtatctatggactggcaacacaagcggccagaaatgaaggtgtgtccaatctgcagcaagaatgttggtctaagtacgagttcactcaagctgcacctgcagaaggcacacaagcgtctatctgcaggcagtgtcgacagcgccatgaccatggagatccaaaaatcgatcgagtcactccagatcagccgaggaggaagcctgagcccgtcccagaagctgaccaaggtgttcagcaatgagctgagcttctgatctgttttcctgtactatagatgaggcaatgtacttggctcacattgtaataacttgtactatcagactgaacttgtgactgtaggtttagttcacacgcctatatgattagcacacgaatgttcaggtgtgaagggtgcaacactaaagaatgttcaggtcttgtatttgttgcctgcagtatgcagttttcttctaaagggatctactctcaatctttgtatagagttactaattttatgggtacttttctagtgtacattcctgtttggtcacctagggctggtaagatatgagctctgttttcagcaagcaccgtagaaaagtttggaggttttgctgggtc

SEQ ID NO: 110978 - DNA, 1808 bp, Zea Mays
ctgaaagaacaaatggcgattttcgcattgtagcaatcgatactggtgtgccccgccgcccccctgtggggcgacgtgtcaaagatcatgagaggtaccccaaagttgtggaactcattttgaatagttcggactactcagcaagcatcctatatgaaatttctggttgtaagcttggacatccacgacctgatgaggttacttccagtgattcttgttgctccctttctgatgaagataatgctggagtgattcatgaattccgaggatcattccgtgcagctcttagggacctggaggggttccatctatttcttctccagctttaccaaaaactggatggtgttttgcgagttttcttgtccataattactaaaacctctgaagaatctgacaataatgatgctgccctttccgattttccttcacctggagccagctatagtactcctcgccttcctaggagagttggaacaacaagtccttcaagggaagtgcagaggctccccgtagtttaagaatgacaatgaaacttcgtgatttttacaaaaccccaaaggttgatcctgaattgctcaaagagattgagcagtggaacgaagcacttaagaatgatgtgatcaaattttgccaagagaacaattttcattctggtttctttgatggaactgaaaacaacatggtagctgatgcctatgaattgaaggtgcgtcttgaacacatcattgaaaggatagccttgatttctgatgctgcaaatacagaacgaccttctcttgttgtcaacaacttgttcataggtggggctctggctgcaaggtctaagtacaccctacagcatttgggcattacccatgtactctgtttgtgttcaaatgagattggtcaatccgattcccaatttcccgatctttttgaatacaagaacttttcaattagcgatgatgatgatgcaaacatcagtgatctttttgaggaagcatcagacttcattgatcatgtggatcatgttgggggcaaggttctagttcattgctttgaagggaaaagtcggagtgccacagtcgtacttgcctatcttatgcttagagagggctttactcttgcaaaagcctggaacttactgaagaaagtacaccgtcgagcgcagccaaacgacggcttcgcaaaggctctcctggcccttgacaagaggctgcatggcaaggtatctatggactggcaacacaagcggccagaaatgaaggtgtgtccaatctgcagcaagaatgttggtctaagtacgagttcactcaagctgcacctgcagaaggcacacaagcgtctatctgcaggcagtgtcgacagcgccatgaccatggagatccaaaaatcgatcgagtcactccagatcagccgaggaggaagcctgagcccgtcccagaagctgaccaaggtgttcagcaatgagctgagcttctgatctgttttcctgtactatagatgaggcaatgtacttggctcacattgtaataacttgtactatcagactgaacttgtgactgtaggtttagttcacacgcctatatgattagcacacgaatgttcaggtgtgaagggtgcaacactaaagaatgttcaggtcttgtatttgttgcctgcagtatgcagttttcttctaaagggatctactctcaatctttgtatagagttactaattttatgggtacttttctagtgtacattcctgtttggtcacctagggctggtaagatatgagctctgttttcagcaagcaccgtagaaaagtttggaggttttgctgggtc

SEQ ID NO: 110979 - DNA, 2333 bp, Zea Mays
atgcagcaggagttggcccttctgaggcaagccattcctgtcgcccctgcaggtgctgctcagggagctggaggtggagaagtgcccgggggcgctgtccctgcgggtgctgttcctggtggcggggccggggtgcctcttcctgtcagtggtctttctctgatgcagtggatgggcatgaagttggattcttttgatggcagtggtactccggtcgaggcggcagattggctgacttatgtggaagataagatgaatgtcttcgagattgcttatgaagatcgggttcgctttggcactcagctgctgaagggtgaggcgcagatttggtggagaggcgtgcaggcagcgcactcctcctcaccaggagtcctatcatgggatgttttcatcaggcagttcgaaaggagattctacccggtcacctttctggagaaaatgaagattgacttgcagtccttcaagcaggagaagaagtctgtcacagagtatgaggtgggcttcaacaaaatggtccgctttgtccctcatgtggcttataatgagatggagaaggcgagccaattccgtcagggtctgaagccttctatcaggcatgctctgggggcctttccgttggtggacttccgtaccacagtggagcaggcgctgggtgtggagatgcaacaccagtacaccatggagtcgcagaagtcttcgggtgttgatcaacctcgcagccaggacacgaggaggggcaacactggaggtccagctcacaagaggggcaagtctcagcatcagcgccaccatccttaccgtggcaaatcttctgactcaggtacttcaggaggaagtactcaaaggtttcgggccgttcctaagcccgggttggggctggtgtgtttccgctgtggagatgcgcatcgccgtgcagagtgtcagtggagtggcaggtgttctatctgcagtcaggaccacaaggatgtggtgtgtaggaggaatcccaatgggaagctcagatgggagccgatagcttcctcctcttctcagggcactatcaatatgatgtcaagtgctgagcagcagttttcagttcctcttcctccacagcagctttatgtgcccgggacttctcagttcgtgccgatgcaaggttttccgcagtatcaggttgtgcctactcctgcgccgtctacccctatgctgtctcagtttggagctccgcgccagcctcctccggtggctcagtggggttcttctgttaatgtcactccgggagcttcctcttctgcgggaagggtcaagtctagggaattattacattctaatctttcatggtagttgaactgtttagtttggtgggctgagatgtctatcttttgtctggtcatgaatgttttttttctaccgttgcattttgattatactatggcaattatctttcttttatatcctgtataaactatatgcttcccttgttatgctactttcaagggaggtgctgccggattttgcagtactttctttctctatgtgttgcatgagtcttgtagaaaggtttttttttggtatcatccattgtgtgggatcagtggggtgttacatttggttgcgttgtcatcaatcaccaaaaagggggagattgtaaggaaaatggaccccgggccatttagctcaaaaggttttaatgtttgattgtcaacataacctgtggactaatatgtttgctagtgtttatgtttatagttaacaggatgcgaagaggattggactaagacactaaggatgcaacacctcaaaagaagacataaaaggtgcatagaagtccaagactcaagaggaaaaggagcccaaaagaaacagcgaagacatccatgaagtgggcagtcagccagcgcactagtggtgcaccggacagtgaacagtaacctgttcgatgtacacgggactgtcccgtgggacaccgggcagtctgtgctgagaggcccacaccgagcactctcgggctgtagcaccggactgtccggtgtgaccggacagtctaggtaacggtcgactgctacagaccccaacggtcggctgacgtggccagtgcaccggacagtgaacagtgcatgtccggtgtgcaccagattgtccggtgtgcccatcgacagaaagctgctgcttctgtccaatggctacaattgtggggggaggctataaataacccccccaaccggcaatttcaaagtgtaggagaccaagcaacataccaaggcatattgtagacatttccaagtgctcaaacacccaagtgcttaataaaatcactcgatgattagcataggtgctttgcaaagtgcttagga

SEQ ID NO: 110980 - DNA, 2412 bp, Zea Mays
gcaaacagccagccaccatggttgagcatgtcaacctctggactctggttcagatgacaacagaacaatgagctagcgaactccagtatactctactccagtagcaatgtagcattcctttaatttgttgtccattaactgacaagtgactaaagaccatcccttatttttggcgagtccggcggatctcggttccaattccaacaccgacacgaaaggctcctacttgctgcacatatataggtagggcctctctacatagagatgcattgcattgtgcattgcattgcataaacctctcgtgggaagtgcaaacaccaaatccgcaatctatctatctatcagccattcaggcctgcaggctgcagctctctccactgcacactagagcgagctgccacagacaaggacacaatgccacccatacccaagagaggcgagcatctcctggtcctcctaattgtcgcatgcgctgccaccgccgccaccgccgccggcaccgtccccttctacccgtccgcggagtccgccgccgccgcgcactgcgacggcacgctgtacccggagctctgcctgtcgacactcgcggacatcccggacctacacaagaagccgctcccggacgtcatctgcgcggccgtgaaccgcaccgaggacgtggtggtcgccacgtccagcaactgctcgtactacctgcaggacaggtccctgtcggcgcgggaccgcctggccatcaacgactgcctggagctgctgtccaccacgatggacgagctccgcgccagcaccgccgacctggcgtcccccgccggcagggggtcggcgtcggcgggcgtgtcgcagggcgccaggcgcgcgacgatggagcacgtgatgacggtgctttcggcggccatcaccaaccagtacacctgcctcgacggcttcgcgtaccagagcggcgggcgcgtgcggcgctacatcgagccgaccttccaccacgtgtcccgcatggtgagcaactcgctggccatggccaagaagctgcccggcgccggcgcctcagcggcgccagcgccgccgcggcagccgttcacggggtacgggcagatggtgaaggggttcccccggtgggtgcgtcccggggaccggcgcctgctgcaggccccggcgtcggccgttgccgccgacgcggtggtggccaaggacggcagcggggactacacgacggtggcggcggccgtggcagccgcccccaccaactcgaagaagcggcacgtgatctacattaaggccggcgcgtacatggagaacgtggaggtcgggaagaagcacgtcaacctcatgttcgtcggcgacggcatcggcaagaccgtcatcaaggccagccgcaacgtcgtcgacggctacaccaccttccgctcggccacagtcgctgtggtgggcaacaacttcttggcccgcgacctgacgatcgagaactcggccgggccgtcgaagcaccaggcggtggcgctccgcgtgggggcggacctgtcggcgttctaccggtgcagcttcgtggggtaccaggacactctgtacgtgcactcgctgcggcagttcttccgcgactgcgacgtctacggcaccatcgacttcgtgttcggcaacgcggccgtggtgctgcagggctgcaacctgtacgcgcgcaagccgctgccgaaccagagcaacatcttcacggcgcaggggcgggaggaccccaaccagaacacgggcatctccatccagaggtgcaaggtggcggcggcggccgacctcgccgccgcccagtcctccaccaagacctacctgggccgcccatggaagcagtactcccgcacggtgtacctgcagtcggagctggactcgctggtcgacccggccggctggctcgagtggaacggcagcttcgcgctcgacacgctctactacggcgagtacatgaacacggggcccggcgccggcacgtccgggcgggtcaagtggaaggggtaccgcgtcatcaccagcgccgccgaggccagcgccttcaccgttggcaacttcatcgacggcgacctctggctcgccggcacgtccatccccttcaccaccggcttgtgagcgcgcggcggtatgtatacgaggggtttcacggcaagggatgacaataaaccaaattggcggcggcggaagttcgtcgtttgtacgttcgttcatttcaatcagagctaaaaaaaaggcaccgtatcgatccggtcgatcgtgttactgtagttgattattttgtgcttggggacgcaggccaatatatttatttaatttaaccgtcccatatatatgtacacgtgcttgttatgattcggtgtattatttatatgtattgatacggtatcaatatataattaataatgatacgggttctaataa

SEQ ID NO: 110981 - DNA, 1126 bp, Zea Mays
ataccgccgaaccaaatccaacgtccgcagaaaccaaactcccgtcgaggaggaggcgtcgacttcccatagtttccactccacttcgatcctatcgtatcctccccaaacactccaccaagaaccttttccccctccaataatagtccaagttactcggaggaatccatgtgcggcggtgcaatcatcttcgactacatcccggcgcggcgccgggtgtccgccgctgacttctggcctgactccgaagccgacgccgaggactccgactcgcacgcccctgaccctgagagagtgccgcgcccgcgcgggaaggcgaagcgtgggcgcaagaaccagtaccgcggcatccggcagcggccgtggggcaagtgggcggcagagatccgcgaccccgtgaagggcgtgcgcgtctggctcggcacctaccccaccgccgaggccgccgcgcgcgcgtacgaccgcgctgccaggcgcatcaggggcgccaaagccaaggtcaacttccccaacgacgcctcctcctccagcgtcaccgcgccgacggcggcatctggggtggcggcacaggccccggccgtttttctcccggcgcccaaggtagaggcgcgcgcacaggtgtccgacgaggtcaaggagctgtccgaggagctaatggcctacgagaactacatgaacttcctcggcgtcccgtacatggagggcgggaatgcagctgtaagtgccaccaccgctgccgctgccgctgccgccgtccccgaagaagcgcaggtgccggcgccagcgccagccgggctgtggagcttcgaggactactactacccgccgtcactgtcgctcttcactgaataatgaacgcggtttgccgtgcctgtgttgttatctcttttgtatctgtggctcgcgagttgaggcatgtaaacaagctttgcagttttttttttaactccggtctgtgcttctcagcagctcgctgcggtgcagaggaatctgtttcattctgttcgtgattgaaactagttttacggttacaacgcgcagatggaggatcgtcggacactcggaccattgtaacaaggcttgcataccatttggaagattttaccatactgaattggcgacacgc

SEQ ID NO: 110982 - DNA, 177 bp, Zea Mays
atggcgtggagatatcctcctatggggccaacacaaatgccttgtggatatgctccatggccgacactgccaccaccatcacctgaagtgggtttgggttcacgtcctactccggacgatgctatgaacttcatcgaccagatcttcaacacgactgacgacccacctcaagcttga

SEQ ID NO: 110983 - DNA, 1123 bp, Zea Mays
gtcggcctcaggctgcttgaaatatgcatttcagcggtccctggtgtcctctctcccgctcaagggcagtagagacagcagctgagctgactggatctcgatctaccgctttgcttccgttttgagccgccagctgtgtggcctcctgtctgtctgcctatcttgaacctccatggattccacactcttcatcatcggcgtcataggcaacatcatctcagttctggtcttcatttctcccatcaagacgttctggaggatcgtgcggagcgggtcgacggaggagttcgagccggcgccgtacgtgttcacgctgctcaacgcgctgctgtggctctactacggcgccaccaagcctgacgggctcctcgttgccaccgtcaatggctttggggctgccatggaggccatctacgtcgtcctcttcatcgtctacgccgccaatcatgccacaagggttaagacggcgaagctggcagcagcgttggacatcggtggctttggagtagtgtttgtggccaccacgttcgccattaacgaattaaacatgagaatcatggtgatagggatgatatgtgcctgcctcaacgtactcatgtacgggtcaccccttgctgccatgaaaacggtgatcaccaccaagagcgtggagttcatgccgttcttcctatccttcttcctcttcctcaacggaggcatctgggcaacgtacgcggtgcttgaccgagacatcttccttgggatccccaatgggataggcttcatcctcggcaccatccagctgatcatctacgcgatctacatgaacagcaaggtctcccaaagcagcaaagaaatagcgtcgcctcttctagcctctagccaggaagaagcagctagccatgtctgatgatgttcgtcagtgtgctggagttttgtagcagtccaagccaacggtgaacacctaccaatgcaagagattatcgattttcatttttaaggaatgtaaagtctatattttttatgaatatatatttttatatataccttggaaatgctcacgtcgattttgttacgttttagtgcctcttttggtacaacttcattaataaagcaaatctgggcaaatctggattgaaattta

SEQ ID NO: 110984 - DNA, 210 bp, Zea Mays
agttatttgtacttccaatagatttattatggaaatatatactattattcatctactaacatttattgcacaccataaatattagtacattttcgtatacaatatggtaaagtcaagacaaattgactcgttaaaaagcaaagcaagaatggcgccattctttctagaaacggagatacgttcgagctcttcccatctatctatatatat

SEQ ID NO: 110985 - DNA, 692 bp, Zea Mays
gccaatttgtatgaggcccatcttccacgacaaatgaaaaccctaatctccagcaccccggcggcctccagcgctcctgctccttgctcgcctccacccgcggccaccaccgccctgcggcccccgccgcttgccagcctccaccgccctgcgcccccgctggtggaccgcccatcgcccaccgacgaggagctcgtctcctactacctccgtcgccgcgtcctcggccatcgcctccgagtcgatgccatcgccgagatcgacctctaccgcctcgagccctgggacctcccctccctctcccgcatccacagccgcgacgcccagtggtacttcttcgcccgtctcgaccgcaaggtcgccggcgctggcgctgggggccggggcggtcccggcaacatgaccaaccgcgctacgccgagggggtactggaagaccacgggcaaggaccgcgaggtgcaccgccgcgacaagcccgtaagacagctggggaacaggctgcttccttggacgaggagcagtaagacaagggatctggagccggagccccgatggcggtgacgggaacctcgctggcagcggcagcgacgatgctggcggcggcggcggccatcttcatcaccttcgtcatctgcttgtacctcttcctgtgcgcgaagcggtaccgcggggccgccctgaccatcagcggc

SEQ ID NO: 110986 - DNA, 2294 bp, Zea Mays
cgtttctgatcgaaacgaagcattcccccgttcctgtctctgcttactcacctctcccatgagacgaagcataaaatcaaataggatatgtgggttggaaataggtcgtgaaattgattgaaatacctggggcttgagcgtgatatatagagggtggtagagaccaagcgacgttgggcgagcggcgccgccggggctgcgttggtcccttcaccggtgatgagcatccaccagatacaggaatgaacaacattgtgtaggcacctcgtccagacatctaaggcgaaaaatgctgcgcctgcaccaccatagtgcacctgtctctccgcacgctgcgatttgtccaccgagtaggcttgcttgttcttgcatatgtaacaagccaaacagcagaatcaccgcttcccaggggtggtcttccataaggcggcgaatcaccactgttgccagtggccagtcagtaccaggatacacacctgatgatggcgatcaatgccttgaaacaggcaacaagctctcttttgctactgtgaaggaggctttcatcagcctgaactctgtgggtgtcagaagtgagctaattcttctagctctaccagcagtcttgggtcaagctattgatccaatagcgcaacttatggagactgcatacatcggtagattaggtgcactggaattggcatcggctggtattggtatatcgatttttaatattgtgtcaaagatcttcaacataccactgttgagcattgcaacctcatttgtggcagaggatatttctaggagtgctaccaagcatcctagttcaggcaaattggagctgacatctgtatcatctgccctgatcttagctgctggaattggtataatggaagcattagcattgttcctaggatcaggattgtttcttaaactaatgggcgtgtcacctgtatctccaatgcacagacctgctaaactctttctttcattgagagctctcggagcacctgcaaatgtgattatgttggcagtccaaggtatctttcggggattcaaggatacaaagactccggtgttttatataggtttgggcaatctttctgctgtagcccttcttcctctacttatatatggctttaagcttggcataactggtgctgcaatttctacagttgtgtcacagtacattattacagttcttcttctttggtctctaagtaaaagagctgttttgcttcctccgcgaatagatcaattagagtttggtggatatctaaaatctggtggaatgctgttgggaagaactctttcgattctgctaactatgaccattggtacatcaatggctgctcggcaaggcccaacagcgatggctgctcatcagatttgtttgcaagtatggcttgctgtatccttgcttgcagatgcattagctgtttctgcccaggcgctgatagcaagctcttatgcaatattggactacaaaaaagttcaaaagacagcaatgtttgcgttgcagataggagtgtttagtgggttagctttggccattggattgtatgcctcatttggcaatatagctagactgtttaccagtgacccagaggtcctaacggttgtcaaatcttgtgcactgtttgtctgtgccagtcagccaattaatgccctggccttcatctttgacggtctacattatggtgtatcagattttgaatatgtggctcaagctactatcgtggtgggtgttacgtcttcactcgtcctgttatgggctccgtctgtattcggcctggctggagtttgggctggtttgactacactcatggggttgcgtatggctgcaggcatcctgaggttgctacagaaagcgggcccttggtcgtttctgcacgaggagccataagctgaggtgtatcaactaccagcctgcgcagtttggagctgctaacttactgctgggagtttacatcactgcaaagattatccgagtgtcatggaggactcgctgaagatgttacccctgttactcctccggctcagaacaaaatctgacttcattgcatttcttaaaatcagtctgctagatggcatggtttggtttggattggtttggtgaaggcgtgaggcccatctgaacatcggtgcggcctctatttttttttggcgaactcctttgtatgctatagcagctgtgcagtttctgtagaagaaaagatacaaggatcatttatagcatcgatatatgatgtatgcaactcctctgaattgtactcggtgtaaattattttagaaccgttttgttgattaggtac

SEQ ID NO: 110987 - DNA, 3240 bp, Zea Mays
cccctaggtctcgtgcgtgatctcgtctagaagcccggccgctgccgactcccactcccaccccccaggaggccaggacaggaacggaggtgcggccgcgttcccaagtcccaatccaaagcggcggggggtcccgcgctcgttaattcccttgccgtatccccaactatctcgcctcaccgtcgcctctcgccgcctgcctcgcttcttcttcgctcacaccacgtacgatacgagcctcaccagcgccggcgctgtagtgtgcagccctcctcctggatctctgcacccttcggcggccacgcctcgcgcgcgcgcgcggacatggaggtcgaataccacgaggagtacgtgcggagctcgagaggcgtgcagctcttcacctgcggctggctgcccgctgccgcatcgcccaaggcgctcgtcttcctctgccacggctacggcatggagtgcagtggcttcatgagagaatgcggcgtgcggctggcggcggccgggtacggcgtgttcgggatggactacgagggccacggcaagtcgatgggcgcgcgctgctacatccgcagtttccgccgcctcgtcgacgactgcggccatttcttcaagtccgtctgcgagcttgaggagtaccggggcaagagccggttcctgtacggcgagtccatgggtggcgcggtggcgctgctgctgcacaccgaggaccccgccttctgggacggcgccgtcctcgtggcgcccatgtgcaagatatcggagaaggtgaagccgcaccctctggtgatcacgctcctgacgcaggtggaggacgtgatccccaggtggaagatcgtgcccaccaagcaggacgtcatcgacgccgccttcaaggaccccgtcaagcgtgaaaagatcaggaggaaccagctgatctaccaggacaagccgcggctcaagactgcgttggagatgctcaggaccagcatgtacatagaagacagcttgtcacaggtgacgctgccgttcttcgtcctgcacggcgaggccgacacggtgacggacccggaggtgagccgcgcgctgtacgagcgttcggccagcgccgacaagaccatcaagctgtacccggggatgtggcacggcctcaccgccggggagcccgacgagaacgtggaggccatcttctccgacatcgtgtcctggctcaaccaccgcagccggagctgggccgtggaggaacgccatatgaccaggaagctggcgccagctccggccaagtccatcgaaggccacggcaccgtggacggcaaagtgcacacacaacaagggcgccctcggcggcgccagggcttcctctgcgggcttgccggccggacgcatcaccacgcggagatgtgaaagatagaatcgccgtctcggtcccggatcagatgggcgcctgctttcttcaaccatggcaaataaaggaatgatgacctgcggtttataatatagaggtcttattatgcttgtcaaagttatgtatgaccaatcattcccagtctggtgcagattcaaactcatgctcagatatatgtaatgtaagattataacgctattagcattctggataacccgttaacaatgacattacaaaatggtacgtcgttacatagtatagcgtgccaggctattttccgtactttaacaaacatttatatccctatataacaactacgtatagagcacagcgccaaaactgtatcaagtcatataccatacaaacgtgtcacttcaacaagttttgagcacttaagaaaggccaccagctgactcggtggacccttcctggtccccgaagatacgtttgcggaagtcagtgaccatgcggggaaggccctcacggaggggaaccttgggctcccagccgaggagctctttcgcgcggctgatgtcaggcttgcgcttgtgcggatcatctgcggtgttcggacggaactcgatgtgcgcctctgggtcgatggtgtcctggaccaccttagccagctccagcatgctgaattctccagggttgccgaggttgaacggcccaatgtgctccccttccatgagcttcatcagcccttccacctgcggaaaaataggtgacaccagtagaaccaaaagaatcgggtagtggaacagaggcgtgactgatactcatcacgaagcatgatttctgaataactacatgtcttggcaagaaatgactgacagacagatctttggtggatcataaatatgcactcatatgacgcaaattgtatatgtcggggaatttggtattggcaggtttgtgcaaatgcccctttagtagtgatagagtgactcaccaaatctgagacatattgaaagctcctagtctgcttgccatcaccatagactgtcaaaggctccttcctcagcgcctgaaaaacataattcataatgaccatcttgttgccaaaatacaaagtgcatatgcgttaagaccttcaaagaggaggctgaagctggtggctacctgagcaacgaaattactgacaacacggccgtcatcaatgcacatgcgaggaccatatgtgttaaagatccgggcaatccttacctaagtaaagggaagaaaaaaaaaacgagctaacatagttgtactatagcccacaaaagttaatctgaatgctattgataccaaacatttggatggcacaaaaacctcaaggttggcaccacgatggtagtccatggttaatgtttcagctgtacgctttccctcatcatagcagctcctgacacctatcattaaaacagaagtatttttcatgaataaaaaaacgctttaagagtgcacaaaatcaaacagtatgtaacaaaatacgaaaaggctcccattaggatatggccagatgttcctgtcaagatcatctcctgttcttttcaacctcttgattcctctctcgtgctcattggttcactagttttgttaaactaagctgacatagtgtggttttatcctatccttccttttttggagagggacccacataatggctatcctgcctggaactaattcaccaaccaaaagtgcccacttgcacaagaaagacacaaagcatgtatgtcaaccaaattgcaaatccacaaccaacaattcccagcatttctaattccagctaaacatctctttgcccaacagttcataggagcagtaggttcacaatcaacaatttcccagcatttctaattccagctaaacgtctctttgcc

SEQ ID NO: 110988 - DNA, 2086 bp, Zea Mays
gttcccaagtcccaatccaaagcggcggggggtcccgcgctcgttaattcccttgccgtatccccaactatctcgcctcaccgtcgcctctcgccgcctgcctcgcttcttcttcgctcacaccacgtacgatacgagcctcaccagcgccggcgctgtagtgtgcagccctcctcctggatctctgcacccttcggcggccacgcctcgcgcgcgcgcgcggacatggaggtcgaataccacgagctcttcacctgcggctggctgcccgctgccgcatcgcccaaggcgctcgtcttcctctgccacggctacggcatggagtgcagtggcttcatgagagaatgcggcgtgcggctggcggcggccgggtacggcgtgttcgggatggactacgagggccacggcaagtcgatgggcgcgcgctgctacatccgcagtttccgccgcctcgtcgacgactgcggccatttcttcaagtccgtctgcgagcttgaggagtaccggggcaagagccggttcctgtacggcgagtccatgggtggcgcggtggcgctgctgctgcacaccgaggaccccgccttctgggacggcgccgtcctcgtggcgcccatgtgcaagatatcggagaaggtgaagccgcaccctctggtgatcacgctcctgacgcaggtggaggacgtgatccccaggtggaagatcgtgcccaccaagcaggacgtcatcgacgccgccttcaaggaccccgtcaagcgtgaaaagatcaggaggaaccagctgatctaccaggacaagccgcggctcaagactgcgttggagatgctcaggaccagcatgtacatagaagacagcttgtcacaggtgacgctgccgttcttcgtcctgcacggcgaggccgacacggtgacggacccggaggtgagccgcgcgctgtacgagcgttcggccagcgccgacaagaccatcaagctgtacccggggatgtggcacggcctcaccgccggggagcccgacgagaacgtggaggccatcttctccgacatcgtgtcctggctcaaccaccgcagccggagctgggccgtggaggaacgccatatgaccaggaagctggcgccagctccggccaagtccatcgaaggccacggcaccgtggacggcaaagtgcacacacaacaagggcgccctcggcggcgccagggcttcctctgcgggcttgccggccggacgcatcaccacgcggagatgtgaaagatagaatcgccgtctcggtcccggatcagatgggcgcctgctttcttcaaccatggcaaataaaggaatgatgacctgcggtttataatatagaggtcttattatgcttgtcaaagttatgtatgaccaatcattcccagtctggtgcagattcaaactcatgctcagatatatgtaatgtaagattataacgctattagcattctggataacccgttaacaatgacattacaaaatggtacgtcgttacatagtatagcgtgccaggctattttccgtactttaacaaacatttatatccctatataacaactacgtatagagcacagcgccaaaactgtatcaagtcatataccatacaaacgtgtcacttcaacaagttttgagcacttaagaaaggccaccagctgactcggtggacccttcctggtccccgaagatacgtttgcggaagtcagtgaccatgcggggaaggccctcacggaggggaaccttgggctcccagccgaggagctctttcgcgcggctgatgtcaggcttgcgcttgtgcggatcatctgcggtgttcggacggaactcgatgtgcgcctctgggtcgatggtgtcctggaccaccttagccagctccagcatgctgaattctccagggttgccgaggttgaacggcccaatgtgctccccttccatgagcttcatcagcccttccacctgcggaaaaataggtgacaccagtagaaccaaaagaatcgggtagtggaacagaggcgtgactgatactcatcacgaagcatgatttctgaataactacatgtcttggcaagaaatgactgacaga

SEQ ID NO: 110989 - DNA, 2116 bp, Zea Mays
gttcccaagtcccaatccaaagcggcggggggtcccgcgctcgttaattcccttgccgtatccccaactatctcgcctcaccgtcgcctctcgccgcctgcctcgcttcttcttcgctcacaccacgtacgatacgagcctcaccagcgccggcgctgtagtgtgcagccctcctcctggatctctgcacccttcggcggccacgcctcgcgcgcgcgcgcggacatggaggtcgaataccacgaggagtacgtgcggagctcgagaggcgtgcagctcttcacctgcggctggctgcccgctgccgcatcgcccaaggcgctcgtcttcctctgccacggctacggcatggagtgcagtggcttcatgagagaatgcggcgtgcggctggcggcggccgggtacggcgtgttcgggatggactacgagggccacggcaagtcgatgggcgcgcgctgctacatccgcagtttccgccgcctcgtcgacgactgcggccatttcttcaagtccgtctgcgagcttgaggagtaccggggcaagagccggttcctgtacggcgagtccatgggtggcgcggtggcgctgctgctgcacaccgaggaccccgccttctgggacggcgccgtcctcgtggcgcccatgtgcaagatatcggagaaggtgaagccgcaccctctggtgatcacgctcctgacgcaggtggaggacgtgatccccaggtggaagatcgtgcccaccaagcaggacgtcatcgacgccgccttcaaggaccccgtcaagcgtgaaaagatcaggaggaaccagctgatctaccaggacaagccgcggctcaagactgcgttggagatgctcaggaccagcatgtacatagaagacagcttgtcacaggtgacgctgccgttcttcgtcctgcacggcgaggccgacacggtgacggacccggaggtgagccgcgcgctgtacgagcgttcggccagcgccgacaagaccatcaagctgtacccggggatgtggcacggcctcaccgccggggagcccgacgagaacgtggaggccatcttctccgacatcgtgtcctggctcaaccaccgcagccggagctgggccgtggaggaacgccatatgaccaggaagctggcgccagctccggccaagtccatcgaaggccacggcaccgtggacggcaaagtgcacacacaacaagggcgccctcggcggcgccagggcttcctctgcgggcttgccggccggacgcatcaccacgcggagatgtgaaagatagaatcgccgtctcggtcccggatcagatgggcgcctgctttcttcaaccatggcaaataaaggaatgatgacctgcggtttataatatagaggtcttattatgcttgtcaaagttatgtatgaccaatcattcccagtctggtgcagattcaaactcatgctcagatatatgtaatgtaagattataacgctattagcattctggataacccgttaacaatgacattacaaaatggtacgtcgttacatagtatagcgtgccaggctattttccgtactttaacaaacatttatatccctatataacaactacgtatagagcacagcgccaaaactgtatcaagtcatataccatacaaacgtgtcacttcaacaagttttgagcacttaagaaaggccaccagctgactcggtggacccttcctggtccccgaagatacgtttgcggaagtcagtgaccatgcggggaaggccctcacggaggggaaccttgggctcccagccgaggagctctttcgcgcggctgatgtcaggcttgcgcttgtgcggatcatctgcggtgttcggacggaactcgatgtgcgcctctgggtcgatggtgtcctggaccaccttagccagctccagcatgctgaattctccagggttgccgaggttgaacggcccaatgtgctccccttccatgagcttcatcagcccttccacctgcggaaaaataggtgacaccagtagaaccaaaagaatcgggtagtggaacagaggcgtgactgatactcatcacgaagcatgatttctgaataactacatgtcttggcaagaaatgactgacaga

SEQ ID NO: 110990 - DNA, 2119 bp, Zea Mays
gttcccaagtcccaatccaaagcggcggggggtcccgcgctcgttaattcccttgccgtatccccaactatctcgcctcaccgtcgcctctcgccgcctgcctcgcttcttcttcgctcacaccacgtacgatacgagcctcaccagcgccggcgctgtagtgtgcagccctcctcctggatctctgcacccttcggcggccacgcctcgcgcgcgcgcgcggacatggaggtcgaataccacgagcaggagtacgtgcggagctcgagaggcgtgcagctcttcacctgcggctggctgcccgctgccgcatcgcccaaggcgctcgtcttcctctgccacggctacggcatggagtgcagtggcttcatgagagaatgcggcgtgcggctggcggcggccgggtacggcgtgttcgggatggactacgagggccacggcaagtcgatgggcgcgcgctgctacatccgcagtttccgccgcctcgtcgacgactgcggccatttcttcaagtccgtctgcgagcttgaggagtaccggggcaagagccggttcctgtacggcgagtccatgggtggcgcggtggcgctgctgctgcacaccgaggaccccgccttctgggacggcgccgtcctcgtggcgcccatgtgcaagatatcggagaaggtgaagccgcaccctctggtgatcacgctcctgacgcaggtggaggacgtgatccccaggtggaagatcgtgcccaccaagcaggacgtcatcgacgccgccttcaaggaccccgtcaagcgtgaaaagatcaggaggaaccagctgatctaccaggacaagccgcggctcaagactgcgttggagatgctcaggaccagcatgtacatagaagacagcttgtcacaggtgacgctgccgttcttcgtcctgcacggcgaggccgacacggtgacggacccggaggtgagccgcgcgctgtacgagcgttcggccagcgccgacaagaccatcaagctgtacccggggatgtggcacggcctcaccgccggggagcccgacgagaacgtggaggccatcttctccgacatcgtgtcctggctcaaccaccgcagccggagctgggccgtggaggaacgccatatgaccaggaagctggcgccagctccggccaagtccatcgaaggccacggcaccgtggacggcaaagtgcacacacaacaagggcgccctcggcggcgccagggcttcctctgcgggcttgccggccggacgcatcaccacgcggagatgtgaaagatagaatcgccgtctcggtcccggatcagatgggcgcctgctttcttcaaccatggcaaataaaggaatgatgacctgcggtttataatatagaggtcttattatgcttgtcaaagttatgtatgaccaatcattcccagtctggtgcagattcaaactcatgctcagatatatgtaatgtaagattataacgctattagcattctggataacccgttaacaatgacattacaaaatggtacgtcgttacatagtatagcgtgccaggctattttccgtactttaacaaacatttatatccctatataacaactacgtatagagcacagcgccaaaactgtatcaagtcatataccatacaaacgtgtcacttcaacaagttttgagcacttaagaaaggccaccagctgactcggtggacccttcctggtccccgaagatacgtttgcggaagtcagtgaccatgcggggaaggccctcacggaggggaaccttgggctcccagccgaggagctctttcgcgcggctgatgtcaggcttgcgcttgtgcggatcatctgcggtgttcggacggaactcgatgtgcgcctctgggtcgatggtgtcctggaccaccttagccagctccagcatgctgaattctccagggttgccgaggttgaacggcccaatgtgctccccttccatgagcttcatcagcccttccacctgcggaaaaataggtgacaccagtagaaccaaaagaatcgggtagtggaacagaggcgtgactgatactcatcacgaagcatgatttctgaataactacatgtcttggcaagaaatgactgacaga

SEQ ID NO: 110991 - DNA, 1999 bp, Zea Mays
tgctgctgctatgtcgtctagggtgttcgttgttttcaaggctacctccccaactcccatccacatactaatattattgcaattttggctttggcttgttgtaatcatgtctgtctgtgtgtgaactaattaaagggtttatcattatatacttttacaaaattaacctgcgtaaaatcaagtgttattcgattgatcctcattctagctgttcctcaataacacgggtgcgtggtcgacgaccgaacgagtgcagaatgcggcgtgcggctggcggcggccgggtacggcgtgttcgggatggactacgagggccacggcaagtcgatgggcgcgcgctgctacatccgcagtttccgccgcctcgtcgacgactgcggccatttcttcaagtccgtctgcgagcttgaggagtaccggggcaagagccggttcctgtacggcgagtccatgggtggcgcggtggcgctgctgctgcacaccgaggaccccgccttctgggacggcgccgtcctcgtggcgcccatgtgcaagatatcggagaaggtgaagccgcaccctctggtgatcacgctcctgacgcaggtggaggacgtgatccccaggtggaagatcgtgcccaccaagcaggacgtcatcgacgccgccttcaaggaccccgtcaagcgtgaaaagatcaggaggaaccagctgatctaccaggacaagccgcggctcaagactgcgttggagatgctcaggaccagcatgtacatagaagacagcttgtcacaggtgacgctgccgttcttcgtcctgcacggcgaggccgacacggtgacggacccggaggtgagccgcgcgctgtacgagcgttcggccagcgccgacaagaccatcaagctgtacccggggatgtggcacggcctcaccgccggggagcccgacgagaacgtggaggccatcttctccgacatcgtgtcctggctcaaccaccgcagccggagctgggccgtggaggaacgccatatgaccaggaagctggcgccagctccggccaagtccatcgaaggccacggcaccgtggacggcaaagtgcacacacaacaagggcgccctcggcggcgccagggcttcctctgcgggcttgccggccggacgcatcaccacgcggagatgtgaaagatagaatcgccgtctcggtcccggatcagatgggcgcctgctttcttcaaccatggcaaataaaggaatgatgacctgcggtttataatatagaggtcttattatgcttgtcaaagttatgtatgaccaatcattcccagtctggtgcagattcaaactcatgctcagatatatgtaatgtaagattataacgctattagcattctggataacccgttaacaatgacattacaaaatggtacgtcgttacatagtatagcgtgccaggctattttccgtactttaacaaacatttatatccctatataacaactacgtatagagcacagcgccaaaactgtatcaagtcatataccatacaaacgtgtcacttcaacaagttttgagcacttaagaaaggccaccagctgactcggtggacccttcctggtccccgaagatacgtttgcggaagtcagtgaccatgcggggaaggccctcacggaggggaaccttgggctcccagccgaggagctctttcgcgcggctgatgtcaggcttgcgcttgtgcggatcatctgcggtgttcggacggaactcgatgtgcgcctctgggtcgatggtgtcctggaccaccttagccagctccagcatgctgaattctccagggttgccgaggttgaacggcccaatgtgctccccttccatgagcttcatcagcccttccacctgcggaaaaataggtgacaccagtagaaccaaaagaatcgggtagtggaacagaggcgtgactgatactcatcacgaagcatgatttctgaataactacatgtcttggcaagaaatgactgacaga

SEQ ID NO: 110992 - DNA, 2236 bp, Zea Mays
gtagctcttccccaaataaattgattgtgccgttgcaacgtatgtaatttgagaaaccgtatcttatcaagtcgtgtcttataaaaagagagagagagagagagtggaaccagtatttataagcaatatgtgatgcatcatatcgtaaacttcagatcggataggaaagcgccaagacgctcacgctgccagctcagctcgtgttcgacccatgctttccacgaagcatgggcaagaccaagacggcaggagcaggggagcagcagctgatgataagctagctagccagagtcccactccactttacctccttgtcagctgctcgcacttgcagcgtcccgttcccgcacttctcttccttctcgtttcgtcctgcacagcgcacgcaactgccaccggccaccgcgcaaactccattgcgcgcagatcaagaccgccacacccaccaccagcgcttcagcgggagacgtgacgactgacgagacgaagcctctccccacggcgcctccccctccacatggcctgggctcgccttgcctcccgctcccgtctgcgccccgcggcctccgccgccggccgatcccgacacgcctcaacaccggctccgcctccgcctccgtccccacctaccacacgcacggtacctgcggccacctccgcgccaccgctccggcgtctcctcctgcttccgcggcaccggtttgctgacgccacgccctcagcatcgaccgcgtggctgctcggtgcccgctggcgccaggggcacggcaggaggtgctttgcgagcgccgcctacccggcgcaggcgacgccgggggaggcgtctgagctggtggatgtgccactggcgcagactggggaaggcatcgccgagtgcgagcttctgcgctggttcgtcgccgagggtgaccaagtagatgaattccagccactctgtgaagtacagagtgacaaagcaactatcgagataacaagtcgtttcaaggggaaagtacataagattcactttgtccctggtgacatagtgaaggttggtgaaactttactgaaaatggttgtgggtgacagccaaattgtttccccagataatatagttccatccgctggtaagtcccttggagtagagtctgcagttttctcaagtgaaggcaatgttcctggtggaaatctctctacaccagctgttaggcatctagcaaagcagtatgggatcagcataaatgaaattgttgggacagggaaagatggtagggttttgaaagaagatgtgttgaattatgctgtcagcaaaggtgtttgcaaacaacaatcgttagcttcggaagggaacattggtcaagttgagttactagaggaagggaaagcattactcgatgaggacttctatgaagataagaaaatccttctcaggggataccagagatcaatggtcaaatcaatgagcctggcagcaaaagttccacattttcattatctagaggagataaattgtgattctcttgtgcaactaaaaaccacatttcaaaatgagaacaaggatcaaactatcaagcacactttccttccgttcctcataaagtcactttctatggcactgagtaaataccctatgttgaacagttctttcattgaggaaactaacgaagttgtgttcaaggggcctcacaacattggggtggcgatggctacaacacatggattagtcgtgccaaacatcaagaaagtgcagtcgctatcaatattggagatcacgaaggaattggcgcgattgcatgagatggcatcacaaaacaggctaagcgctgcagatattgaaggtggcactataacacttagtaacataggtgccattggtggcaagtttggctctccacttctgaacctacctgaagttgccatcattgcccttgggcggattcaaaagcttcctcgcttcgatgatgacgaaaacgtttacccttcatccataatcaatgttactgttggagccgatcaccgagttgttgacggggccacggttgcaagattctgtaatgaatggaagagcctcgtggagaagccagagctgctcttgttgcatatgcgatgacccagtaatgtaccggtacatactacgacctgaaacggaggcattttggcataaaaaaataaatccatgtattcaaataaataaccaacgtggcttctctgcctggaaacagtggaaataaattgggagttattttcggagtcctaa

SEQ ID NO: 110993 - DNA, 690 bp, Zea Mays
agttcaactatgaatgatactctgctatttccctttccatgtattacaccattttgactattcaatgcattattttgtggtgaaggtgatgaaaaatagtttattttgttagggcctcacaacattggggtggcgatggctacaacacatggattagtcgtgccaaacatcaagaaagtgcagtcgctatcaatattggagatcacgaaggaattggcgcgattgcatgagatggcatcacaaaacaggctaagcgctgcagatattgaaggtggcactataacacttagtaacataggtgccattggtggcaagtttggctctccacttctgaacctacctgaagttgccatcattgcccttgggcggattcaaaagcttcctcgcttcgatgatgacgaaaacgtttacccttcatccataatcaatgttactgttggagccgatcaccgagttgttgacggggccacggttgcaagattctgtaatgaatggaagagcctcgtggagaagccagagctgctcttgttgcatatgcgatgacccagtaatgtaccggtacatactacgacctgaaacggaggcattttggcataaaaaaataaatccatgtattcaaataaataaccaacgtggcttctctgcctggaaacagtggaaataaattgggagttattttcggagtcctaa

SEQ ID NO: 110994 - DNA, 357 bp, Zea Mays
atgcctatatcttcatgcccctttgttagactgaagaatttctggcaacagctgatgaatctaatgaagagcctgtttcaaaacattcgcccaagtctggagaaattctctgcaaacacaaggactagactacatttgcttttgacaattcgtctgattgcccagttcactaaactgtcgggtggactagaaggtggttctgaccctccagcattccaacgagctgaaaagaaaagacttgaagctgctaaaagggctgaagaagctgcagcagctaaggaggcagcgctggaagaatgtctttgcgacgcacaaaattctgaggttgagagtgccatgactcctagaaaggtttag

SEQ ID NO: 110995 - DNA, 506 bp, Zea Mays
actcatagttccaaacggttctgacctttgattgctttgctttatgataaggtgttggagatcaggaacattcccactgtgcgatggatcccatgtgaagcacaacaaagcaaccggtgataatgtgggccccctgctcgttaagaagtagatgcagtttctttcgacttttgccctagcgtcatgttgagcgctgagctgaacactatctgtatgtcatgatatatgtttttttagccaagctaaactatcacgacgcaacgatccttcatttagaataaagtaagctgctcatgtcaataagtcttagtttcatgattgtagggagcgttagtgacaggtgatacatgcagtgggatgtatgaaaatcggaaaaatattttgttctctgtgttgaacaatcaagtcatgagcttatgatctgctaatgtccttcagttatactaggtaggtgcccgtgcgatgccaaggaacataaatcttgatttgtatatcagctatgcttc

SEQ ID NO: 110996 - DNA, 351 bp, Zea Mays
atgggcaggtcgaatgcggaccgtagccccacgcgcgaccgcgtgtctgggaacttgggccccaacggcaggcccgtggcgaggacggcgcggaggtcgagcgggaacgcaaaccccatctcggcctcggcgcccgccagctccaactccgtcaggcccgggagcacggccaccccagaggcccggaggtggcccagcaccgcggccgcgagcggggcggaggagtgcagcccgtgccgcggtgaggtcgacgccgacgaggggcaagaacgggggcggggtggcggcctcttcgtagatctgtgcggagggtgggggcgagggcatggtatggcgtcgtgggggcggtag

SEQ ID NO: 110997 - DNA, 1474 bp, Zea Mays
ctcctccctgttccctgtttctgcgcgcgcttagttcccatggcagctacgcccttcctctgctcggctgcttgcagcgagctctccaccgccctggatttctctatctccctcacggcaccctccctggcgctcgccctgggtgccgtcgtctagctcggacccgcccccagccgcgcctctctcgtcaagcttcatgacgcacgattttctctgccccagcccgacatttttctcctggtggtcgagctccctcaagcttcttagttcgtccgcccgcgaacgcccatggcgcggtcgcctctctgtgcacgcgccgtcgccctgatttcctgctccctgactccaactcaagttcgcttgaccgcgtgtgcccctacgccgcaccctgaagccccctgctcggcgcccgagacccctcccatggatgctcccagccgagcggctcccatggcgcctgatcccaacgccgctcctttcccccaacgcatcttcttcactagcgtgccgtccctgcttgccctctgctccaccgagcttctgcgtgttccatctccagcttgctcccctgcgccctcctaatactcgcgtccagatttttcctcgcctttggtgctcgtccagcccacccgtccctcctctctcctccccatcttctcccatgggcggtgcgagctttggctcgagctcgcctctgctcttgtgcttggattttgctaggcccgagcagcttcctggtgcgcgcccggatcctctcctccctccgctcggtcttggttccagtcgccgcgcccctctactgcgcgcgctgcttgctcccctgctggcaaccgagtccctcgcgctggccgttctccagctccagctcgctgcgcgccctgctccctgttgccacgtgctccagcccggatttcgccttgtcgcccaacttggctctgccctctgctctagctcgccgtcgcctctttgtgctggccgactagtctgccgtgatcgcgagcagttccctactcggccaggatggtcacgccgtcgatcccgcttgagccccttcgcgttcgtcgaagctccctggctcgactctgcccagttcgcgtcttgctcgcctttgcgtcgcgcgtagcattctgttgttcctgcgtgtgctgccgcgaagctccctgttcagttctcctccgtcgcgttgttgtgcgcgcgaagttctttgctcgcaacggcgtgtcgagtttccgcgtcgagctcttctcttgcatgccggtcgtcgtctccaagccgattcttggctgtcgtggtatttttagttatccggctgcgtcggtagttgtcaagtgtgtctgttgctgtgaactcgcccctggtgcccattctgtccccggtccacacttccttcagcttggccaggcggggcatcgtttcgtgttgtgctcgcgcagtttcctgctcgccagcgcgtccccttggcttgtttggcctt

SEQ ID NO: 110998 - DNA, 693 bp, Zea Mays
atgctcccagccgagcggctcccatggcgcccgatcccaacgccgctcctttcccccaacgcatcttcttccctagcgcgccgtccctgcttgccctctgctccaccgagcttctgcgtgttccatctccagcttgctcccctgcgccctcctgctgctcgcgtccagatttttcctcgcctttggtgctcgtctagcccagccgcccctcctctctcctccccatcttctcccatgggcgctgcgagctttggctcgagctcgcctctgctcttgtgctcggattttgctaggcccgcgcagcttcctggcgcgcgcccggatcctctcctccctccacttggtcttggttccagtcaccgcgcccctctactgcgtgcgctgcttgctcccctgctggcagccgagtccctcgcactggccgtgctccagctccatctcgctgcgcgccctgctccctgttgtcgtgagctccggcccggatttcgccttgtcgcccaactcagctctgccctctactctagcttgccgtcgcctcttcgtgctggccgactagtctgccgtggtcgcgcgcagttccctactcggccaggatggtcgcgccgtcgatcccgcttgagccccttcgtgttcgtcgaagctccctggctcgactctactcagttcgcgtcctgctcgcctttgcgtcgcgcg

SEQ ID NO: 110999 - DNA, 695 bp, Zea Mays
ggcaacgaggagacccattttgacaaattctctcctcgccctcgcctccacttttgagccacagacccgagcgatcgtgccccggcccccgatcctgattcccacaaatttccgccatggcgatccgcccggactgatgcccgattctccatctgacgatcctcgattggggggaattctggtggggttcgtgtgggcgcgtagggcccctgacgacctggcctgacgcatcagcggcgagccatggctccggcttccgttccagctctacctacagccatggatactaaggacgagggcgacggtggctccaagaaccaaaacagcgtggtggtggtgaaatccgaggttgtctgcacgaatggtggccctctggtggtcgggactgaacttgtgaaatacgagggaggtgataccactgaatgctcgagctcgtttggtgacacctgctctggatttgaaggtgaggcagacaatggtgaaccagaagtgaattctagcctgtctgctcatgccaatggtgttggcccctcaaaaccccctagaaggaaaaaggtgatggctgagtggagcaattctgttcgtccaattcagtggagatgccactggttagagttgcgtatgagggagctttcatctcaaatatcgaagtatgacaaggagcttgctctaatcaagaaacagaatgaattaca

SEQ ID NO: 111000 - DNA, 1614 bp, Zea Mays
cgtccttgtacatcaacaagcaccagatattgtcatactaccatgataaacaaaataagggagttcaaaccggtgatctcttagttgatgacgattgtggcacagttgatggtagtatcagtggtggacttgatactactacattgcttgattccgaggattatgatatgatttgtgagcaacacgctttacaggatattctcctgacaattgatgggcttcagtctcgagtccatctgctgcaagatcgtctcagcaaagctcattctgaaggagaaaatttggcattttctggggccgatactgatgtcagagtggctgggaagagacagcgtactcaaaagcactcattctctaatacaaagtctcgacatactaaaccacagaaaaggaagaatctaaatatcttgctgaaggatgatgatgatggacaagctcttgcaggcggacctgctttggctgatggggaaactgatgtgcatatgataggtgctagtaggagtactgaagaaagaagtggagagtgcaatcactcgagggacaaagccatcacagtggacctactgttgggtactggcaattccataacaaatagtgatattggggatttatacaatgtaaacactgatgatgtcctcatagccaatcaagcagccgttgaagcttgtcagcagtttcatgaggcaaagcatctgccttctggaagtccttccaaagacaagatcatttctgctccagcagaaatgaagaataattctccaccagtggaggtgaagaacacttgcggtccagtaaaaattgagagcttgtgttctccagttgaaggagaaaacacttctgatccagcattggagcaagaatcgttccttgaaaagtcaccctcgaggcagcctgtatccccggggaacaagcaggagctgaaacctaagaaaagacggaagaagaaaggctctttatttactaagaagcagcggaaggtggactccagaacacctgatgcaaaggaaaaaactgagggcacgccctctgatgtagcagaggaaactgagagcccactctctggtgcaacaggaccaggaaccatgaggtcttgctgtgctggaaagaagcgcaaatctggaaatgaacctgcagatgcaaataaaactgggaagccatcctcagcagtgaagaagcagaaaactgaaaacccgactgcagctgcaaatgcgacaaagaagcgggccacggagaagaagctagagagcgcgagtgcctcccagaagctgcaggttgagaaagctgtgcttgtcgctgtaaatagcaggaggagccaaagggtccgtaagcccaaagtttttgctgactgaagaagcaggtagaaagtcttaggctctctattgtgtatgtatcttgtagccccgtcatcaaaatcggtggccatagcaacataggaagtgcctggatcgcctcataagttagtgtacatatatcagctatgtctcacccaaattgtagatttgttagtttgttgttcttaacccttctcttctgggctgccagattaacaatgtcatgctgtgttagcgttatatcaaaaagaagaaaaaaaaaggagaaaaatatgccatgcaa

SEQ ID NO: 111001 - DNA, 1656 bp, Zea Mays
aacgcagcacaatgagtcaattcgctgtgggccaatgcggctgtgcactgcggcctacgcccagcgaccctgcccattcggtgttgcttgattcccaccacggcgcccgcactgccttgccttctcctccccattgtttccatccgcaccggagggcggtccgatacaagcaacggcaacgcctcccctctcctccacctccccacctatattgattctgattcatccacccagcaggcagcagctacagcaagatggtgcacccgatcgcggaggccgacgagcggagccccttcggccgcctgacgccggacgagttctacgcgcgccacggcgtgacccactccgcctcgtccttcgtcaacccgcgggggctccgcatcttcacccagcgctgggtgcccagtggggacgcccccgtcctgggcgccgtcgccgtcgtgcacggcttcaccggagagtctagctggacaatccagctcaccgccgtccacctcgccgccgcgggcttcgccgtcgccgcgctcgaccaccagggccacggcttctccgagggcctccagggccacctccccgacatcaaccccgtgctcgacgactgcgacgccgccttcgcgcccttccgcgccgactacccgccgccgctcccctgcttcctctacggggagtcgctcggcggcgccatcgcgctgctgctccacctgcggaacagggacctgtggcgggacggggccgtgctcaacggcgccatgtgcggggtcagcccgaggttcaagccgccgtggccgctcgagcacctgctcgccgcagccgccgccgtcgtccccacctggcgcgtcgccttcacgcggggcaacatccccgagcgctccttcaaggtggactggaagcgggcgctcgcgctcgcctccccgcgccgcaccacggcgccgcccagggcggccacggcgctcgagctcctccgcgtctgccgcgagctgcagcggcgattcgaggaggtgcagctgccgctcctcgtcgtgcacggcgccgaggacaccgtctgcgacccggcctgcgtcgaggagctctgcaggcgcgccgggagcaaggacaagacgcttcgcatctacccagggatgtggcaccagattgtcggcgagcccgaggagaacgtggagaaggtgttcgacgatatcatagactggctcaaggcacgcgccaccgctacagccgcgggcgcgcaccacggcgagcagtagtttgggcacgcctcctgcgtgcgtgcgtgccatggccaggcttgccttcaaccgcgcgtggtccattcaccatcccagattctatcctaggttccttccagctatattcgagtacggatccagcaataaacttgtgctgtctgctgattacagaatttgtttttgctccaatactacgagatctcgtctgatggtcccgatccgccatctgcaaccgctccagatgcctccatgcctgccgatgatgaatcttgcaactttcattcattaattaacgaatcagatatattatttctgccaacagctgtagctgcatggtacaagtggttgggagttgtcagttgggacttgggagagtaaatcaaaatgtgccgcattcttttataacaaaaataagctgcctttgtttcacgtc

SEQ ID NO: 111002 - DNA, 926 bp, Zea Mays
ttattacagaccagaactaaaagcgagtgctgagtagtaatattatacaaaccaagggaggcacaaattcctcccgataagttttaagcaaaagatttctagatggaggaccaagtcctcccgcacttcagtcttgtttttcctccttaggaaccaccttggcacagaagcaacagaaatctgctacttcctcacctaaaaacaacgaagggataaaccctgagtatggaattactcagcaagtcttacccgactaaagaaaagactctcaagggtatgctggttatatgggagtcaaggtaaggcttttcaataatcaaagactctgttttgcagaaatgcttactaaagtggatccttaaaaatccaattttatttgtcaagttaagtacaattacctacaactagagttctttctaccctagttcaatcactggtcctgcactagccaatttcttaacaaaaacccatcatctttagtggaatgctacgtgtaagtcagtggccaagtctccataaccgcggaggtacgacgatccgaatcgattatactcagctgaggatctccaatcacacgacatatgtagcacttaacccttgcatatgtcaacccgccaccggggttcttaagaccagatcaggttcacgcaaactgagagcacagatacaccaccgtccaacctcttgccacggagggtacacgctactcttgccaccgctccacgcccatttcgtgttatcttattctggccttagtccacccgaggcaaggcttacccatgacgaggcatgtgaccagttaaagggtcctcggtcagcaggcctacatcgagacggtccttaatcgactcagacggagacactacaccgagactctcttctcgtgcaagtcacccgcccggtctcagcttaatcttttaacccaa

SEQ ID NO: 111003 - DNA, 124 bp, Zea Mays
atataacaagttcacaaggatcacaaatttatagtataaaaagtttacaaagatcacaagttcacaatataacaagtttacagtataacaagttcataaagatcacaagttcacagactcaaag

SEQ ID NO: 111004 - DNA, 1587 bp, Zea Mays
atggcgccgcggggcggcgtggtggggtccggggcaatgctggggctggacatgcacctcgcccagcagcggatgcaccaggccgccgcgttccagcaccagcaggacagccacaacggtgggttccagctgcagcagccgtcgccggtggcggtgaggcagcaacagccgccgccgtcgtcgttcatgccctactccaccaacacgtcgtcgtccagggtcgtggtgagcgcggcagcggtgggtcacgacgacgaaatggtgggcaacggcggcggcgggaagggcggagtggtggtgcagcagcagcagcagcagcagctggcgtcggcggggtgcccgtggacgaggatgaagtggacggacgccatggtgcgcctgctcatcagggtggtgtacagcgtcggggacgacggcgagggcgtggcgacggctggcggcgccgggggagcggccaaggcgggccccggccacgcggcggcggcgcagcagcagaagaagggcaagtggaagtcggtgtcacacgccatgatggacaagggcttcgtggtgtcgccgcagcagtgcgaggacaagttcaacgacctgaacaagcgctacaagcgcgtggtcgacctgctgggccgcggccgcgcctgccgcgtggtcgagaaccacgcgctgctggacgccatcgacgagctcacgcccaaggccaagaacgaggcgcgcaagctgctcagctccaagcacctcttcttccgcgagatgtgcgcctaccacaatagcatcgccgccgcgggctcgaacctgccgccgcacggcggcggcggcgcggcgggcgacaccgcctgcctccaccacccgccgccggcgcccgtggccgccgcggcctcgtctgccgctcgctacgcccacgcgcagcagcatgcggcaccgtccccgcaggggatgaaggactcctccactgacgtcgcagacgacagcgacgatgccatgagcgacaacggggacgaggacgaggacgaggaggaggaggacggccccgtgtaccgcagccgccgccccagaagtcgtcagcacagcggcgggcgcggcaagcgcgggcgtggcatggatggcgccgcgtccgaggacctcgaggacgaggcggacggcggcggtgggagacgctcgaggacggcggcggcacccgacccgtcggcgatactgcggcagctgaagagcgagctcgcggctgcgaccgccgcggcgatggacccgcagcaggccaggagctgggtgcgccgccgcgcggtggaggtggaggagcagcagatcgtcctggagtcccacgcgtactacctggagcgccagcggctgaagtgggagcggttccgcgccagcaaggagcgcgacatggaacgctcccgcctgcagaacgaccgcctccgcatcgagagccgacgcctgctgctcatgctccgccacaaggacgtcgacctcgacatggccgaggcgaactcttcctccgtcgaccaccacaccggcgcgtcgccgctcgcagcacaccagcagcagccgattgggtccagccccagcccgtccaccgccggccacccaaactag

SEQ ID NO: 111005 - DNA, 381 bp, Zea Mays
actgaactggaagcagaagagcggctgtcctattcatgtgagaagggaccaacacgtgatgaagtaatagcgaatttgagaaatgcatttgtgaagatagcagacgaatataaagtttacactgaggaggaaaagcagaaggtcattacagtaggtgggcttcacgtagtaggaacagagcgccatgaatcacgcagaattgacaatcagctccgtggtcgaagtggaagacagggggatcctggaagctctcgcttctttcttagtctcgaggataatattttccggatctttggaggtgacaggatacagggtctgatgcaagcattccgagttgaagatcttcctatcgaatcgaaaatgctaacgagggctctagat

SEQ ID NO: 111006 - DNA, 1753 bp, Zea Mays
atatattcacctgagccaggtcgctgtttcatcatcgtgcttgactgcagtctgcagggggtgtggccgcgctgcagcctgcctgtcaatctcgatcgatcaaggggtggcgtgccgagatggcggaccggccgtcgcttcctgctctcattattgctatcgccgttcttgctggcagttactgccgcgtggcgagctcggcctcgccggcggtggaagatgagctgcgcggtggaggaggagccggcggtccgacgacgatgcggcggcgcgcggcgtcggtgatggtgcccatcaccatcctcaagtccgctgttagcgacggagctgtgtgcatggatggaacgccacctgcttaccacttggatcctggctccggagcgggcagcagaagctggattgtgaacttagagggaggtgcgtggtgcaacagcgccaagacatgccggctcaccaggagctccggccgtggctcgtcggaccacatggacaaagagatccccttcaccggcatcatgagcagtagccgtgccgtgaatcctgatttctacaactggaaccgggtcaaggttcgctactgtgacggtggatcttttgccggcgaggccttcgacaaggacactgggatctacttccgagggcagcgcatctggaacgcggtcatccggcacctcctctccattgggatggccaacgctgaccaggtgctgctcgccggctgctcctcgggcggtctggcggtgatactgcactgcgaccagctccgcgccttcttcccgtccggctccaccgtcgtcaagtgcatctccgacggcggcctctacctcgacgccgtggacgtctccgggggccgcagcctgagatcctacttcggagacattgtggccatgcaaggaatagctcagaacctgccgccggcttgcaccgcccgcctcgacgccacctcgtgcttcttcccgcagaacataatcgacggcgttaaaaccccactgttcctgctaaatgccgcatacgacttcattcagattgtgctcagcctggcgccagacagagctgacccaagcggcgcttggcgagcctgcaagtccaaccgcacggcctgcagcgcatcccagatgagtttcctgcaagatttcagggaccagatggtagcgtccgtcaaaggcttctccggttccaggagcaacggggtcttcctaagctcctgcttcgcgcactgccagtccgagcagctgggcacctggaacaccaaaccaggtggctcccccaccattcaaaacaaggggatttcaaaatccgttggcgactggtactttgatcgagctgaggtgaaggcggtcgactgccgctatccctgcgacaacacttgccaccacattatatgagaggatccacgtttttttattattttatgcatagggaagaacattcgctctctcaacgaagtgtacatcgtatttgattttgggaatgcaattggatacagccatcaaatgaacacaacacgcgaaaataaatggtaatggcgtgttccagtaagacaattgagtgattcaacagctgttgtttagcatttgatccatgcaatggagttcctctgtattatcattctagtcagttggcactgctaccagcaaatatcttctactagtacattcggaattctgcgtgcctgttcatgctaatcctgcaaaaactgaaggattgagctttcagtaatcagtgccgataagaatgaattacattattatac

SEQ ID NO: 111007 - DNA, 2101 bp, Zea Mays
caggcaggagcacagcccagcccgcccggcaccaacacctgctcctgctgcttctgctcgccctcgccccctgctgcgttttgtgccatcgccatttgcgatttctttcgaggaaaaagggaagcaagcgcggaaatactccacagatactactcacctaccgctccgatccggccaccaagcgcaaccaatatctcgctccctttctctttctccgtctccctcctccgcacagcgcacgcgcaggaggccgctgccgggaggcccatctctatctctctccgctggatcctccggcctctcgcggtccggtggagcggagatccggccgctcgggcgtcggctgcttcctcgttctgccggagcaagaagctggcatcccgccatgtcgtcaccgatgccctcccctactctgaaggaccatctctccacgcctacaggccccttgcatctcaaagtatgggaggtcatatgcattgccttgggagctttcatggtgctcgtcttgtttgccaccgtgtggctcacgctcaggagcaagaagagggtaaggcggcgggcatccgcaaatatcccaatcacccaaatccctgcaatttccaaggaaatcaaggaggtgagggtggagcaagtgccggccagcgactttgtggcgcatgatggcgtcctcctcacgttccaggacaagaccagcgaccgggattcggacaaggtcatggcccatttgggtgttagcaaatcgaagcgtggtgatgagagccattcggggtcatttcgctacatggacaaggatgcaggattccagtcagctgaggaaggtggctctggaacgtttcggcagacttcagctaatgccatagttgctccttcacctctggttggcctgcccgagttttcataccttggttggggtcactggtttacgctgagggatctggagcttgctaccaatcgcttttcaaaggacaacattattggtgagggtggatacggtgtagtttatcgcgggcagctaatcaatggctcccctgttgctgtcaaaaagcttctcaataacctaggtcaagctgagaaggaatttagagtagaagttgaggctattggtcatgttcgacacaagaacttggtccggcttcttggttattgcgtggagggtacccaaaggatgcttgtctatgagtatgtgaacaatggaaacctagaacaatggcttcatggagctatgagtcaacatggctctcttacatgggaggcccgcataaagattcttcttgggactgctaaagcgtatgtggcaccagagtatgcaaatactggactcttgaacgaaaagagtgacatttacagctttggagtcgttctccttgaagcaattaccggaagggatcctgttgactatggacgcccaccaaacgaggtgaatctagttgactggctaaaaatgatggttgccagcaggcggtcagaagaagtagtggatcccaccatagagacacgaccttcgacgagagctctaaagcgtgcacttttgacagctctgaggtgtgtggatccagattcagagaagagaccgaagatgggtcaagttgtccggatgctggaatcggatgatccaattcctcgaggggacagaagatctaagcaccaccgtggagggagcacagaaatggattcgcaaaaggacaacaactccgacacggagaagagtgataatgcagattcgaaacctagcaggaccagagcatcgtcgtccaaatgagcaaaccagcatttcacctattacagtcttcggcacattgcatggactgggggctacgtctattttacattgctgacgaattggtaactgaaagctctgaagaaagacctatttttcttttcttttcttttcttttctttttgttgcaacaatttatgatttatttgtagagaaggtattggtttttgtacttatcaatgtgtacgtaccggtgctcttgacaattgctgctgtaagtttttaacattgtgtacaggcgtagcatcatgaatactggcggaatgcccacaatatttgaaatgattatgtttaaatgaaagcctccttcccatttgggccatt

SEQ ID NO: 111008 - DNA, 2272 bp, Zea Mays
caggcaggagcacagcccagcccgcccggcaccaacacctgctcctgctgcttctgctcgccctcgccccctgctgcgttttgtgccatcgccatttgcgatttctttcgaggaaaaagggaagcaagcgcggaaatactccacagatactactcacctaccgctccgatccggccaccaagcgcaaccaatatctcgctccctttctctttctccgtctccctcctccgcacagcgcacgcgcaggaggccgctgccgggaggcccatctctatctctctccgctggatcctccggcctctcgcggtccggtggagcggagatccggccgctcgggcgtcggctgcttcctcgttctgccggagcaagaagctggcatcccgccatgtcgtcaccgatgccctcccctactctgaaggaccatctctccacgcctacaggccccttgcatctcaaagtatgggaggtcatatgcattgccttgggagctttcatggtgctcgtcttgtttgccaccgtgtggctcacgctcaggagcaagaagagggtaaggcggcgggcatccgcaaatatcccaatcacccaaatccctgcaatttccaaggaaatcaaggaggtgagggtggagcaagtgccggccagcgactttgtggcgcatgatggcgtcctcctcacgttccaggacaagaccagcgaccgggattcggacaaggtcatggcccatttgggtgttagcaaatcgaagcgtggtgatgagagccattcggggtcatttcgctacatggacaaggatgcaggattccagtcagctgaggaaggtggctctggaacgtttcggcagacttcagctaatgccatagttgctccttcacctctggttggcctgcccgagttttcataccttggttggggtcactggtttacgctgagggatctggagcttgctaccaatcgcttttcaaaggacaacattattggtgagggtggatacggtgtagtttatcgcgggcagctaatcaatggctcccctgttgctgtcaaaaagcttctcaataacctaggtcaagctgagaaggaatttagagtagaagttgaggctattggtcatgttcgacacaagaacttggtccggcttcttggttattgcgtggagggtacccaaaggatgcttgtctatgagtatgtgaacaatggaaacctagaacaatggcttcatggagctatgagtcaacatggctctcttacatgggaggcccgcataaagattcttcttgggactgctaaagcgcttgcttacttgcatgaggcgattgaacccaaagttgtgcaccgtgacatcaaatccagcaatattttgattgatgatgagttcgagtccaaagtatcagatttcggtttagccaagcttcttggcgctggaaagagtcatgtcaccactagagttatgggtacctttgggtatgtggcaccagagtatgcaaatactggactcttgaacgaaaagagtgacatttacagctttggagtcgttctccttgaagcaattaccggaagggatcctgttgactatggacgcccaccaaacgaggtgaatctagttgactggctaaaaatgatggttgccagcaggcggtcagaagaagtagtggatcccaccatagagacacgaccttcgacgagagctctaaagcgtgcacttttgacagctctgaggtgtgtggatccagattcagagaagagaccgaagatgggtcaagttgtccggatgctggaatcggatgatccaattcctcgaggggacagaagatctaagcaccaccgtggagggagcacagaaatggattcgcaaaaggacaacaactccgacacggagaagagtgataatgcagattcgaaacctagcaggaccagagcatcgtcgtccaaatgagcaaaccagcatttcacctattacagtcttcggcacattgcatggactgggggctacgtctattttacattgctgacgaattggtaactgaaagctctgaagaaagacctatttttcttttcttttcttttcttttctttttgttgcaacaatttatgatttatttgtagagaaggtattggtttttgtacttatcaatgtgtacgtaccggtgctcttgacaattgctgctgtaagtttttaacattgtgtacaggcgtagcatcatgaatactggcggaatgcccacaatatttgaaatgattatgtttaaatgaaagcctccttcccatttgggccatt

SEQ ID NO: 111009 - DNA, 1995 bp, Zea Mays
gtcctttcctttgcgcatgttccgtggatccagattcatgcatttgcattttgctgcgtggagagctgctgtatgcccatcggcggagcaagaagctggcatcccgccatgtcgtcaccgatgccctcccctactctgaaggaccatctctccacgcctacaggccccttgcatctcaaagtatgggaggtcatatgcattgccttgggagctttcatggtgctcgtcttgtttgccaccgtgtggctcacgctcaggagcaagaagagggtaaggcggcgggcatccgcaaatatcccaatcacccaaatccctgcaatttccaaggaaatcaaggaggtgagggtggagcaagtgccggccagcgactttgtggcgcatgatggcgtcctcctcacgttccaggacaagaccagcgaccgggattcggacaaggtcatggcccatttgggtgttagcaaatcgaagcgtggtgatgagagccattcggggtcatttcgctacatggacaaggatgcaggattccagtcagctgaggaaggtggctctggaacgtttcggcagacttcagctaatgccatagttgctccttcacctctggttggcctgcccgagttttcataccttggttggggtcactggtttacgctgagggatctggagcttgctaccaatcgcttttcaaaggacaacattattggtgagggtggatacggtgtagtttatcgcgggcagctaatcaatggctcccctgttgctgtcaaaaagcttctcaataacctaggtcaagctgagaaggaatttagagtagaagttgaggctattggtcatgttcgacacaagaacttggtccggcttcttggttattgcgtggagggtacccaaaggatgcttgtctatgagtatgtgaacaatggaaacctagaacaatggcttcatggagctatgagtcaacatggctctcttacatgggaggcccgcataaagattcttcttgggactgctaaagcgcttgcttacttgcatgaggcgattgaacccaaagttgtgcaccgtgacatcaaatccagcaatattttgattgatgatgagttcgagtccaaagtatcagatttcggtttagccaagcttcttggcgctggaaagagtcatgtcaccactagagttatgggtacctttgggtatgtggcaccagagtatgcaaatactggactcttgaacgaaaagagtgacatttacagctttggagtcgttctccttgaagcaattaccggaagggatcctgttgactatggacgcccaccaaacgaggtgaatctagttgactggctaaaaatgatggttgccagcaggcggtcagaagaagtagtggatcccaccatagagacacgaccttcgacgagagctctaaagcgtgcacttttgacagctctgaggtgtgtggatccagattcagagaagagaccgaagatgggtcaagttgtccggatgctggaatcggatgatccaattcctcgaggggacagaagatctaagcaccaccgtggagggagcacagaaatggattcgcaaaaggacaacaactccgacacggagaagagtgataatgcagattcgaaacctagcaggaccagagcatcgtcgtccaaatgagcaaaccagcatttcacctattacagtcttcggcacattgcatggactgggggctacgtctattttacattgctgacgaattggtaactgaaagctctgaagaaagacctatttttcttttcttttcttttcttttctttttgttgcaacaatttatgatttatttgtagagaaggtattggtttttgtacttatcaatgtgtacgtaccggtgctcttgacaattgctgctgtaagtttttaacattgtgtacaggcgtagcatcatgaatactggcggaatgcccacaatatttgaaatgattatgtttaaatgaaagcctccttcccatttgggccatt

SEQ ID NO: 111010 - DNA, 795 bp, Zea Mays
atgcagcatgcattatctttcttccaccttttgcagttgatacttattgtttggtcctctctttcgcagttcgatgccattcctccagagattggcatttcacggaattcaggcagtaagaaaactaaggaagaggaaggagcaaggagaaaagctggagcagtgaaaatcagtccatggacattggcgcggcttaatgcagaggaagtctcaaaggcagccgcggaggcaaggaagaaatccaaaatcctgaaaccagttggaaaacatggcgccccagagaatagcagcaaaccagaccatttgcctaccgacaagagacgactagacaggagaggtttccctgctgaactctctcttgacccacttgcaactctatccgcaagcggcaccgaaagcaactacagtgacgcagcaacagaaatatgtggcagtctagccccgttacagctcgaagcgagaagtgctttccaaccgagtactgcagcgtccacaagaaatgttgcttcatcgcctgaaagtagctttgactcaccaaatctccaccccttccgcacttcctcggccacagctgatgagatgcagggagccatgatgcatacagctcacaggggcatcgagtttaaaagatcgtctagcgatggttatgaagcatcaagaggcgaagatagcgaccgcatcccttcaaggatcgtgcacaggccgtcaaactgggccagtgtctttctgaattctagtcagggagaccctccagctgatctgctgtcggcatcagctgaaggttttgtagctaac

SEQ ID NO: 111011 - DNA, 823 bp, Zea Mays
ggcaaaccgtattgttggcttcgcctagggtctcccttctactgtcgccgcaacctgaccaacctcccttctactgcccgcctagggtctcccttctactgccgccgcaacggcgcaacctcccttctactgccgccgcaacctcccttcttcgagtcccatccgacctagccctgcaacccgccggacgacgagcagtgaggcccgcggccgagatggaccggtacctgacggtggagcggccacggaacgagtcaaccatcgaagagaacgggatccgcatcaccgcgcagggcctcatctgcaactatgtctcctacgctacctccctcctccaggtgcctgggcttgtcctcaccatcgccgtcgtatcgtattgtacttaggatgcgctgttctgttcgagtcccgtccctgtcgattcgaagagatccccagcaacgtgagggaggtgttcctgaccggccccacctccaagttcggcagggccatcgcgctctacctctgcaggaagaagatcagagtcctgatgttcacggtgtcgtcggagaggttcctgaagatccagagggaggcaccgccggagtaccagcagtacctcgtgcaggtgaccaagtaccaggccgcacagaactgcaaggtcatggtgatttcacgtccgttaggctcgagaggtggactcaaacatccaagttttgcaagttttgatgttggatgttaaatttctatgctcacccctcgtttggttattgatttgatcatagttttgcatgaactattggcgttggctatctaaaaggacagaaaggcagacatgagcaac

SEQ ID NO: 111012 - DNA, 881 bp, Zea Mays
caaaccgtattgttggcttcgcctagggtctcccttctactgtcgccgcaacctgaccaacctcccttctactgcccgcctagggtctcccttctactgccgccgcaacggcgcaacctcccttctactgccgccgcaacctcccttcttcgagtcccatccgacctagccctgcaacccgccggacgacgagcagtgaggcccgcggccgagatggaccggtacctgacggtggagcggccacggaacgagtcaaccatcgaagagaacgggatccgcatcaccgcgcagggcctcatctgcaactatgtctcctacgctacctccctcctccaggtgcctgggcttgtcctcaccatcgccgtcgtatcgtattgtacttaggatgcgctgttctgttcgagtcccgtccctgtcgattcgaagagatccccagcaacgtgagggaggtgttcctgaccggccccacctccaagttcggcagggccatcgcgctctacctctgcaggaagaagatcagagtcctgatgttcacggtgtcgtcggagaggttcctgaagatccagagggaggcaccgccggagtaccagcagtacctcgtgcaggtgaccaagtaccaggccgcacagaactgcaaggtaggtatgcacgcatggttacatttactatagtattggagttattttttgatgcaaaggctgccaggtcatggtgatttcacgtccgttaggctcgagaggtggactcaaacatccaagttttgcaagttttgatgttggatgttaaatttctatgctcacccctcgtttggttattgatgtactatttccatctcatgtcacaaatttggcataaggaatgggtattgatggctactgact

SEQ ID NO: 111013 - DNA, 887 bp, Zea Mays
caaaccgtattgttggcttcgcctagggtctcccttctactgtcgccgcaacctgaccaacctcccttctactgcccgcctagggtctcccttctactgccgccgcaacggcgcaacctcccttctactgccgccgcaacctcccttcttcgagtcccatccgacctagccctgcaacccgccggacgacgagcagtgaggcccgcggccgagatggaccggtacctgacggtggagcggccacggaacgagtcaaccatcgaagagaacgggatccgcatcaccgcgcagggcctcatctgcaactatgtctcctacgctacctccctcctccaggtgcctgggcttgtcctcaccatcgccgtcgtatcgtattgtacttaggatgcgctgttctgttcgagtcccgtccctgtcgattcgaagagatccccagcaacgtgagggaggtgttcctgaccggccccacctccaagttcggcagggccatcgcgctctacctctgcaggaagaagatcagagtcctgatgttcacggtgtcgtcggagaggttcctgaagatccagagggaggcaccgccggagtaccagcagtacctcgtgcaggtgaccaagtaccaggccgcacagaactgcaagttgatcatagttttgcatgaactattggcgttggctatctaaaaggacagaaaggcagacatgagcaacagatcccgctccatgggctgaaactgggattcgtgatggcaggcgcccctcttagtcgtgtgtagggcgagctgctgccatggtggctttttcttgcgggtgtgagctccgctcgccgccggtcttggacgccgtggctaggctcctaccacccctccctccacccgggactccacgctg

SEQ ID NO: 111014 - DNA, 1962 bp, Zea Mays
caaaccgtattgttggcttcgcctagggtctcccttctactgtcgccgcaacctgaccaacctcccttctactgcccgcctagggtctcccttctactgccgccgcaacggcgcaacctcccttctactgccgccgcaacctcccttcttcgagtcccatccgacctagccctgcaacccgccggacgacgagcagtgaggcccgcggccgagatggaccggtacctgacggtggagcggccacggaacgagtcaaccatcgaagagaacgggatccgcatcaccgcgcagggcctcatctgcaactatgtctcctacgctacctccctcctccaggtgcctgggcttgtcctcaccatcgccgtcgtatcgtattgtacttaggatgcgctgttctgttcgagtcccgtccctgtcgattcgaagagatccccagcaacgtgagggaggtgttcctgaccggccccacctccaagttcggcagggccatcgcgctctacctctgcaggaagaagatcagagtcctgatgttcacggtgtcgtcggagaggttcctgaagatccagagggaggcaccgccggagtaccagcagtacctcgtgcaggtgaccaagtaccaggccgcacagaactgcaagttgatcatagttttgcatgaactattggcgttggctatctaaaaggacagaaaggcagacatgagcaacagatcccgctccatgggctgaaactgggattcgtgatggcgcccctcttagtcgtgtgtagggcgagctgctgccatggtggctttttcttgcgggtgtgagctccgctcgccgccggtcttggacgccgtggctaggctcctaccacccctccctccacccgggactccacgctgccaccgccacacgacagtacgcatacactcttcttcctcccctcgctctggatggctggcgtccgctccctcagcgcctccgcccatgcccggctcccgcacttgccggctccccgatggagatgaatgaagaaaggaagatctgcaagaataaagtcgaggcggaggcttggtttactggtcttagtgccttgatatgtcgaagacagcatggatcccaggtccaacatatagatggaatccggattgctggacttcctattgattttccaagatcggagatgcaatttcatactgtgcaaaagcaatttcgctatgcaagtcacgcatacagaacctgaaaagttccaaggatgctttgttggatggtatagatggtggtgatgcatctgctgctgaagctgaaggaggctcagaaaaatctaccattgaaaaagagctagagcagcttactagcatattgcctgatcttgagaagaagcttgaggacctgtctgaagcaaacccaagcgctgacatggatgagatggtgaaggcaattgtgtccagggtaactgaagtgatgccaaaagctgcatcttttacttcttcccaaatagcaacctcaagcaatggattcgactcctcggttatgtctacgacagcgacaactggaagctctggaagcactgtgaactgaccttggggttgtaggcagaggcgtcaaacgagctagcatcaagccgatctctgccaaacctgttgctaagaaacctgcacttgattcaccatctctccaaggtgacaacagcatcaactctgaggttgtccctgcgacgcagactgatgaatccagctaaagctctacatttgaaacgaacgctttctgacgggggcacggcgataacacgccttctattctagtatgcttagatagattcaatgttagcgcaaacgactgatgataagtttttcagttagtattttaatttggatttagagtacacttatgtatgatttatttgacaatgcttatttatgagacattgaattgtacttatctatattacattaaatatgatgttattaaatatgtgtgt

SEQ ID NO: 111015 - DNA, 87 bp, Zea Mays
ttcatctgagagaatagagccaacatgtggtacagttaatcaagtaaaggtggaaggcgttgatgcaaatcttgccctcatgcaggt

SEQ ID NO: 111016 - DNA, 410 bp, Zea Mays
tttgcagttgtgtctggtgtgaaagacatgacattatactatctacatgaaactggcaggacaggattacagaatagggtacaaacaattttcctattgtactattgtttttttgcacgggcatggagttattgatttgcgttttatctgtgataaattcatagatggcctctgttggtgctaatgacactagggctgcagggatgggtgccggattggctgtagagatgggtgctgacaacatagggatgacatatggtggtagacctatgatgggtgttgttggtatagacaacatagggatgacatatggtggtagacctgagcctcctcttccgtcggatgcatcaagtactatttatattgaggacttaactgcaaactgcacacgacgggaggtttcacatatc

SEQ ID NO: 111017 - DNA, 2259 bp, Zea Mays
ctacaatggtgccaaaatctactcgttatctcgttttctactctcttccatttcatcctggccaccagttcccgccatgccgccaccgccgccgcagcgtccagcttcatcccacgttggccgcgccaacctcttctccgcctcaccgcctcccctctccaatcgccgctacccccatcatcggtcgttgcccctcccgcccgtctccccacgccgccgcgaccccaagaagcactcccagcagccttcccaagaagaaccgacagacagcggtccaacaagaacggtcacaaccaacccggccttccgcgcggcccatctccgtaccgcgtaccgcaagcccgtgcctccagccgcagccgccggcgaaggcgaggccctcctcgccgccgacccaaccgatgccgcctcggggcgcgctgtcgtcgtgggtccctcgggcctttccttccgcctccccggggcgccgttcgacttccagttcagctactccgaggcgccccgcgccccaccgctcgccatccgggaaccggccttcctgcccttcgcgccgccgaccatgccgcggccctggacgggcaaggcgccgcttctgacaaaggaggagaaggcgcggcgccggggcgtgcggctgcacacgccgctcgggcaggagacgccgcagacggtgagcgcgcacgggatcatgatggaggtcagggagaggaggaaaatggacctggccagggtgagccccggtgacggcaggagcagggaggaggtgctcggtgagccgctcaccccatctgaggtgcgcgcgctcgtcaagccgcacatttcacacaaccggcagctgaacattggaagagatggcttgactcacaacatgttggaaatgatacattgtcattggaggcgccaggaaatctgcaaagttagatgccgaggcgttccaactgttgatatgaagaatctctgttatcatcttgaggagaagtcaggtggaaaagtcattcaccgagtaggcggcgttgtttttctatatagaggaagacattatgatcctaagacccgtcctcgctatccactaatgctctggaaacctgcaactcctgtatatccaaaactcatcaaagaagctccagatgggtttacaaaagaagaagcggatgaaatgagaagaaaagggcgtgatctgctgccaatctgtaaattagccaaaaatggaatatacatcactcttgtcaaggatgtgcgagatgcttttgaaggaagtgacctggtgaagattgactgtgagggtttgaatccaagtgactacaaaaagattggagcgaaactaagggatcttgttccctgtgttcttttatcatttgatgatgagcagatattgatgcacagaggcaaagaatggaaatccagatactcgaagcctcttactctcattccaaaagttccaaagaataatctggcaatgacatctgtcatgaatagttcagatgaagttagtgatgccaacactcaagttgcgataagagaagtattgagacccaaaatgttcaaattatggaagagtgcggtggactcgtctctggcattgctgctggatgacgccgaagcaaataatctcacacccgattcgctcctgactctggttgaggagttcagcgtgacatctcaggcggtggagcactcatttcctgctctgcttgtgaccaatggtgatgcgagcaccgactctctaagtgcagagtacatgaatgacgagcctgaaacaagcgttgctggaaacgaagagggccagctggagcagtcacctgatctccgtgacgatgaacattttgatgtcgacatgtttgagcgtctggagtcatctgtgccattgggatcgctgcctattgacagcatgatagagcggctgaacagtgagtgaagtacagcgagcagttcgttctgtccactgggataactactgatggtcagattgcaatctcggatcgtgtgatgcattatctacgttcctccggaccctcagtctggtgataatctcaagatccgagaatttcctgcgatttggtagcaaacgtgatgtaaagaaactaactgtagtatgcaagtgcgccatgcatttggcaaacgcaccaacggataacacgtctcgtttgccatcgtcaatgagtgcgcttgcatgtatatgaatatctgcatttatactgtgtttaccaaaaaaaaaagtattgtgccatgctccaaaaagatgcggagctagcagtgtcagaa

SEQ ID NO: 111018 - DNA, 1539 bp, Zea Mays
gaaagcaggatgttcctacctttaaccaagtggaccaagatctctatcatcgactccctccctgcccccctcctcttataaaccatacattgaaacgacgtctaattgtgttgtgatccaggcagcagtgagctcagtacacagctaggcacagcgacggggtccggtccagggccatggctaaggaaagcaagctaacggccggggtggccgccgcgctgaccgtcgtcgccgcttgcgcgctatgcctgctgctgccggcgacggcccgcgcgcagctccgggtgggattctacgacaccagctgccccaacgccgaggcgctcgtccgccaggccgtcgcggccgccttcgccaaggacgccggcatcgccgccggcctcatccgcctccacttccacgactgctttgtcaggggctgtgatggatccgtcctcctcaccgtgaatcctggcggcgggcagactgagcgtgacgccctcccaaacaacccgagcctccgcggcttcgacgtgatcgacgccgccaagaccgccgttgagcagagctgcccgcgcacagtctcgtgcgccgacatcgtcgccttcgccgcccgcgacagcatcagtctcaccgggagcgtctcgtaccaggtccccgcgggccggcgcgacggccgcgtgtccaacgcgacggagaccgtcgacctacccccgcccacctccacggcgcaaagcctgaccgacttgttcaaggtcaaggagcttagcgtggaggacatggtcgtcctctccggcgctcacaccgtcggccgctccttctgcgcctccttcttcaagcgcgtctggaacacaagcacgaaccccgctaccgcaatcgtggacgcggggctgagcccgtcgtacgcgcagctactacgcgcgctgtgcccgtcaaacacgacgcagacgacgccgatcacgacggccatggacccgggaacgcccaacgtgctggacaacaactactacaagctcctgcctcgcggcatggggctcttcttctccgacaaccagctgcgcgtgaacccgcagatggccgcgctggtgagcagcttcgcgtccaacgagacgctgtggaaggagaaattcgcggcggccatggtaaagatgggacgcatccaggtgcagacagggacgtgcggagaggtccgtctcaactgcggcgtcgtcaacccgagttcgtactcgtcgtcgtcggcggtggagctgggttcgagcgcgccagcagccgtcggtgaagagggctacgccgcgagctagtagctcgcataccagtcttcggccgccgtcgttgtcgagatcaatgattttttttctctctctcgcatgcatccctcttctgcttttattttgtcgcgtggactgtggtttttgttgtgtcgatgatctttgttgtgtgccagtgccactaaacgtacgcatgccggccggcgaactcttaacttcggtggcgggtaataataagcatatgtatgagtaagatgagattgtgtcaatttagggtgtggatgcttttaaa

SEQ ID NO: 111019 - DNA, 520 bp, Zea Mays
cgaccggggacatctacggcgagctgagtgtggtggcgccgtggaaagtcccgcagcgggggatcttgcccacaccggtgctcgattcaattggtagcctggggggacttcacctgggtgtgtggtcagcatgccctgcttcattggggggattgcgagtcgggtggtcgtgcaattgcttgccggggggccgtgattcgccgcctgactgcattccgacgtggccagcacgccattgtcacacccggattttagggggtccaaaacccgggcgcgaacataatcaccaggtgtgctgggaccaagtctcacacatatgatgattcatggcacaggatcgaatgtcacatctttactacataacaggagttctgtacaaaataaataaataaatacattataaggagacaacggtccagcaacccaaagttgactgggagacgacgacctagatctctctcacgaactcgtcacagcatcctccaagcgcctcatcctgcggtacctgttcttgacctgt

SEQ ID NO: 111020 - DNA, 761 bp, Zea Mays
ccacgaaatggcaaattaaattaaatactaataaacatttaaatagaagataatctcaaagttcccacataaaatggtaaagtgaaatattgattatgttgaaaacttggatacttagattgatttcacgtgtaactcacgcaataagtggaaataaaatagaaaaaacgttgacatcctgcggattttacggtcccgttattttttatgactatatgtggccatatgttgtaccttcgtataatttcatagatttttttaggctatttgtacattattaatttctttctacataaaatcatcaaaatatgattaaaattcaaaatcgtcaaaatatgattaaaattcataaatacactagttttgacccaaaattgtaaaaagtttaccaaaacaaataaacattatattcaaataaaacctcaagtcaccacatgaaaatgataagtgaaatattaattatgttgaaacttcgataaataaaatgatttcacgtgtaactcacgcaataagtgggagtggaatggaagaaacaccaacatcttatggattttataatccaaatgtttttgagaactatatgtggatatatgttatgtccccgtaaaaattcatgaattttttaggctatttggcgtattattaatttcttgttgtagaaaatcatcaaaatacaattaaattcataaaaatattgtagtgtcgaccggaaattgcaaataagttaccaatagtaataaatagttcataaaaagataatt

SEQ ID NO: 111021 - DNA, 1608 bp, Zea Mays
ctcctctcttgtccatctcactccgtcgtgtgcatggcggtttcctacttaaaatccatcgcgactgcatcttttgtcatgaacgagctttgcttgcactacgctccctcgcctcaagatctgtgcttgccggcttaattaattgctactaaaaatccatcccgtggatatatataaaccgtggtgtgtgttgtccactacgatacaaaacacaaactctcggagacagggaagtagcgtagctagatccagagctcggcgccagagatacccgacatcctcgtcatgtctccggttgcaagcaagggagtagtgatggacggtgcggtggcggtggcggcagtggccgccgccgtgctgctgtgcctccatctgccggcggtggcgcgaggccagctgcaggtggggttctacaacacgagctgccccaacgccgagtccctggtccgccaggcggtggccagcgcgttcgccaacgactccggcatcgccgccggcctcatccgcctccttttccacgactgcttcgtcaggggctgcgatgcgtcggtgctgctgacctccgccaacaacacggcggagcgtgacgcgccgcccaacaacccgagcctccacgggttccaggtgatcgacgcggcgaaggcggcggtggagcagagctgcccgcagacggtgtcgtgcgcggacatcgtggccttcgcggcgcgcgacagcatcaacctcacgggcaacctgccgtaccaggtgccctcgggccgccgggacggcaacgtctccctcgacacggaggccaacagcaacctgccggcgccaacgttcaacgcgtcccagctggtggccagcttcgcggccaagaacctcaccgacgaggagatggtcatcctctccggcgcccacaccgtcggccgctccttctgcacatcgtttctcgcgcgcatctacaacggatccaccccgatcgttgactctggcctgagcgccgggtacgccacactgctgcgcgcgctgtgcccgtccaacgccaactcgtccacgcccacgaccacggtgatcgaccccagcacgccggcggtgctggacaacaactactacaagctgctgccgctcaacctgggcctcttcttctccgacaaccagctgcgcgtcaactccacgctcaacgcctccgtcaacagcttcgccgccaacgagacgctctggaaggagaagttcgtcgccgccatggtcaagatgggaaacatccaggtgctcacggggacccagggccagatcaggctcaactgcagcatcgtcaacaacggctcgtcgtcggtggggatccagcagatgacagtgcccaactcctactctggcgccaccgcgtcccttgatgatgagatcgccacgagctgatctagatcggcgcggtgtgatgtgatgatagatatttgcattgtgtgtccatctttaggctattaattagtacgtttgctcccggtacgcgcgagagtgcgtagttcgtgtgtcattcatatgcgcgtacacgagatttccagtatcaccatgcatgtatcccgtgaatcatcatcagtaaataaaactggtgctctttgagagtctattattatc

SEQ ID NO: 111022 - DNA, 714 bp, Zea Mays
gctttccggtgacactacttttttatgtactactttgctgggcctgaaaacgggaacaaaaaaacaaaaagtatgaaagatcagcgaaaggaaaatgctacttcaactgaggcccacacattgttctctactaacctgtgttgccttccttctttggtgtatctgttcttattgtgtttccccaactgtaggctctctgtcgtggatatcctaccaaaatttgcttcttacttccattaatgtcgctcactgcgtttcgaagatgcaccggactatcagtacctgaagagattgttcagagacctttttattcgggaaggtttttagtttgattatgtttttgactggaccattctaaagtaccaacaggcacagatgaccactgctccacctcgtgcaattgtctgtacaaggaataaacttaccctcctaacttaagtacttgtagagattgtattgcgtatagaaatgtacttcttttgttatgttatatttcattgccccctctctattttgattcctggccttgatttttgtttcttgtatttttttcaggtcgtctagctactgtagttgcccatcgtcaaagttttgtagagtggttagtgtttttggtcgacagacattggtgctagatttgggatcagccttcctaaacagtaccatttacttcagctcaattatatgaataatgcttgtttgcaggacatattg

SEQ ID NO: 111023 - DNA, 709 bp, Zea Mays
gggaagggaagaccccgagatctcctgcgacggtcatggcggccactagaggttgagcgatttccgcccaaggccaatgccagagatcctggtggcttctgttgaagcacggcgatcccggggcggtgaagaccacccaagcgagctacaggctgactccgcgcgggcggttgccgggcagcttggattcgttgcgaggttcacggcgtgggttgcacatcaaaacggcattccgatctctacggcctccaccgcgttcatgatggaaggaggcttctgcgcgacagggcccaaacggcagagaccgggtcagtgctgtttttctgcggatggtccaaggagtggggtcgatccggtagcgttcggcccgtgattcctggtggcagcaacacattcagccgagcctgtgtgactttcgcgctagatggggaagacgcacccgaccagcgggtcccacacgcacgtggctatgcgcgaaaggaagggctggcacggtggggcctggggcagcgaccaggtgaacgcccgaacaacgtgcatggctggcttacacgtccccatgcacgctccacacatcagagtcactggcaagttttagctggcatcgttatcacgtcaaagcgacaagcaggaaatgatcgactcgtttttttgcttgcttgatgttagtatgacatatatgcggcaagatgaaataataaaataaaat

SEQ ID NO: 111024 - DNA, 705 bp, Zea Mays
ttttttcaggtcgtctagctactgtagttgcccatcgtcaaagttttgtagagtggttagtgtttttggttgacagacattggtgctagatttgggatcagccttcctaaacagtaccatttacttcagctcaattatatgaataatgcttgtttgcaggacatattgctaataatctgccacattatgtttgcttgaggtattaatttatccaggtgtttaatgctggagtacagttagaagatccctaatcaattgcttctcatttcagtcgtacatagaaggtgctctcaaagacattgaagaacctctcagagatattgagggaactctgatcgctactgaaggagctctcatggccattgaatgacctctcttttcatggaaaaataggtaactttattcatgctacagcagcgactttgagcgaacatgagaccactgagctctggagtgaatgaaggacgtcgtctttggaagtcagacatcacctagagctagggtgtccattcttgacatgtttctcttagtgatagatggatactgtctagttaggaatagagtcttgagggattgatggacacatgtatcttcaattcatgtgtgttgtattactaccggtacaatctccaattcttgtgaacttttgtatttggacttgtgtgaatttgtgatatgaacatatatccatgtgtttgaaatctt

SEQ ID NO: 111025 - DNA, 540 bp, Zea Mays
atggatgaggagcgaatgcacggatgggtcgaactaggactagaggacgacgaacgccatggcgggattgcgacacggtacaggaactgggcgattgggcgcggtgccaggaaggtcagagaaccgcggccatgggagataagggcctcggctgggaagcaacagaggaggagggaggagagcgggctgatcgcggcacaaagggaacgcggacaccatgggcagcgcccaggcgcacgcggcaagggagatccacgagtctcgggcgcgcgcagcaaggacggagctaggagagccgctcggctggtgtcctcgcagggagaagccacggcaagagagcggcatgcaggaaacagtgcgcagagggcgagccggaggcagaacgtcggtcagggagttcaaccgcctgcaaatgggtccgccatcggcgagtgtaggagcgagccaagagctccgcgagctagacgggaaatttcggtcgggcgccatggctgcaggagattgcgcacgggaaagctcgacggctggggctgggactag

SEQ ID NO: 111026 - DNA, 531 bp, Zea Mays
gtcagaacccgacccgctgccaagcctagttctttcctctcctctctttttcagcccccggagccgcctgcgtcaccacatcgtcatcgtgcgtgtaggagtgtcctccagatccagagccggcgcgccgcccctgcctctcctggcctctccgccctccgagcgcgcgccgacgccgcccctagcgccgcccgtagctctagcgtcgacgccctgccgacgcccagaaagcgtcccggccttcactagctggaagtcccgagtctcgagtggaggcggatccaaagccaaagccaaagccaacaaccgccgctgggacgcgagggatcgattcggagatggcgtcaactagctccgccggggacgtgggagactcagggtcaaaaggtgcggttgcagataaaacacttactgcttctgcaaacactagtagctcacatcaagaatctcatgatgttgcaactataaccgggaaggaaaaaacattaacaagcagcaaatgccatctcggcttctgcttaccttaaattc

SEQ ID NO: 111027 - DNA, 1373 bp, Zea Mays
gtcagaacccgacccgctgccaagcctagttctttcctctcctctctttttcagcccccggagccgcctgcgtcaccacatcgtcatcgtgcgtgtaggagtgtcctccagatccagagccggcgcgccgcccctgcctctcctggcctctccgccctccgagcgcgcgccgacgccgcccctagcgccgcccgtagctctagcgtcgacgccctgccgacgcccagaaagcgtcccggccttcactagctggaagtcccgagtctcgagtggaggcggatccaaagccaaagccaaagccaacaaccgccgctgggacgcgagggatcgattcggagatggcgtcaactagctccgccggggacgtgggagactcagggtcaaaaggtgcggttgcagataaaacacttactgcttctgcaaacactagtagctcacatcaagaatctcatgatgttgatgcaaaatcacgtgtggaggacatttggaagaaaatgaacagtggttttcctaataagatgcccaaacctgcaatgacaaagctcagtacaacagaaaaacaaaagaaaaataaaccaacaaataattggatgactgttctaggcctttcaccaagcaaggcacatagtgtcgatcaaggatccaaaaatgggctacaacagacacaacatgaaatgagcgaggatgctaaaaaacttgcagccaaggcccttgcagctgccaaaaatgctgctgctgtggcatctggacgagggaaagtggagatcactgaggtaagggactttgctgggaaggacatcgaaatcaagaaactggttgatgctaattcaaaggaggcaatcgagaaggccagggcaggtggtgccgccccatcagctgtcgataacatcctagagcaaatacggaagaagcagaagctgagcgtcctggacaagacgaagaaagactggggagagtacaaggaagagaaccggggcttgggggaagagctggacgcctacaagaagagctcgaaccagtaccttgacaagcaatcatttctgcagcgaaccgattaccgcgagtttgagcgcgagcgggatgcccggctgtcaatgatggccaagcggaggacagatacgcgggaggactgaaatgtttccctgtaactccgttgtagacattctttcgagataatggtagacactaaattgtcaatgccttccagccccgttaaatcttcttttttagaattataatgtgctgattataatttacaaagatgcaccgtgcatgtgcgtaaattgcatctggtggttttggcaaacatttctgagctgcataaaatgcagtcatgattggatatttctgaaaccgggaaactttgacgaacc

SEQ ID NO: 111028 - DNA, 1391 bp, Zea Mays
cggagccgcctgcgtcaccacatcgtcatcgtgcgtgtaggagtgtcctccagatccagagccggcgcgccgcccctgcctctcctggcctctccgccctccgagcgcgcgccgacgccgcccctagcgccgcccgtagctctagcgtcgacgccctgccgacgcccagaaagcgtcccggccttcacgtaagttgcagactgcttgctcttggtctggttctcctaggcattgccagtgagcagacgttcgtgtaaagagcagtagctggaagtcccgagtctcgagtggaggcggatccaaagccaaagccaaagccaacaaccgccgctgggacgcgagggatcgattcggagatggcgtcaactagctccgccggggacgtgggagactcagggtcaaaaggtgcggttgcagataaaacacttactgcttctgcaaacactagtagctcacatcaagaatctcatgatgttgatgcaaaatcacgtgtggaggacatttggaagaaaatgaacagtggttttcctaataagatgcccaaacctgcaatgacaaagctcagtacaacagaaaaacaaaagaaaaataaaccaacaaataattggatgactgttctaggcctttcaccaagcaaggcacatagtgtcgatcaaggatccaaaaatgggctacaacagacacaacatgaaatgagcgaggatgctaaaaaacttgcagccaaggcccttgcagctgccaaaaatgctgctgctgtggcatctggacgagggaaagtggagatcactgaggtaagggactttgctgggaaggacatcgaaatcaagaaactggttgatgctaattcaaaggaggcaatcgagaaggccagggcaggtggtgccgccccatcagctgtcgataacatcctagagcaaatacggaagaagcagaagctgagcgtcctggacaagacgaagaaagactggggagagtacaaggaagagaaccggggcttgggggaagagctggacgcctacaagaagagctcgaaccagtaccttgacaagcaatcatttctgcagcgaaccgattaccgcgagtttgagcgcgagcgggatgcccggctgtcaatgatggccaagcggaggacagatacgcgggaggactgaaatgtttccctgtaactccgttgtagacattctttcgagataatggtagacactaaattgtcaatgccttccagccccgttaaatcttcttttttagaattataatgtgctgattataatttacaaagatgcaccgtgcatgtgcgtaaattgcatctggtggttttggcaaacatttctgagctgcataaaatgcagtcatgattggatatttctgaaaccgggaaactttgacgaacc

SEQ ID NO: 111029 - DNA, 1057 bp, Zea Mays
gcagctaatgaatagccaataggcccattgaatattattcttgtggtcgccgggagacagcggctgcccaaccatataactgtaggggagactaggagagcaggagtacattacaaccgcgcgcggagcacgcggtcacagaagagagacgacggagagcagccatggccgcaggagccgcgttgtactaccacccaggcgccgggaaggtgagcctcgaggcggtcgtcccgtcctctccgtcgctggccctgaggctatcgcagagcaaggtgctgtgcgtcagcagcagccggtggtggatgaggcgaagatgggaggggaaggcgagcagcgtcagcagcagggcaagggcaagagcaagcgcaaggcctgccttgttctcccctgtggccatggactggcaggagtgcactaccgagcttgaagttgatgttccatgctcggtggcctatcagtgttactcagaacgggagagtattcctcagtggatgccattcatctcgtctgtcaagatccttgaagataaacctgatctttcacggtggactctgaagtacgaggtgcttgggcgggatgtagaattttcttggcttgcacgtaacatgacacctattaaaaaccagaagatccattggcgatctcttgaaggtcttgctaatagaggtgctgtccggttcttccccaaaagctcatcctcctgtagagtacaactgacggtggcatatgaagttcctgaaattttggccccagttgcatcagcactgaaaccgtttctggaaagcttgcttctcaaaggtttagagcgctttgccacatttgccaaggagcgtaatagcaagatacctcaggcttaacagcgccattactagttccattctagtgaagccacatcacaatgcatgtaaagaatgatgtcattatggatgtgcccaaataatgtacccaaagagaagtgaatacaaatctgtcaaaagttggaagtaagcttcttgctgtatgtcattgtagtgttataacgccattataaatcttgaatataattattggtagcatc

SEQ ID NO: 111030 - DNA, 1063 bp, Zea Mays
gcagctaatgaatagccaataggcccattgaatattattcttgtggtcgccgggagacagcggctgcccaaccatataactgtaggggagactaggagagcaggagtacattacaaccgcgcgcggagcacgcggtcacagaagagagacgacggagagcagccatggccgcaggagccgcgttgtactaccacccaggcgccgggaaggtgagcctcgaggcggtcgtcccgtcctctccgtcgctggccctgaggctatcgcagagcaaggtgctgtgcgtcagcagcagccggtggtggatgaggcgaagatgggaggggaaggcgagcagcgtcagcagcagggcaagggcaagagcaagcgcaaggcctgccttgttctcccctgtggccatggactggcaggagtgcacgaacagtaccgagcttgaagttgatgttccatgctcggtggcctatcagtgttactcagaacgggagagtattcctcagtggatgccattcatctcgtctgtcaagatccttgaagataaacctgatctttcacggtggactctgaagtacgaggtgcttgggcgggatgtagaattttcttggcttgcacgtaacatgacacctattaaaaaccagaagatccattggcgatctcttgaaggtcttgctaatagaggtgctgtccggttcttccccaaaagctcatcctcctgtagagtacaactgacggtggcatatgaagttcctgaaattttggccccagttgcatcagcactgaaaccgtttctggaaagcttgcttctcaaaggtttagagcgctttgccacatttgccaaggagcgtaatagcaagatacctcaggcttaacagcgccattactagttccattctagtgaagccacatcacaatgcatgtaaagaatgatgtcattatggatgtgcccaaataatgtacccaaagagaagtgaatacaaatctgtcaaaagttggaagtaagcttcttgctgtatgtcattgtagtgttataacgccattataaatcttgaatataattattggtagcatc

SEQ ID NO: 111031 - DNA, 758 bp, Zea Mays
cccttccccatcttgtgcttggccctcacctccatggcctcccattgcctcgtccctaggtggcgagctcgctccttcccttttgctcgcccaagctccaccttccagcgccacctctcccatggtgctcgttctcagccctaaattgtccagtccatggctcggctctgcgtcctcgctgctccccaaagctcgccccgcctctctgcctccttgctggccgccatccccctccccaagccgagcaccccaaccgagcttgctctggctccagcccctccctcgtgctcagtttgacgtcacccaggacacggatgccgtcgagttcgctcctcttcttggctggccatggtcaccacgtcattgactctggtactcgatgttcgtgtcccaggacccagcacctgtattttgatgttaactatgtgtgtttgtatgtgtgatgaggagcgagatccctggatttttgtcaagaagaaggtgaagtcatagagtggcgctctctaggtgttctatgaaatgcttgaaccggacatcgtctgtcgatctcatggtttcgagttcgatttaggtaatgataagccaatttattattttggatagttgttgttagatggtttggatagcatgttagtcctgatgattatgacatctatcatacataagtgttgtgatgacgatctttggattttgtgttgcgtctatgtgctgctccgtgtggacgtctaaggaaggaactcgggaccccttctcttttc

SEQ ID NO: 111032 - DNA, 1949 bp, Zea Mays
gggaggagaagctgtgggtcgatcacttgggtcttgggtggcacgcgctacaagctagggcttctgctccgtcctccgcgaatccgcggcgagcctgctagctgcgtggcttccctcttcccgggagcggcgcggcggtagtgctggtgctgcccggaccagaccagacccgaaagcggagaggcccccgtgcaaccggagccgtgcgttggaggtggacaggtggtggcacctgtgggcaacggccaacggcacggcaggtacaccgtacagctcttgtgtcttgttcacttggtccctagtcgttcgtggtgtaggatgccgtcgtcggcgttaccatcactacaagcacgcggcggccgcagctgcgtcgccgtcgtccagtgccattggtgacggtggccgtgtctttggcgctcatctcgctggcgtgccttcctgtcttcgcggatgcaagcagagcgctgcaccgcgaccgggaggagcaccggaggcagcaccaccgcacggaggacaagaagagccgcgtctcgctccctcccgacgctgacggcgactctccgcccgagcctccggactccggcggcgcgccgccgcctgccgacgacagcgactgcggcaacgtgttcgacgtgagggcgttcggcgcgtcgggcgacggctcgtgcgtcgacgacgacacggccgcgttccgcgcggcgtggaaggcggcgtgctcctccgactccgccgcggccacgctgctggtgccgtcggacggcgtgttcaccatcgcatccaccatcttctccgggccgtgcaagcccgacctcaccttccaaatcgatggcgtcctcatgccgccggacggcccggcgagctggccggcgacggacagccggaaacagtggatagtcttctacaaggccgatcgcttgacgctggcgggggaaggcaccatcgaaggcaacggtgaggagtggtgggatctgccgtgcaagcctcacaggggtccaaacggatcgacgctgcgcggaccatgtgacagccccgcgctcatacgattcttctcgagcaatgacgtgacggtatgcggcctgcggatcgagaacagcccgcagttccacctcaggttcgacgactgcgagcgcgtgcgcgtcgacggcctcttcgtcagctcgccggcgtccagccccaacacggacggcgtccacgtcgagaacaccaagtccgtccagatcctcaactctaggatctacaacggcgacgactgcgtctccatcggcgccggatgctccgatgtccacgtcgagaacataacatgcggccacggccatggaattaggtacctgtcagtctgtcactcactcactcaccaacgtgcttccatggcgcgcggtaccgtttgtagtgaacctgacgcggcgagctgctgctgtcaccctcgcagcatcggcagcctgggtgtccacaacacccacgcctgcgtgtccaacgtcacggtccggaacgtgcggatactcgactccgacaacggcgtccggatcaagacgtggcagggcggcgccggcgcggtgtcggcggtcgagttcaccggcgtgcagatgcagaacgtgaagaactgcatcgtcatcgaccagtactactgcctcggccacgggtgcgccaaccagacctccgcggtgcgcgtggccggcgtcgcgtacagggacatccacggcacgtacaacccgcaggccggcgcgcccatccgcctcgcgtgcagcgacgccgtcgcctgcacggacatcaccatgtctggcgtcgagctgctgccggccggcggggacgacggagcactgctcgccgacccctactgctggaacgcgtacggggtcatggagacgctcacgctgccaccggtgtactgcttgctggagggcagcccggagtctctccaggatccgctcaccagttgctgagatgagatc

SEQ ID NO: 111033 - DNA, 2106 bp, Zea Mays
gggaggagaagctgtgggtcgatcacttgggtcttgggtggcacgcgctacaagctagggcttctgctccgtcctccgcgaatccgcggcgagcctgctagctgcgtggcttccctcttcccgggagcggcgcggcggtagtgctggtgctgcccggaccagaccagacccgaaagcggagaggcccccgtgcaaccggagccgtgcgttggaggtggacaggtggtggcacctgtgggcaacggccaacggcacggcagattctggtcgatcgtcgatgaggccggcgccggagacaagcacgcggcggccgcagctgcgtcgccgtcgtccagtgccattggtgacggtggccgtgtctttggcgctcatctcgctggcgtgccttcctgtcttcgcggatgcaagcagagcgctgcaccgcgaccgggaggagcaccggaggcagcaccaccgcacggaggacaagaagagccgcgtctcgctccctcccgacgctgacggcgactctccgcccgagcctccggactccggcggcgcgccgccgcctgccgacgacagcgactgcggcaacgtgttcgacgtgagggcgttcggcgcgtcgggcgacggctcgtgcgtcgacgacgacacggccgcgttccgcgcggcgtggaaggcggcgtgctcctccgactccgccgcggccacgctgctggtgccgtcggacggcgtgttcaccatcgcatccaccatcttctccgggccgtgcaagcccgacctcaccttccaaatcgatggcgtcctcatgccgccggacggcccggcgagctggccggcgacggacagccggaaacagtggatagtcttctacaaggccgatcgcttgacgctggcgggggaaggcaccatcgaaggcaacggtgaggagtggtgggatctgccgtgcaagcctcacagggtactcttctcttccgcggtgcattagtcacggagtttaccccgaagaaacatgcgtgacgtttgggtctgtgtccgtgcatgtctagggtccaaacggatcgacgctgcgcggaccatgtgacagccccgcggtaaagctcgccggcaaacttggatttcttttctccccatcatcatgttgtgtgtgtttcttttgtcgaaatccttgacggtctcactctgctcgtggaatctgtgtgctgtctgcagctcatacgattcttctcgagcaatgacgtgacggtatgcggcctgcggatcgagaacagcccgcagttccacctcaggttcgacgactgcgagcgcgtgcgcgtcgacggcctcttcgtcagctcgccggcgtccagccccaacacggacggcgtccacgtcgagaacaccaagtccgtccagatcctcaactctaggatctacaacggcgacgactgcgtctccatcggcgccggatgctccgatgtccacgtcgagaacataacatgcggccacggccatggaattaggtacctgtcagtctgtcactcactcactcaccaacgtgcttccatggcgcgcggtaccgtttgtagtgaacctgacgcggcgagctgctgctgtcaccctcgcagcatcggcagcctgggtgtccacaacacccacgcctgcgtgtccaacgtcacggtccggaacgtgcggatactcgactccgacaacggcgtccggatcaagacgtggcagggcggcgccggcgcggtgtcggcggtcgagttcaccggcgtgcagatgcagaacgtgaagaactgcatcgtcatcgaccagtactactgcctcggccacgggtgcgccaaccagacctccgcggtgcgcgtggccggcgtcgcgtacagggacatccacggcacgtacaacccgcaggccggcgcgcccatccgcctcgcgtgcagcgacgccgtcgcctgcacggacatcaccatgtctggcgtcgagctgctgccggccggcggggacgacggagcactgctcgccgacccctactgctggaacgcgtacggggtcatggagacgctcacgctgccaccggtgtactgcttgctggagggcagcccggagtctctccaggatccgctcaccagttgctgagatgagatc

SEQ ID NO: 111034 - DNA, 1958 bp, Zea Mays
gggaggagaagctgtgggtcgatcacttgggtcttgggtggcacgcgctacaagctagggcttctgctccgtcctccgcgaatccgcggcgagcctgctagctgcgtggcttccctcttcccgggagcggcgcggcggtagtgctggtgctgcccggaccagaccagacccgaaagcggagaggcccccgtgcaaccggagccgtgcgttggaggtggacaggtggtggcacctgtgggcaacggccaacggcacggcagattctggtcgatcgtcgatgaggccggcgccggagacaagcacgcggcggccgcagctgcgtcgccgtcgtccagtgccattggtgacggtggccgtgtctttggcgctcatctcgctggcgtgccttcctgtcttcgcggatgcaagcagagcgctgcaccgcgaccgggaggagcaccggaggcagcaccaccgcacggaggacaagaagagccgcgtctcgctccctcccgacgctgacggcgactctccgcccgagcctccggactccggcggcgcgccgccgcctgccgacgacagcgactgcggcaacgtgttcgacgtgagggcgttcggcgcgtcgggcgacggctcgtgcgtcgacgacgacacggccgcgttccgcgcggcgtggaaggcggcgtgctcctccgactccgccgcggccacgctgctggtgccgtcggacggcgtgttcaccatcgcatccaccatcttctccgggccgtgcaagcccgacctcaccttccaaatcgatggcgtcctcatgccgccggacggcccggcgagctggccggcgacggacagccggaaacagtggatagtcttctacaaggccgatcgcttgacgctggcgggggaaggcaccatcgaaggcaacggtgaggagtggtgggatctgccgtgcaagcctcacaggggtccaaacggatcgacgctgcgcggaccatgtgacagccccgcgctcatacgattcttctcgagcaatgacgtgacggtatgcggcctgcggatcgagaacagcccgcagttccacctcaggttcgacgactgcgagcgcgtgcgcgtcgacggcctcttcgtcagctcgccggcgtccagccccaacacggacggcgtccacgtcgagaacaccaagtccgtccagatcctcaactctaggatctacaacggcgacgactgcgtctccatcggcgccggatgctccgatgtccacgtcgagaacataacatgcggccacggccatggaattagcatcggcagcctgggtgtccacaacacccacgcctgcgtgtccaacgtcacggtccggaacgtgcggatactcgactccgacaacggcgtccggatcaagacgtggcagggcggcgccggcgcggtgtcggcggtcgagttcaccggcgtgcagatgcagaacgtgaagaactgcatcgtcatcgaccagtactactgcctcggccacgggtgcgccaaccagacctccgcggtgcgcgtggccggcgtcgcgtacagggacatccacggcacgtacaacccgcaggccggcgcgcccatccgcctcgcgtgcagcgacgccgtcgcctgcacggacatcaccatgtctggcgtcgagctgctgccggccggcggggacgacggagcactgctcgccgacccctactgctggaacgcgtacggggtcatggagacgctcacgctgccaccggtgtactgcttgctggagggcagcccggagtctctccaggatccgctcaccagttgctgagatgagatcgttttctttactaacaaagatttctctcctgagacagtcaacgctaatacactggacattctacatgtgacaaattacaaattacgcagacaatgtgaatttctgaaatggcatgctcccagcaactgaaagttgagccgcaatgtattcaagagagtgaaat

SEQ ID NO: 111035 - DNA, 1937 bp, Zea Mays
ctcaacctctcaacctcaactgctgcatgccgcctatacatactacgcacgcagtcgcgcccggccctgcactgcactgcacgggcgcggcgggagatcgagaggagactttgctcgcttttggtgggcatccgcgcggagcgtgaccacagacggtgtagagactagatagatcggaaggggatctaggcatagagagcgaggaggatgaccggcgttgttgcaggcgccggagggggcaacaaggcggcgggcgccacgctgcggctgcaccactaccttgtgatggccggggtggcggcggcgttcgtcctcgcctgcctccggtacgcgccggaccccgcggggtacggcttcctggccgtggcgccgcggccggtggaggccgatgctggtgcccggcgggacaccactcctccaccgcgcccgtcgtcgtcgtcgtcgtcggtggtcatcttcaacttcggtgactccaactccgacacgggcggcatggcggcggtcaacgggatgaacattaacctgcccgagggacgcaccttcttccgccgccccaccggaaggctctccgatggccgcctcgtcatcgacttcatctgtgagagcctgcacacgcctttcctgagcccatacctcaaggcgctgggcgcggatttcagcaacggcgtgaacttcgccatcggcggctcgacggcgacgccggggggctctccattctcgctggacgtgcagctccatcagtggctctacttcagggccaggtccatggagatgatcaacctaggacagaggcctcccatcgatcgcgaaggattccgaaaggccatctacaccatcgacatcgggcagaacgacgtgtctgcttacatgcacctgccctacgaccaagtgcttgccaagatccctggatttgttgctcagatcaagtacaccatcgagacgctgtactcgcacggggcccgcaagttctggatccacggcacgggcgcgctgggctgcctgccgcagaagctggccatcccgcgggacgccgacgacggcgaccagctggacgcccacggctgcctcaagacctacaacaacgccgccaagcgcttcaacgcgctgctcggcgacgcctgcgcccagctccggcgccggatggtggacgcggcgctcgtcttcgtcgacatgtacgccgtcaagtacgacctggtggccaaccacacgacgcacgggatcgagaaacctctcatggcgtgctgcggctacggcgggccgccgtacaactacaaccacttcaaggcgtgcatgtcggcggagatgcagctgtgcgacgtgggcacgcgcttcatcagctgggacggcgtgcacttcacggaggccgccaacgccatcgtcgccgccaaggtgctcaccggcgactactccacgcccagggtcaccatcgccaaactcgtcaactccacgctgcccaacgacgactagctggctggccgatcgatcgatcgatcgtcgtcgtcgtcattctgataaacatactgcaggctgcaggcttcatcgatccatatccaattgtccgtagaaatctacgactagctcattgtagatctgtaatgtgggctaagagatgcatgacgatcgactatagctgcccaactcgtcaagagctggttcaccgccctcgtcatgatcgagctagtttggacgagcaaattccatggcaccgagtgacacaattgatatcctcattgactaatactagtagtcgtactagcaaaaggaagagagggttggaacttggaacaactgagtggttctgtgggggtcgttagtgttagaatttatactgatcgattcctaagtccttagaaaaccaatccgtaactggaagtaaaatcttgatgacgagtagatctgatctactaagaggaataggaaaacatacctttgttgtt

SEQ ID NO: 111036 - DNA, 948 bp, Zea Mays
gcacgcagtcgcgcccggccctgcactgcactgcacgggcgcggcgggagatcgagaggagactttgctcgcttttggtgggcatccgcgcggagcgtgaccacagacggtgtagagactagatagatcggaaggggatctaggcatagagagcgaggaggatgaccggcgttgttgcaggcgccggagggggcaacaaggcggcgggcgccacgctgcggctgcaccactaccttgtgatggccggggtggcggcggcgttcgtcctcgcctgcctccggtacgcgccggaccccgcggggtacggcttcctggccgtggcgccgcggccggtggaggccgatgctggtgcccggcgggacaccactcctccaccgcgcccgtcgtcgtcgtcgtcgtcggtggtcatcttcaacttcggtgactccaactccgacacgggcggcatggcggcggtcaacgggatgaacattaacctgcccgagggacgcaccttcttccgccgccccaccggaaggctctccgatggccgcctcgtcatcgacttcatctgtgagagcctgcacacgcctttcctgagcccatacctcaaggcgctgggcgcggatttcagcaacggcgtgaacttcgccatcggcggctcgacggcgacgccggggggctctccattctcgctggacgtgcagctccatcagtggctctacttcagggccaggtccatggagatgatcaacctaggtctgtcaagtcaactgtggagtagcttagcttttgttaagtagtagtaaatttggtgtgagacctgttaaattaattatcgatgtgtgctgggggcgggggcgggcatgcaggacagaggcctcccatcgatcgcgaaggattccgaaaggccatctacaccatcgacatcgggcagaacgacgtgtctgcttacatgcacctgcccta

SEQ ID NO: 111037 - DNA, 94 bp, Zea Mays
ctcattgactagtactagtagtcgtactagcaaaaagaaaacagggttgggccaactgagtggttctgtggggttaggccttttgaggctttta

SEQ ID NO: 111038 - DNA, 1661 bp, Zea Mays
cacaccacaccacagcagcatatatgccactgccctgcccaggcagccagccatgccgccaccaccccgatcccggcacagaacccagtgccagacgcggacagcgagcgcgaccacatctatctaggacccgtatctctctctctcctcccgaccagcacgtcacgtgccacggacaggggtcaagcgcggtcgccgatgtcggcagcgggcggcagcctcgcccgcgccacctcgcggcccgcggcggcagcatggctgctgctggcgctggccgcagcagcagcatcggcgctggcgctgccagcggccgcgggcggcttcagctgccgtcctgggtcccggccggtgctcttcaacttcggggactccaactccgacacgggcggcatggcggcggccaaggggtggcacctcacgcgcccggagggccgcgccttcttcccacgccccaccggccggttctgcgacggccgcctcgccatcgacttcctctgcgaaagcttgaacatcagctatttgagcccatttctgaaggcgttaggctccaattacagcaacggtgcaaatttcgccattgctggcgcagcaacgcaaccgcgagatgttccatttgcgttgcacatacaagtgcaggagttcttgtacttcagagatagatccttggaactcatcgatcaaggtctaagtggtccaattgatgcacaaggattccaaaacgctctatatatgatagacatagggcagaacgatgtaaacgctcttctgtcaaacttgccctatgatcaagttattgccaaattcccaccaattcttgctgagattaaggacgctgtccagactctatatagcaacggtagccgaaacttctggatacatgggacgggggctctgggttgcctgccgcagaagcttgccataccaaggaaaaacgacagcgatcttgatcagtatggctgtctcaagacctataacagagctgcagttgcgttcaacgcagcgctgggcagcctctgcgacgagctgagtgcgcagatgaaagacgcgacgcttgtgtacacggacctgttccccatcaagtatggtcttgtcgccaaccacactaaatatggttttgacaagccgctgatgacatgctgtgggtacggagggcctccctacaactacgacttcagcaagggttgccagtctaaggatgtggcggcctgcgatgacggctcgaagttcgtcagctgggatggcgtgcacctgacggaggcggccaatgcggttgtggccagagcgatactgagctcacagtactccaagcccagtctcaagtttgatcagttctgcagagcctgatacttgttagtacctcataccgtgcctttttagtttaggcaaatttactgaacacaacttggcacttcaaagtcaaaatggatggatccgcttctgataatttgattgccttatttacccgtcagggatgtgacccatcattgatctgtcagccatagcccataggccataactttggataggtgaaacttccaaatattgtgggccacatgtaccttcaaactacatgtcctatctgatatgttttcatcaaagagagaaatacaccatgggttatcaaacttcttccgtattcttatatgagttgatgaattctc

SEQ ID NO: 111039 - DNA, 1419 bp, Zea Mays
atggatggaatggaacagacacaccggcctctgcaaacctgtgcgacgcatgtggcttttctcccgcccattcggtgcgtgctgggcggcgagactgatgatgatcaattggtcatgcacagcccatccagccagcagggagggacacgggcgggcatggctgctggtggcgctggtgcagctgttgcggcggtgctcacgacggccgtcgctgcagtcctcgttgcggtgttgacgacgacggtgtccggacaggacgacccagcgccagagccagcgccggcggcggcgtgcgcgcggcggcccgtggtgttcgcgttcggggactccaacacggacacgggcggcgtggcggctgggctggggcactactacccgctccccgagggccgcgtcttcttccgccgatccaccggccgcctctgcgacggacgcctcgtcatcgactacctctgtgagagcctgaacatgagctacctgagcccgtacctggaggccgtgggctccgacttcacgggcggcgccaacttcgccatctccggctcctccacgctgccccgcaacgtccccttcgcgctccacgtccaggtccagcagttcctgcacctgaagcagcgctcgctcgacctcgccgcccacggcgggacggctcccgtcgacgccgacggcttccggaacgcgctctacctcatcgacatcggccagaacgacctgtccgccgcattcgggagcggagcgccctacgacgacgtcgtccaccacaggatcccggctatcgtgtcagagataaaggacgctatcatgactctctactacaacggcgccaagaacttctgggtccacggcaccggccctctgggctgcttgccccagaagctcgccgcgccgaggcccgacgacagcgacctcgactacaacggctgcctcaagaccctcaacgacggcgcctacgagttcaacggtcagctgtgcgccgcctgcgacggcctcaggtcgcagctgcgcggcgccaccatcgtctacaccgacgtcttgctcgtcaagtacgacctcatcgccaaccacaccgcctacgggttcgaggagccgctcatggcgtgctgcggctacggcgggccgccctacaactacaacgccaacgtgagctgcctcggcccgggcttccgggtgtgcgaggacggcaccaagttcgtcagctgggacggcgtgcactacaccgacgccgcaaacgcccttgttgccgcgaagatcttctccggccaattctccacgccccaaatgcccttcgactacttctgccaggcatgaccatcgtacgagtacgacccagcatagctagctgagcgattcagctgttgcgagagagaatccattcgtgtaactaagaaatgtaacaagcaccgcagatcatatcatgct

SEQ ID NO: 111040 - DNA, 1657 bp, Zea Mays
gccactttgctcagccactacacgcccggctactttataaacacacatacaccgatcgatacacgacacacacgtacatacagaacagagcgcacgcgcaggcacagcccatccagccagcagggagggacacgggcgggcatggctgctggtggcgctggtgcagctgttgcggcggtgctcacgacggccgtcgctgcagtcctcgttgcggtgttgacgacgacggtgtccggacaggacgacccagcgccagagccagcgccggcggcggcgtgcgcgcggcggcccgtggtgttcgcgttcggggactccaacacggacacgggcggcgtggcggctgggctggggcactactacccgctccccgagggccgcgtcttcttccgccgatccaccggccgcctctgcgacggacgcctcgtcatcgactacctctgtgagagcctgaacatgagctacctgagcccgtacctggaggccgtgggctccgacttcacgggcggcgccaacttcgccatctccggctcctccacgctgccccgcaacgtccccttcgcgctccacgtccaggtccagcagttcctgcacctgaagcagcgctcgctcgacctcgccgcccacggcgggacggctcccgtcgacgccgacggcttccggaacgcgctctacctcatcgacatcggccagaacgacctgtccgccgcattcgggagcggagcgccctacgacgacgtcgtccaccacaggatcccggctatcgtgtcagagataaaggacgctatcatgactctctactacaacggcgccaagaacttctgggtccacggcaccggccctctgggctgcttgccccagaagctcgccgcgccgaggcccgacgacagcgacctcgactacaacggctgcctcaagaccctcaacgacggcgcctacgagttcaacggtcagctgtgcgccgcctgcgacggcctcaggtcgcagctgcgcggcgccaccatcgtctacaccgacgtcttgctcgtcaagtacgacctcatcgccaaccacaccgcctacgggttcgaggagccgctcatggcgtgctgcggctacggcgggccgccctacaactacaacgccaacgtgagctgcctcggcccgggcttccgggtgtgcgaggacggcaccaagttcgtcagctgggacggcgtgcactacaccgacgccgcaaacgcccttgttgccgcgaagatcttctccggccaattctccacgccccaaatgcccttcgactacttctgccaggcatgaccatcgtacgagtacgacccagcatagctagctgagcgattcagctgttgcgagagagaatccattcgtgtaactaagaaatgtaacaagcaccgcagatcatatcatgctgaataattcgcgattgacctatttgtcacgcacgctacctgtgagactcaagcgctaacgctagctgggctttagatgaagtgctatggcctgttaagggtttgtttgcttggtggcctgttaagggtttgtcatagctttctatataagcagttgtttggttcgcggcaagggccccgattaccctgaatttggtccagaaacataatactcctcgacgtttcgacccaaagaaataaatctatgcaacttg

SEQ ID NO: 111041 - DNA, 429 bp, Zea Mays
gcggctgcatggattatacttgggatattctcgctcatcagacttcaagctgattaccttctcgttgttggagtttgcttgagcctcagcattgcaaatattattgggttcaccaaatgcaataaagatgcgaagaagaacatccaggattggacaaggagtgcacttctatcaggtagtgtcagatcgcatctgcagtcagcatttggtgtctgaacaataacctacgaccttgttatacgtgtagtgctgtataatttacagataacatgattggttactagagcgcgtctgttttttttttgttggctatgtgcatcttgctaggcagagtcggaagaacattttcagagccgtgtatcaactcgatgtataatgcagcttgaataaaatctttctttaacaaaaaaaaactcttgtccgtcagaa

SEQ ID NO: 111042 - DNA, 406 bp, Zea Mays
atggcaagactgcagcgtggcgccagaatcggagacgtgccactcaatggtctgcacgcacgtcttcagggcagtgaaggggacatcaatgtcagcggtgatgtgcactgtgcggtcatcgttgccactctacgtctgctgcagtggagtgaagcgcatagggtagcccttgcagagagggtcgacctcctgcttgctgcacaaagtgttggaggtatgtcccttcctgtgtttgatgaaatgcctcataacaacggcgagggagaaataaccctgttctatgaaggctttgattattcagtgtttgatgatatgccagttgagaatgtgatttgggatgacgacctgtaatagttagataaagagatggatgacctgctagagtgcaaacaagaaatgctcaagg

SEQ ID NO: 111043 - DNA, 2522 bp, Zea Mays
gaaatcaaacagcccctataaaaaaaagcctggctccctcccagctctcctctgccttatgctccccagtccccacctaacccaaaccgaaccggcccttcgcacttccgcagaacgagcactcgtggaccaaatatttggcacaagttagctttgcctgtttcttgcgtgtagatccctcaaggtttctccgccgcgcgcccgtgcccttcgccggagcttgccatatgaatggtcaaaccccgatggggctcgccgccgtagcagtgaggccgtgctgcagccgcctcatctcgtccgcctccgccgccgcggcgtcaaagacggcggcgggcaccgcgacctcgctcttccccagattgccccacccgcaccaccccccgtacggccggcgcctccccttcctcgtctccgcggcgtcgcagtcgcaggccggcccgggcactcctcccacccctgtaccagcccccgtcccctccgacccccgcgctgccgtttccggcaaccttcctttcttcgaccgcgtcctctttcccgactcgttcccgcttgagaccccgccctccaaggaggaggaggacgcggcagcgctgcagaccgatgaggccgtggcgccggccgtccccttgagggaggagacggagacagagagggaggcgtggaggctgctgcggagggcggtcgtcagctactgcggcgagcccgtggggacggtggcggcggaggaccccgagtgcacggagatgctcaactacgaccaggtcttcatcagggacttcgtgccctccgcgctcgccttcctcatgcgcggcgagaccgagatcgtccgcaacttcctcctccacaccctccagcttcagagctgggagaaaactgttgattgttacagccctgggcaaggattgatgccagctagcttcaagattaggaccgtaccacttgatgagaacaatgaaggatttgaggaggtcttggaccctgactttggcgaggcagccattggccgtgtagctcctgtggattctggactgtggtggattattttgttgagggcttactgcaagataacaggcgacaatgctttgctagaaagagttgatgtgcagacaggaattcaattgatactgagtttgtgtttggctgatgggtttgacatgttcccaacattactagttacagatggatcatgcatgatagacaggaggatgggaatacatgggcatcctcttgaaatccaagctttgttctactccgctctacgatgttcacgagaaatgcttgttgtgaacaatggatcgaaaaatctcatccgtgccattaacaacaggctcagtgcgttgtcctttcacataagagaatattactgggttgacatgaagaagataaatgagatatacagatacaagacagaagaatactcccatgacgccactaacaaattcaacatttaccctgagcaaatcccttcctggcttgttgactggattcctgagaaaggaggttaccttatagggaatctgcagccagctcacatggattttaggttcttctctcttggcaacctttgggccatagcttcgtctctaactactccaaaacaagctgagggaattcttagccttattgaagaaaaatgggatgatcttgtagcaaacatgcccctgaagatatgcttccctgcaatggaagatgatgaatggcgcattattactggcagtgatcctaaaaataccccatggtcatatcataatggtggatcttggccaaccttattgtggcagttcacattggcctgcataaaaatgggcagaccagaattggcccggagagccattgctgtggccgaggagagactctcagatgacaagtggccagaatactatgacacccggtctgggaggttcgtagggaagcaatcccgatcttatcagacatggactattgctggtttcctgacctcaaaaatgttgctggagaaccccgagctggcttctattcttacctgcgatgaggaccttgagcttctccaaggctgtgcttgctgcctgtccaagaagaggaccaggtgctcacgccgggtggccaagccacatgctggggtgaagctgtgaagctcatgttgttctttctactgcagacgcacaatggatactacagatggagaattaactaaggcacagactcctcagctgtacattagtataggtttatattagatacccatccattcatttcctcggtgtctgctcattggttttttttgctgagctaccactgatgggaactaccctgggtgataccggtggttgaaagaagagagcaaaaacatattcgaagtttgtgctctcatgtacacagaaaaaagtacctgctattatttgagctgtttgggagcgctgttgcagccctaaccattgtatgtcttgttcgtacttcgtgcaaaccaaactctgacactatcatgttcttttcatattatggttacacctttgttgtattggattatgcttggatttgccata

SEQ ID NO: 111044 - DNA, 106 bp, Zea Mays
ctacaaagttatagatctcttcgagcactacaattttcatataaactttatcttcatccgatttcatacgtaaaagttatgattttataactatattattatgcag

SEQ ID NO: 111045 - DNA, 389 bp, Zea Mays
tttcaaggcttcaaaatgccattgatagcgtgtatcaatgaggggagtaacagcggcattcaagctccattacataggagagaaacggtcgtggaatgaagctttggttggctccgggtctggcgtcgcggcactcgacgtcgggtggcttcagctcctggcgcggcgcggcttggtgcacggggcgcgagttgctggcgcggtcctgcgggcgtcgcgtggcctaggctttgcttgggcgcgcgggtcgaggcagtcgcgggcacaggggctttcgggttggctccgcggggtcgcggcgctggtgggcagggcgcgctcgggtcgcgtcctggccggggcgcggtcgctgcttggtcgcgcgacttcggtcggcctggcgcgatgcg

SEQ ID NO: 111046 - DNA, 2112 bp, Zea Mays
caccacccaatccccccaacaacccgtgcctgccgtgatccttccgacgccgttccccggccacctccaccgccaatggcaggcgccatccgcttcacatgacctcactgttacacggctcgagctgcctagctgtggctgtgagccccttctaccttcttggctgtttgctagctagaggccgagaacgaagccagccccgttttctgatccttcgcacagtggcgctgcacgtgcctctctcgatctgtcgccttctcctcttcttcgccttgtaccgtctgctgagcagtgagcacggaacaagatcgaaccacggcctcacatactcgcgcatatggcgacaatggcagggcgtcttgttgcccggacgtcgtcctcctcggccaagcgccagcggttcagctccgctgttctcctcctcgctctcttccagagctcgtggtgctacgacgacgcggcggcgacgacgacggtggattacggttacaacaacgagcacgaggccgaccgggtggcgttcctccccgggcagccgaggagccctccggtgtcgcagttcgccgggtacgtcaccgtgaacgagcgcaacgggagggcgctcttctactggttcttcgaggcccagacgtcgccggcgcacaagcctctcctactctggctcaatggaggacctggttgctcgtccgttgggtacggagctgcttctgagttggggcctctcagagtcaacagacacggggcagggcttgagttcaacaattttgcgtggaacaaagaggccaacttgctcttcctagagtctcctgctggggttggcttctcctacaccaacacatcatccgacctcaccaaactggatgatgctttcgtagctgaagatgcatacagcttcctagtaaattggctcaaaaggtttccgcagtataggagccacgaattttatatctccggggagagctacgcaggtcactatgtgccacaacttgctgaacttgtctatgacaggaacaagggcaacaccaacacacacatcaaccttaaaggtttcatggtcggtaatccactaactgacgactactacgactcaaaggggctggctgaatatgcttggagccactcagtagtgtcagacgaagtttacgagcgcatcaagaaggtctgcgacttcagggtctcaaactggaccgatgactgcgatacagcgatgagcgccgtgttcagccagtaccaggagatcgacatctacaacatctacgcgcccagatgcaacctccctccgtcgtcagctgcacttgcacttgctgttgacaaggcagtcgtagccaacagacaggaacatttcaggcgaaggatcaggatgttctccggatatgacccgtgctactcttcgaacgcggaaaagtacttcaacgatgcaggtgtgcagacggcattccatgcgaatgccagtggagctcggaaatgggaagtttgcagtgattcaattttgaggtcatacaatttctcggtgctttctgtcttaccaatctactctaagctcatcaaagcaggactgagagtgtggctctacagtggggatgcagatggtagggtcccggtgatcggatcgcggtattgcgtggaagccctgggcctgcctgtcaagacgcagtggcaaccatggtacctgaacaaacaggttgcgggcagatttgtggagtaccatggcatgacgatggtgacgatcagaggagcagggcatttggtgcctctcaacaaacctgcagaagggctcgcactcatcgacacattccttcagggcaaacagcttcccacacacagatgacaagagtacttagggttgtgattgtgatgagggttattgttttcaaaaaaaaaatcaaggattggacaaactatgtgccccacacacacgggctaatcagtaaggatttcatttccagtttctgcataaattgggttggctacaaatagagctgcggtctgaaatacaattttcagcttacataaaaaatattaaatgaataagtatgataaaaccaaatggaacccttaaatcagtgtcctaagaaccggactgcgccttgattcaataatacctttcttgtg

SEQ ID NO: 111047 - DNA, 2101 bp, Zea Mays
caccacccaatccccccaacaacccgtgcctgccgtgatccttccgacgccgttccccggccacctccaccgccaatggcaggcgccatccgcttcacatgacctcactgttacacggctcgagctgcctagctgtggctgtgagccccttctaccttcttggctgtttgctagctagaggccgagaacgaagccagccccgttttctgatccttcgcacagtggcgctgcacgtgcctctctcgatctgtcgccttctcctcttcttcgccttgtaccgtctgctgagcagtgagcacggaacaagatcgaaccacggcctcacatactcgcgcatatggcgacaatggcagggcgtcttgttgcccggacgtcgtcctcctcggccaagcgccagcggttcagctccgctgttctcctcctcgctctcttccagagctcgtggtgctacgacgacgcggcggcgacgacgacggtggattacggttacaacaacgagcacgaggccgaccgggtggcgttcctccccgggcagccgaggagccctccggtgtcgcagttcgccgggtacgtcaccgtgaacgagcgcaacgggagggcgctcttctactggttcttcgaggcccagacgtcgccggcgcacaagcctctcctactctggctcaatggaggacctggttgctcgtccgttgggtacggagctgcttctgagttggggcctctcagagtcaacagacacggggcagggcttgagttcaacaattttgcgtggaacaaagaggccaacttgctcttcctagagtctcctgctggggttggcttctcctacaccaacacatcatccgacctcaccaaactggatgatgctttcgtagctgaagatgcatacagcttcctagtaaattggctcaaaaggtttccgcagtataggagccacgaattttatatctccggggagagctacgcaggtcactatgtgccacaacttgctgaacttgtctatgacaggaacaagggcaacaccaacacacacatcaaccttaaaggtttcatggtcggtaatccactaactgacgactactacgactcaaaggggctggctgaatatgcttggagccactcagtagtgtcagacgaagtttacgagcgcatcaagaaggtctgcgacttcagggtctcaaactggaccgatgactgcgatacagcgatgagcgccgtgttcagccagtaccaggagatcgacatctacaacatctacgcgcccagatgcaacctccctccgtcgtcagctgcacttgcacttgctgttgacaaggcagtcgtagccaacagacaggcgaaggatcaggatgttctccggatatgacccgtgctactcttcgaacgcggaaaagtacttcaacgatgcaggtgtgcagacggcattccatgcgaatgccagtggagctcggaaatgggaagtttgcagtgattcaattttgaggtcatacaatttctcggtgctttctgtcttaccaatctactctaagctcatcaaagcaggactgagagtgtggctctacagtggggatgcagatggtagggtcccggtgatcggatcgcggtattgcgtggaagccctgggcctgcctgtcaagacgcagtggcaaccatggtacctgaacaaacaggttgcgggcagatttgtggagtaccatggcatgacgatggtgacgatcagaggagcagggcatttggtgcctctcaacaaacctgcagaagggctcgcactcatcgacacattccttcagggcaaacagcttcccacacacagatgacaagagtacttagggttgtgattgtgatgagggttattgttttcaaaaaaaaaatcaaggattggacaaactatgtgccccacacacacgggctaatcagtaaggatttcatttccagtttctgcataaattgggttggctacaaatagagctgcggtctgaaatacaattttcagcttacataaaaaatattaaatgaataagtatgataaaaccaaatggaacccttaaatcagtgtcctaagaaccggactgcgccttgattcaataatacctttcttgtg

SEQ ID NO: 111048 - DNA, 453 bp, Zea Mays
atggagtacaccgacgccagtaaccgtcaggtgctcgaggaaatgcgcctgatggaagcgcggctctccgagaagttcgccggacgctgtgacaacatcgaacggcgtgttgaggatatccactcccacttcacgacgcgctgtgacaagatccaggagcaggtcgacgtggtggctctccgcggcgacgaccgtctcgtggcgctggaggaaatgcgctccgacattgagcgctggcgtccggatctggtcaagcgtgtcgaggacgtcgccctcgaggttttgcgcatcaacaagttcctcgagcgggagtgtcgagccgactccatcgacaaaccgggtatcttcggttccgccaaaacactagaggattaccaagggcacgcgaacatggctggaaaggcgctcggcggtgaggagctcggccggacccggacagacggcgctagctga

SEQ ID NO: 111049 - DNA, 171 bp, Zea Mays
atggcgcagggcctgttcctcttcggcttcccctccgcgttggctcgccttcggccgtcgcgtgaacaccagcaaactccagatccgagcgctcgtgctccaactccggccggtcaccatcctctacaccaagatcttcccggcacgcggatccttggccaccatctctag

SEQ ID NO: 111050 - DNA, 1500 bp, Zea Mays
cctgcaaacagccaagctccctcgcctcccctatggctgagcgtcctccccatctccatcctcgccctctacttggaccgcgccttgctcccagctccttccatggagtcaccgtctacgagcttcaacctgtcgtcgatccgatcatcgttcccgaccgtcgccctccaccagttcgcgtgctgcgcgcacgttggacccgccttcctctgctcctccctggcttttcctgcgcgcagccgagcctctcctcgcgcttccctgtgccctggtttctgctcgcagcggatgcgcgccggccgcctcttcttcccccaagcgcgcccctagcccctgcttttctttgcctctctcttctccatggcccagctgaagtccgttaccccatggagctctttgccgcgccccgagctccctgccttggccgcgccgtgtgcccatctcctgagcatgcgcgctccttcccttgcttctctcctccctgcatctctcctgcgcgtgcctagtgccgcgaacgctctctctgccctccgcgcgcgcaactccctggcgctccatcccttactcctctagctccagcgcccggtgtttctccctgctgcgctcgttctggtcgccgtcgtcgaattccctcgccgagtcctctccctagctctccccctcagctcaccgttgtcgccgagtccgaatatcctagctcgttcttgtggtcgtgagttcttccctgtgcgcgcgtgagctcgccagccaccgttgtcctacccgcgccagcccgcgaccatggtcatgttcgtcgagttcaccaacgctctgttgccgattcgactgtcgtggctattgtgtgcctcgttgtgtgctcgccgagtgtcgtctgatgtaccccagcactcgtgcttgcccctggccccgttagcactcgcgcgcctgctcgtcgtctctgcggtgcacccgctctcatccatcgggtttcacgtgtactcgcgtttgccgtcaagctgttgaacccgttttccccctgctcgaccacgtcttcgtccttctggtggctgtcgtcaatatggtgctggactatgctccattatctactcgcactggcggtcgaccttgttggtcctttccatgttaaaccagcaagctccgccatcgtcactcaactgctcgccctgcgtgtgctcgtcaattttctttgtcgtgtctgccgagttgaccaacgctccatctcgctattattgccaagtcccacacagctgtgctgttctctcgtcgtcattcattcctatttttcaccgccatatgccgcctcgtcatgacgcgtgtcatcatccttaatctcaatagctcttccgatacacgcctcaccatgcttcgcctcctcttgatcagccccatctgggtcatgtgggcagaagatctcaacacctatcaaatgttcgacgacaagcccgaaccagaatttatcaacattctcacaagtattgagtcacgtttgatgctggtaag

SEQ ID NO: 111051 - DNA, 1545 bp, Zea Mays
agatgagcaccatccccttcccctccacccatcctcagaagatatcatgctgacggcgtcgacgtggtctccagcagatccgagtggagcgccttcttgtctactcctcaaacattgtcgcagtgcctgggccgtcgcgaggagccccaaacacaatctcctccttagacgtcgtcggtctcctcgctccctcctcaaacgtcgtcgtgctgccgacattgtctgtcacggctccaaccggagcaccatcccacctcccccgtcaaacgacgctgcgatgtttgggccaccgtcgggagtccgaatctgcctcctcagacatcgccacctcgaaacgcacaggtcgcgcggtagggggcactggtggtccggcgcggtcacctggcgaacgatgacggaggaggtgggcaagtctatcaagaagagacactatgaagagcagtcgccatggctgatggatcagttgccggttgcattcatcgaagatttggccctctccaccaccatgtcgctaccccatacccgttgtccctgcatatctgaatgatgcaccttcaatccaccgctgcccaaggagcgaatggggaaggaccgacctgagcattctgtccggtagctggatagcaagaagcaccagtccttccccctcccaagcttaacaagcatggtacgttctaattggtgtcagccgtcggatatcatctagatgctggcttctgcaccttttttccccttctcccgataatgtactgtcatttgtgggaggttccagaagctacgagagttatctgatgtccgatgtggtaagttaaaaagaaaaaaggaaggggataaggcagcgctttgtgactggcggcaaagtttgcatcgtgctcttctctagtttgcatcctgctcttctcctttcctttagtctataacatagctctctattcattttctcgcttacttttgctgattaaaaaaatcgcaagttacagaaaatttaggatctagcgatctcgacattctgtccaatacattatattcacctgcaaaaaaggtcgaagcaaatgttgcaatcagtccacaacctcaattctgaaacgccgtcttagaaaaccataaataaggtaattcctactacttcctaatgtgttttctaagtcaatagaagctactactttttatatatcaaaatcatctgagcactacacacagctttactgtttatgttgccttcgcctcaaaatactgattacaacatctttatgtagtatatgccactaatgtattttgtatgatagcatgtatacacctaagacatatgccacatatgtggccatgaacgtgtcaaactgatgtttccataagctttatataatatgccactaaagtattttgtatgcatatgcaccttggacatatgtaaacatggacgaccccttttatatgtatatacatgtcgatcttttagacaactagaacaaacaactttactggagatgtataaatgtttacaaacactgttaacataattttctatgatcttgtttttggaatgtt

SEQ ID NO: 111052 - DNA, 743 bp, Zea Mays
gagcaccatccccttcccctccacccatcctcagaagatatcatgctgacggcgtcgacgtggtctccagcagatccgagtggagcgccttcttgtctactcctcaaacattgtcgcagtgcctgggccgtcgcgaggagccccaaacacaatctcctccttagacgtcgtcggtctcctcgctccctcctcaaacgtcgtcgtgctgccgacattgtctgtcacggctccaaccggagcaccatcccacctcccccgtcaaacgacgctgcgatgtttgggccaccgtcgggagtccgaatctgcctcctcagacatcgccacctcgaaacgcacaggtcgcgcggtagggggcactggtggtccggcgcggtcacctggcgaacgatgacggaggaggtgggcaagtctatcaagaagagacactatgaagagcagtcgccatggctgatggatcagttgccggttgcattcatcgaagatttggccctctccaccaccatgtcgctaccccatacccgttgtccctgcatatctgaatgatgcaccttcaatccaccgctgcccaaggagcgaatggggaaggaccgacctgagcattctgtccggtagctggatagcaagaagcaccagtccttccccctcccaaggtaccaactgatttccgcttgaaagaaaaagttttttcattcaaatctcatctcaaatatagaattctactgctaaataaacagcttaacaag

SEQ ID NO: 111053 - DNA, 660 bp, Zea Mays
tttccccaatactacatccttttttatagtttattactatgataagtatttccagttactgcattccctcattgaaaaaaatctgccccacaggtcgaagcaaatgttgcaatcagtccacaacctcaattctgaaacgccgtcttagaaaaccataaataaggttgacacaagggatgctgtggtgacctggcgtatttatataagaaataattgggtgactcagcaaatcgaagatggactggtgatttagaagatcgatgagcaagaagcagttgtgattttgtagattgaaatgcaggatggggaagcaggtaataatggggagaaaagtactaaccttagggccatagattgtatacacctaagacatatgctcctcctcagccgaggcggggtcccactcgacagtccagcccggtggcaagatggacggccaagtcaatccagcaaccatgtcctccaaggaacctgtaaaattatgccacaagcaaggctgagtataataatactcagctagacttacccggtgtgaggagtctactcctctacctctagacatgcagctgtttggctgtggggtttggtggccaaaagcactagctgagtttctaagtcaagttttaactttgtcaatttaagtgtgactctcttaaggct

SEQ ID NO: 111054 - DNA, 813 bp, Zea Mays
atgacgacggtcgggcagaggagctgggaaccgcgacttccatggtcgagcagagaaccagcaaggcgcgacgggctgagggagtggcagagcgcgcacgggatgaagggatcgagccgcggcacacagggatcttcgtgcgcgcgtggacacagagaagcaagcgcgcgggatgaaggagcagaggtccgcgcgaacacggctgggcacagggaggagcgccagcgagccggagccggaggccgagcaagtagggacgagcaccatgggaagcaggcagagggagctccacgagtagagaggaattggggaagggctgcagcgctgggagctcggctgggggaaacgaagcgccatgacagagatggccaacgaccgagcgcaacagggaagaacgcgcgcgcaccagagagggagcagggcgcgcggcagggacggagctccgagcgccgagctgcggccggaaccagaggcacagtaagccgacagccatggggacgagcggagctctggccggacaaagggaggaggcgcggcaaaagaagaaactggggaggggagatccgcacgcgcagagagctaaagaccaaatcgagctggggccgacgccggggctgggcgcgaccagccatggagcttggggctaggcgctgtcggggtggagcagggagaccgcgaccagggcgcagatgccagggaagaagacgcacgagagggagagcggagaagaagcagcacgagcagagagaaagaaggagacgcgcgttgataaaggaaccaggggcggtggctggatttttcttcagggattaa

SEQ ID NO: 111055 - DNA, 1028 bp, Zea Mays
cagcggcaatcaaagagactgggagattcagatccacacacatccgcatccctctctcctcggtttcctctcccaccaccaacccccagatcgcagcgatctccgccgccgccctctcagggattccgcgcgacaaagtcaggcgtagaggctccaggaggaggagggaggcgcagcagggcgggtgggggagatgttcctctgggactggttctacggggtgctggcctccctcggcctgtggcagaaggaggccaagatcctcttccttggcctcgacaacgccggcaagaccacgctgctccacatgctcaaggacgagcggttggtgcagcaccagccgacgcagcacccgacgtcggaggagctcagcatcggcaagatcaagttcaaggccttcgacctcggcggccaccagatcgcgcgccgcgtgtggaaggattactacgcaaaggttgatgctgtagtatacctggtagatgcatatgataaggagcgatttgctgaatcaaagaaagagctcgatgctctcctgtctgatgattctttggccaatgttccatttctcatccttggcaacaagattgatatcccatatgctgcctctgaagaggagctacggtatcacctaggccttagcaacttcacaaccgggaagggcaaggtcaaccttggcgactccaatgtccgtccacttgaggtcttcatgtgcagtgttgttcgcaagatgggctacggtgatggtttcaagtgggtctcccagtacatcaagtagggccctcgctgagggcgcatgctcagcccggcgaatttttttgccttttcgttccggttggttcgtgacgagaacgaacgatggtcgctaggaaagtatcatggagggtacgaagaggaaaaacagtgcttaacattgttgaacatgttgaatctttagcgtcaaaacaatttatgtcgaactctattctttcgcttttccatacaacgtttactaagtacttgcgatgcattataaaattattgctttcttt

SEQ ID NO: 111056 - DNA, 543 bp, Zea Mays
atgtacatcgagttctcaactttgaacatccaaataaataaaggtttcactgctaagctttcaggatatggttgtgttgacttcaataccgaggtgatatttaatgcacctgtgatatgttttcttcggtctgcagcaaacctttcggtggagaccttggagaagggtttactcaatcagtttgtctattgctgcaacaagtcggggctagaccgttccaaagtaaatgtaaatggaggcgtgattgcccttggacaccctctgggtgcaacaggtgcccgatgcgtggctactcttctaaatgaaatgaagcgccggggcagagaatgcagatttggtgttgtcaccatgtgtatcggatctggaatgggggtagcagctgtgttcgagctgtgttcggcccggctggaggtatcgaccatcactcgtcactgtaaccccatggtgatcggcgaccgtgagcttccatgttattgcgttctgatacttaagacttttattatgactatgtatgagatattgtctcttattagtactggatga

SEQ ID NO: 111057 - DNA, 84 bp, Zea Mays
cagtgggctgtgctaattataaagcatgatgaggttgtggttgatgatgaagtggtgttacgagaattccagaagcattgcagg

SEQ ID NO: 111058 - DNA, 761 bp, Zea Mays
gcttcctttttgccaggaagtttacacgtggagctggtctgaagcttcttgattcagtaagtccatgtcatttctttttcacttcttgtgtgcgttggcctagtaaaaagcaaagtcctttgcttacagtaattttaattttgttttgtgcactcactgatagcttcaaagtgatgaatatagtgacagatgcaagtgccttttgattgtttcaccttttgagaatatttcagttcacacaaatgtaaaggtaggggaccacggaaaagacacaaaataacaggactttgtttttgttcagtgtgtgattatcatatattattttgtacatgtatattagactcctccaactaccttgccgacgcatgaacaagaagacgtgctagactttgtcgaaaccctcttcactagtggagatatcgaccatcactcatcactgtaacccgatggtgatcggcgaccgtgagcttccatgttattgcgttctgatacttaagacttttattatgactatgtatgaaatattgtctcttattagtactggatgatgagatgtgtcttattatgactatggatgagaattttgtgatgtaattgattagactatggatgagacttttgtgatgtaatttatgagactatggatttacatattgttatgtgattgtgtgtgagatgttttatatgaaaatatgttgtgctatatagttgttgatatatttgttatgttgtggaatgtggtgtaaaataaaaataaacaa

SEQ ID NO: 111059 - DNA, 2341 bp, Zea Mays
ggaggttggcatcatgccaagggagccgtggcaacgtgcccacgcgcacagtggccttggtccgcgccaccgttccacaccgggcagtcgttgcgcgctgttccggccgcgcgatgaggacggcggggagaatcaccgagatgatcgcgttcggggagggtggcttggccacaccgccgcgagctcccagttccccagcgacatggagggctgtgtccatgagggccgcccttctcgccggtactacctccccatcgctggtgactcttgtgttcgtggaagctatccagcttcttcccggtacctcaccggcggtaactcgtcccggggatcgatggcatcgtgtgcaagggaggaagccgatagcttagagcgtgagcttcacagcatcgagagatccatcgtcatcccgatatgcctgaaccgcgaggccagggagttcttcccggacaggggcaggggcaccccggagctcctcgacagatacctcgctgctgcgaagcggctgcagcggctggacacgtcaggagacatcgatcagcgcaagaagagcctcctcaagacggtcatgtcttgcctcgccgacgagttctgccacctcaaggtgtggaagctggacgacgccgcgatgagggaccactcgccggcctccatctgggatgccgccgcgtccgccaggcgcagccgcggtggtcgttccctggacgactcacggatgagctactcgtcctctgggtccttcacggccagcggcggcacaagcgatgccagctatggctcctactgcaggggtctaggtgaagagccgtcggtccatagtcacaacacgttcgcagctggaatgatctatgtcgaccctaggtcgttgtcgatcctccgtgatattgcgagcgccatgtttgggagccgacatgaagatgttctacgagcagcttttgatcgacactgcgctcaactcgcgaggtacatcgaaatacttgacatcgacaacattttcggatatcaaatggaagaatcaagagaagttctactggaagcctggacatccacaatgcacatcatcattagtttcctcagcgagatgcagaggcaactgaaccgacatgactttggctccttcgacagaatcaaggaggaatatttcctggcaatcgcgagggtaactgccatgaagctgctcagctcagctagttctatcggctttcaggtgagcccaccaaccgacaagccatgcgagaacagttacggcggcgctgctagacgtggtctatccaaaatggtagatgtggtgatggtgtaccaggcactggatcacggtttgccagcaatcttatcactgctgtcgggggaaactaaggagctcgtcgttgcagaggctgaagggcttatcaagagactgtcggaagcgttcgccaaatcatcagatgagctgaacaaaactgtcaggtcgcagctcttgttcatcgccgacaccggtgtccatcgtttcacgaagcgcatcgtggatcatgtacggttcctggttcagcacaggagggcggtctatccgatgctactagcggacggccgtcgtcgtctagaaccgtttggtgaactggtgacgcggctggtcttgtctctggagttcacgttgagcgtgaattctaagagcctgcagcttcggcaggggcaggagcaaatatttcttctgaacaacgtgcacttcatcctcgtggaggccgagaaggacgcggagttggtactgatcctgggagaaagctggttcttgcggtgccaggaccaattcgaccagttcatagcgggctacctggacgtgtcttggacgccggttttgtcgtcgctggagaggaaaacccggttctcggtgatgctgtggcctcaccagctgttgtgcaagctcacttcagctttcgaggtgacttgcagcgcgcacaagaactggaaagtcgccgatcctctgttgcgggacaggttgcgcgaagcggtgtctcacaaggttctcccgttgttgtaccgaatgcaggtggagtgtggctccgagaagctgcacaagtccgcaacgtacagcgtagatcaaataaagtctcagctgctgaaattgttcgagggttgaagcaattattgtcagtggttaggttaagggaatttggatgcagatgcatgttcgtacgtaatattttgtctttcgggttttagtttaattcaaaagataggcttttacgtacatgaatagttaaactcgattaggttgcaaaatcacataaaacgggcatggactggacgtgcatatcacatcgctagctatacatacacatgaataaatctactgtactcgcctggt

SEQ ID NO: 111060 - DNA, 1163 bp, Zea Mays
agaactatgaattacagaattaagggcagtttggttcgtggctaactatgccacactttgtctaaggttagtcgttcgaattgaataactaatcttagacagaaaagtcaggcaaagtgtggcaagtgaggctgcgatccaagcccttagtctatagaaactgacgcgcttcgtgcgattccgctcttgttcgcggaaatcggcatcctcccggctaccccgggccgggaatcgaaaaggctgccgtgttctccacttctccgccttaccctgctctcctggacctccgacgcaccccaaacaccgcagagatgcagaaccctagcggccaccaccccgcgacggccgccccgacgtcggcgccgtccaagggcaagtcgtcggcgccgaaccctagcggcaaccacgctgcgacgccggcgccatcggggacgccttccaagggcaagtcggcggcagcgcaggccgcggctttgggccacggttcctcctcccaccaccactctgccggcggtggcggtggtggcgctgacgcgtccgccaccaccctcaagcgcaagcgcggcgtcttccagaaagacctgcaacacatgatgtatggctttggggatgatccaaatccacttccagaaaccgttgcacttgtggaagacattgttgtggaatatgtcactgacctggtgcacaaggcgcagaacgttgcctcaaagagggggaagctcctgacagaggattttctttatcttatacgcaaggatttacggaaactgcaccgtgctactgaactactgtccatgaatgaagagctcaagcaagcaaggaaagcttttgacgtggatgaagagacgctggctacgactaacatatgatgtcttcctagtcggagaatctgcgtgttactgtaaccagttgtacaatgcactgcatgtgtctgacaattgttggcgtcgacttgtaactgttccgctacagactttagctattttcttgacagttactgcgttaatgtctgtatgccctgctcagtgaagaagtccgctggttccacacattcgcaatgtaaaaatgcacaggttttttttttgcttgttttgaataggacaattcatgaaaattactggtggaggagatatttggaagtaaaattgccagacaatttacag

SEQ ID NO: 111061 - DNA, 349 bp, Zea Mays
cttatacgcaaggtgcattgtcagatcccccacccaacacacacacatttgattcccttgcttatttgcagtgcagctcacactttcgtctggtgttttaaggatttacggaaattgcaccatgctactgaactactgtccatgaatgaagagctcaagcaagcaaggaaagcttttgacgtggatgaagagacgctggctacgactaacatatgatgtcttcctagtcgtagaatctgcgtgttactgtaaccagttgtacaatgcactgcatgtgtcggacaattgtttggtgtcgacttgtaagttgtaactgttccgctacagactttatctattttcttgacag

SEQ ID NO: 111062 - DNA, 2131 bp, Zea Mays
aaaataacaatttttttcggtggaacgtgacattgggcaagtcctttccttcaccgctaccgaagtctacttccattcctctccttcctaaccccgcgtcgcccacgagctcgccgtgccggcagaggcgaggacctcgccgaagcagaggccatggggcgaccgcagccagccagggctggcgccatcaacatcgaggcgtgcgcgcggccgatcgccgtcgaccaccgtatcagtctcccgtactacttccgcatcgcgggcagcctcctccgacaggctaatatatatcggaacgagagtaacttgctcgacctgtatgtcatccttctgagatactcgagcttgctgtgcgagacgattccgaagcatcgtgattaccatgccttcaagttaagagaaaaggcattttttgataaacttattgatattatcaaagagcttgagacattgaagccagttgtgcagcggcaggttgttgagcataacagaggaagtactgtggaatttaatactaatagtctaaatggaaactacggtacaactcgtaggatagagcagtgtactccaagctcttatactccacagacatttgtaggcagcagtaatggagcattgcaaaaacccttccatgctgggagacaagtggcatcattatcaagtgtacagaaacaatttatgaatctaccatatccaaaagaagaaacactagctagacactccatattaggacctaatggtcttaatggccggtggaatgggcctgttactggaatcaaggttcaatatccaagcaattttgaattaacacaaaatggtataacaagtttagtgccatccatcttgaaccaagatgatttgcatggttccaacactgcacctgcacctccacctccaagtagctcctcaaatgacaatgacaatatgaaatctgttctctctcttgatgatggtcgatggtctgtaccagcagaagaacacactccacttccttctgctaatttggaagaggagttgttccaattgaatatcaaacaaccttctcctccaccagttcttgcagaggtacaaagaccaatttctccatcaagagttgccgatccaacaccaggacttccgacctcaggaactgcccgatttcagaacttgcatgttccgatcaagttgatggagtgttttctaagggttgctgagtcaaacaccaaaagaagcttagaaacctgtggggttcttgctggtaccctgaaaaatagaactttttatgtgacaaccttaattattccaaagcagaaatcgacatctgatacgtgtgaagctacaaatgaagaagaactatttgaagttcaggacacatactcattgttcactcttggttggattcatacacatccaacacagtcctgcttcctttcttccattgacgtccacaatcattattcttatcaggtcatgctacctgaagcaattgcaatagttatggcacctactgacacaagaaaacatggtatatttcatctcacggatccaggtggcatgggcgtgatccatgattgtcaagagagaggtttccatcctcacaaggcaccacttgatgggtcgccaatatatgagcagtgctcccatgtgtacatggacaccgatataaagttcgatatgattgatctgcgacaaagatgacgaagctcacctttgggtttattttgcaacctatacttctcgcagttaaatcaattgctgccttatttttttcttagctcaagatttgtgaattcttatgtacgctgttgtacatagctattgcgttgtatagggaaaaccattgaggtaataatatcattggtaatgcttcgttgtaattcattccttcaacctcgcaaggcacgtttgtgcggtaagatgaggaagtggtgtctggattttatgccatgccaaatatttgacttaaaagggcatcaaatatcacaaattgttaaaggtctcatttcttagactatcttcattagactatcttcagtagacttcttatcccactctttattttaaacttcactctgcaaatagtgtaatctacagtacaaattttgcacggccgtttatatgacctgctagagatggacttagagacttatga

SEQ ID NO: 111063 - DNA, 525 bp, Zea Mays
atggagcagcagcaggcgcccagctccttgcatcaagcaagcccggtgccagttccctctcccagccgagcttctccccttccagtagatgagcacgccgtcgctccctgttccagctcgccatcgccatggtcgtggactctcctcaggtgccgccgcggagacagaccgctggagctcggtggaggtccgctcgccgttgtctgcatccagcgccgaccctcgccttggctccttgctcggactctgtccgtgccagaacacgccaacatccaagccgcttcccccaacgtgcccgtcgaccttgacgatctatctttcaactgcacgctacttgcatcgggatccaaagctctctgtcatactcgatcttacaagtctccaactcgtcgacatcccttgcgtcgtcgaaaaatcctgagaatttggataaaacaacaaatcccgcgtggtgctcaccacgtgctcgacataatggcagaatcaaaaatcgtagctgtgctcgtggccttcaagacggattaa

SEQ ID NO: 111064 - DNA, 586 bp, Zea Mays
cactacgcgcagtgcacgtccttgctctctcactcctctagccacaggctccatggagcagcagcaggcgcccagctccttgcatcaagcaagcccgtttccagttacctctcccagccgagcttctccccttccagtagatgagcacgccgtctctccctgttccaacttgccatcgccatggtcgtggactctccgcaggtgccgccgcggagacagaccgctggagctcggtggaggtccgctcgccgttgtctgcatgcagcgccgaccctcgtcttggctccttgctcggactctgtccgtgccagaacacgccaacatccaagccgcttcccccaacgtgtttgtcgaccccgacgatctatctttcaactgcacgctacttgcgtcgagatccgaagctctctgtcatgctcgaccttacaagtctctaactcgttgacatcacttgcgtcgtcgaaaaatcctgaaagtttggataaagcaacaaatcccgcgtagtgctcaccacgtgctcgacataatggcagaatcagaaatcgtagttgtgctcgtgaccttcaagacggattaaattactggt

SEQ ID NO: 111065 - DNA, 2208 bp, Zea Mays
gagcggctggaggagggggatgagcagggaggggagcagccgtcgggggaggagaactcaccggcgggggagcaggaaggggagcagccggcgggggagtagccggaggccaaagacccagccatggcgatctcccagatctcacgcatattcctggccatccttctcctggccgccgccttcgccgccgccccagctgcgcttgcggacggcgacgacgtggtggcccttaccgaatccacgttcgagaaggaggtcggaaaggaccgcggcgccctcgtcgagttctacgccccctggtgtggtcactgcaagaagcttgctcctgagtatgaaagacttggtgcaagttttaagaaagctaaatctgtcttgattgctaaggttgattgtgatgagcacaagagtttgtgcagcaagtatggagtttccgggtatccaacaatccaatggttcccgaaaggatccttggagcccaaaaagtatgaaggacaacgcactgcagaagcccttgctgaatttctcaatactgaaggaggtgggaatttaacatgttctctgtaatactgtgaatctgttgctttaccaagcagcttcacttttttatattcaatgtgcttattgtatataagaatgtcacagactacatttcaagttttcacaaaaaaataacaaagttatgcattatcgcagtaatcatatttctccattaatcaatgtctaaattcattggattctggatttttcaggcacaaatgtaaagctggcaaccattccttcaagtgttgtggttctcaccccagagacctttgactcaattgtccttgatgaaaccaaagatgtccttgttgagttctatgccccatggtgtggtcactgcaagagtcttgcaccggttagtacatggttctcgtttgagttcttgacacattctattgtggttttactcttgtaagcacccttggcgatcttcatcatttctgatatgtctaatcataatctttattgtttcagacgtatgagaaggtggcttctgttttcaagttggatgaaggagttgttattgctaaccttgacgctgacaaacacagggatttggctgagaagtatgttctgtgtcttacattcacatatgctttatctgcatctgtttccctatttgtgttacctagcagctagcactggagcatgatcttgtttccctttgaatactagtcactagtatttgtttgcaacaaataacaccttattatttctgacttgttctatacgcaatatactgtacttatcacactacatcaggtatggagttagtggatttcctaccttgaagtttttcccaaagggaaacaaagctggtgaagattatgatggcgatagggacttggttgactttgtcaagttcattaacgagaagagtggtaccagccgtgacacaaagggtcaactaacctcagaggttggttatgtgtgcacaatactgcatttgtgaattcaggcaaaacactaactctgaatcaattattttattaggctggccgtatagcaagtctggatgtcctggctaaggagttccttggtgcttccggtgacaagcgaaaggaagtcctctccagtatggaggaggaggcagataagctcagtggttctgctgcaaggcatggaaaggtctatgtaaccatcgcaaagaagattctagagaaaggcaacgagtatactgagaaggaaaccaagaggcttgatcgcatcttggagaaggtgggaaacgcctacctcgcaagatgtctcatgaaacatcctcttttgggacaactcaccgtacagatttgattactcatatctctttttccctgttgcagtccatcagcccctccaaggccgacgagtttatcatcaagaagaacgttctttcgactttctcatcctaaggcatctgctagctccattttcacgtttcagatataggcgacaaaaactgcaggattataagtgtgataatgagagttaaatggtgctagaactaattttggggctttccctcgaggatatgtaatactcgtacgtcttgcgaattagttcttttccttgtgcttctggatttattccgtagcaccatagtttattttttggtttgacatggaggacattgtgactacagaactgagttttactatccaataacactgctcacttgatggggcttatgcg

SEQ ID NO: 111066 - DNA, 1586 bp, Zea Mays
gatttatttatatggagattatttctggtttatataaaaggacacaagtggggacgaagtagcagaagacttcccttcgtctgcttcccagagacccagccatggcgatctcccagatctcacgcatattcctggccatccttctcctggccgccgccttcgccgccgccccagctgcgcttgcggacggcgacgacgtggtggcccttaccgaatccacgttcgagaaggaggtcggaaaggaccgcggcgccctcgtcgagttctacgccccctggtgtggtcactgcaagaagcttgctcctgagtatgaaagacttggtgcaagttttaagaaagctaaatctgtcttgattgctaaggttgattgtgatgagcacaagagtttgtgcagcaagtatggagtttccgggtatccaacaatccaatggttcccgaaaggatccttggagcccaaaaagtatgaaggacaacgcactgcagaagcccttgctgaatttctcaatactgaaggaggcacaaatgtaaagctggcaaccattccttcaagtgttgtggttctcaccccagagacctttgactcaattgtccttgatgaaaccaaagatgtccttgttgagttctatgccccatggtgtggtcactgcaagagtcttgcaccgacgtatgagaaggtggcttctgttttcaagttggatgaaggagttgttattgctaaccttgacgctgacaaacacagggatttggctgagaagtatggagttagtggatttcctaccttgaagtttttcccaaagggaaacaaagctggtgaagattatgatggcgatagggacttggttgactttgtcaagttcattaacgagaagagtggtaccagccgtgacacaaagggtcaactaacctcagaggctggccgtatagcaagtctggatgtcctggctaaggagttccttggtgcttccggtgacaagcgaaaggaagtcctctccagtatggaggaggaggcagataagctcagtggttctgctgcaaggcatggaaaggtctatgtaaccatcgcaaagaagattctagagaaaggcaacgagtatactgagaaggaaaccaagaggcttgatcgcatcttggagaaggtgggaaacgcctacctcgcaagatgtctcatgaaacatcctcttttgggacaactcaccgtacagatttgattactcatatctctttttccctgttgcagtccatcagcccctccaaggccgacgagtttatcatcaagaagaacgttctttcgactttctcatcctaaggcatctgctagctccattttcacgtttcagatataggcgacaaaaactgcaggattataagtgtgataatgagagttaaatggtgctagaactaattttggggctttccctcgaggatatgtaatactcgtacgtcttgcgaattagttcttttccttgtgcttctggatttattccgtagcaccatagtttattttttggtttgacatggaggacattgtgactacagaactgagttttactatccaataacactgctcacttgatggggcttatgcg

SEQ ID NO: 111067 - DNA, 1513 bp, Zea Mays
gatttatttatatggagattatttctggtttatataaaaggacacaagtggggacgaagtagcagaagacttcccttcgtctgcttcccagagacccagccatggcgatctcccagatctcacgcatattcctggccatccttctcctggccgccgccttcgccgccgccccagctgcgcttgcggacggcgacgacgtggtggcccttaccgaatccacgttcgagaaggaggtcggaaaggaccgcggcgccctcgtcgagttctacgccccctggtgtggtcactgcaagaagcttgctcctgagtatgaaagacttggtgcaagttttaagaaagctaaatctgtcttgattgctaaggttgattgtgatgagcacaagagtttgtgcagcaagtatggagtttccgggtatccaacaatccaatggttcccgaaaggatccttggagcccaaaaagtatgaaggacaacgcactgcagaagcccttgctgaatttctcaatactgaaggaggcacaaatgtaaagctggcaaccattccttcaagtgttgtggttctcaccccagagacctttgactcaattgtccttgatgaaaccaaagatgtccttgttgagttctatgccccatggtgtggtcactgcaagagtcttgcaccgacgtatgagaaggtggcttctgttttcaagttggatgaaggagttgttattgctaaccttgacgctgacaaacacagggatttggctgagaagtatggagttagtggatttcctaccttgaagtttttcccaaagggaaacaaagctggtgaagattatgatggcgatagggacttggttgactttgtcaagttcattaacgagaagagtggtaccagccgtgacacaaagggtcaactaacctcagaggctggccgtatagcaagtctggatgtcctggctaaggagttccttggtgcttccggtgacaagcgaaaggaagtcctctccagtatggaggaggaggcagataagctcagtggttctgctgcaaggcatggaaaggtctatgtaaccatcgcaaagaagattctagagaaaggcaacgagtatactgagaaggaaaccaagaggcttgatcgcatcttggagaagtccatcagcccctccaaggccgacgagtttatcatcaagaagaacgttctttcgactttctcatcctaaggcatctgctagctccattttcacgtttcagatataggcgacaaaaactgcaggattataagtgtgataatgagagttaaatggtgctagaactaattttggggctttccctcgaggatatgtaatactcgtacgtcttgcgaattagttcttttccttgtgcttctggatttattccgtagcaccatagtttattttttggtttgacatggaggacattgtgactacagaactgagttttactatccaataacactgctcacttgatggggcttatgcgaacctgttctggtacgtgctttgggaat

SEQ ID NO: 111068 - DNA, 768 bp, Zea Mays
atgacgctggcataccttcctgcagggggtgtgtgtgtgctatgcgatgcgggagggggaggtggacggctttggagggaggcatcacgcattgtctccgtcggtggggtggggagcggcaggatgggatttccagtggggctgggcagcgggggctgcggctacgggggagggaatggggcgcgtgggcgggggcacggaggggctgagcagggggaaggcggggatgacgaggcggcggacaaaggtatcccgacggtgactcgcgcggccttccttccccgacttgcgcgacatcacagtgacggctggcggggcgcgcggagcgcagagctggcagcggatctcgcctttcggtttggtgggggcgcggaggtggcgggctaccggggaaggaagggcggcatcactgtgatggctggcggggtgcgcggagccaacgggggcaggctgccgcggaaggaagggatgccagggaagcgaatggtacaaacgcccttccattgtggcgacggtggtggtggggaggaacgccgcggttccgcgtgggggaggaccgcgttgaatgcggcggcggtggagaggagggtgggggatccacgcgcgttgattgacgaggatccgcgggcgttgattggtggcggcacggtgtcgaccgagcaattgctggcgctgatggcggggcgggtttggggcatgagcaagggcgcctgggggaggaggatcgcgggcagaaccgtggtgcactattgtggacgcctacaatag

SEQ ID NO: 111069 - DNA, 1179 bp, Zea Mays
gttgctttgcaggagagccttaccctcgaagccgaaggcctcgtgccttctcttcctccctggcatggaggaagtagctgtttcgcctatgatcgttgccgccgtagtgctggacaacaatggcgccgacgcggtctcctgcactgccatccctagcgtaacaataagcctagaggagaaagaaaatatcaatggggatgttcccacgatcacctcggccgcaagcaacgaggaggaggcgttgttcagtgtcggagaatccaccaaggacgatggccatcgcttgacgatggaatgcaccactcccgtctcctccagtagcccttccactcgcaagaagcgcggggcgttcagcctcttcagggcgatgttcctgtccttcggccggagcgacgacagcatgaagaagacagacgacgacaccacgagccccaagaagagagccatcgcggctgctgatgacgattgcaagcctgccgatgacgagtcaacgtcgtggaagcgcctcgtggacggtatgcgcccgctccgcctccgcgggcagctggagtactacccgccgccaccgccgccaccgccgctgggccacgccgatgtgtaccatgacgtgatcctcccgccgccgtcgcaggcacggttcggcttcgagatcaaggaggtgggcatgaccagccgctacgcgtccgctgaggatctgcaccagatggacagcgaccaggaagagggtgctgagggtggcgatgacggtgacagcagttgcccacacgccatcgacatgcaggcggaggagttcatcaccaagttctatgagcagttcaagtcagaatcgttcaacggccgtgcctccgagtgatccattgatccatccgcttgcggcatgtatgtaatcgttctgatcttaaccgaaattgcattcgtgtcagagacgactctacccaatatggatcaggaagaaatgtatcagtgatcgcatcgataaacacagtttgtctgaactctaaacttctctgtgacaccattctattcttcaacaaactaaactcccttcactaattttaggatgtactcgcatcaatctgttatattttctcagaaatattaggctgtgtacacctcacgatagagatgcacagggtggagtgtatattatattaaaaaggttctttgtctacacatgtg

SEQ ID NO: 111070 - DNA, 794 bp, Zea Mays
ggagagccttaccctcgaagccgaaggcctcgtgccttctcttcctccctggcatggaggaagtagctgtttcgcctatgatcgttgccgccgtagtgctggacaacaatggcgccgacgcggtctcctgcactgccatccctagcgtaacaataagcctagaggagaaagaaaatatcaatggggatgttcccacgatcacctcggccgcaagcaacgaggaggaggcgttgttcagtgtcggagaatccaccaaggacgatggccatcgcttgacgatggaatgcaccactcccgtctcctccagtagcccttccactcgcaagaagcgcggggcgttcagcctcttcagggcgatgttcctgtccttcggccggagcgacgacagcatgaagaagacagacgacgacaccacgagccccaagaagagagccatcgcggctgctgatgacgattgcaagcctgccgatgacgagtcaacgtcgtggaagcgcctcgtggacggcacggttcggcttcgagatcaaggaggtgggcatgaccagccgctacgcgtccgctgaggatctgcaccagatggacagcgaccaggaagagggtgctgagggtggcgatgacggtgacagcagttgcccacacgccatcgacatgcaggcggaggagttcatcaccaagttctatgagcagttcaagtcagaatcgttcaacggccgtgcctccgagtgatccattgatccatccgcttgcggcatgtatgtaatcgttctgatcttaaccgaaattgcattcgtgtc

SEQ ID NO: 111071 - DNA, 480 bp, Zea Mays
cagtttctcttttcaataatcaagatgagccgtggttgtagtgccagtggtggtcaaagttctctgggttatctctttggaagcggtgagccccccaaaccagtagtggcaccagctgcaagtgctccacctgttgagaaaccatctgctgcaaagactgatgcgaccaagcaggttgctgctggggttaccagccaaaccaataactaccacagggctgatggtcagaacactggcaacttccttacgctgagtacaacttctttacgaccaagtgaagatttggaaactaagaagacatcaattgctgtcatcatagtagttagtgttcttgcttcagtccttgtcgtcacttccttgttcgagggctttaagtactggcagaagaagaagagggagcgagaccaggcgcggttcctcaagctctttgaagagggagatgaccttgaagatgagctgggccttagtaatgaattctaa

SEQ ID NO: 111072 - DNA, 1108 bp, Zea Mays
tccatttctatcccccacacacaaatacacatcccccttcccttccccgcaactactctgtgctctctactacacgcttctatctaagagaacagaccagaccacgcacgccggcagagaaaaaccagaattctccaagcaatcctatcgccaacccggccacggatcggggctgccgtctgttgccgccggcgctggcgccgacgccgatgggctccgccgatcgcagtaagatcgacgggatcgtggtgccggagaaaggcgccaggagctgcgtcgaatgccgcgccaccaccacgcccatgtggcgcagcggccccaccgggcccaggtcactttgcaacgcttgcgggattcggtaccgaaagaagaggaggcaagagcttggcctagagcacaacaagcagcagcagcaacaacaaaataatggcgaggcgaagactggagtaaaagacagctctagcaacagcagtagcgggagcagcaactttcacgtggtgcagaaacggaggctcctaatggaagtggaggaggctgctctgctgctgatgaccctatcttcttcgcccgcatccacattgctacatggctaggaaccctgcaacaccaaatcaacgatgtacatacacacacaggcttccccaccccacaccttgcacagtcaccatccaacgattccagtccaaatcgtacatgtttctcacaccagtctgagatagggaaggagggggcctatctcgggattgtgtgatcttctgataggggtggatgattagtgccaacctaatcactccattgatcgtcttcttctctgtttccgtcctacctgtagaccttgatgtatctgctatgtgagttgtggtaggctccataacaagaggtcctgttgatctcacttccccacacatctttttctctgtccttttctctctctttttttatgttctccctctttcggttttgtatgtactttgatgttgcccctttgtgagggatggatgatcaaaaggagacgccatcctttctcattctggaataatcaaggatgtgagctctttcatttcagtaagttcgtgttgctgtgtcatgaacaagaaaaaatgcagtt

SEQ ID NO: 111073 - DNA, 360 bp, Zea Mays
atggtggagacagaggccagtgcagatgatgatgacatggatgcagaccatgacgatggtgtgcctctccgattccgcagcctggacgacctctatgggccagcgtcatcacagggcgtcgcaccgcaagtagttcctttccatgtaatagtctatataaaccaagagatatcaatgaaaaagcagtcactcgacagcaccaaaaacaagatcgtgtccactgtgtttcgcgaatacggggctacctgcagcatggtaattgtgtccccgattacgaagttgtcgtgccgcatagctaaatttagatttaacgacataggttatgcgagaaggattaaatcggtgtttcgtatccgataa

SEQ ID NO: 111074 - DNA, 1403 bp, Zea Mays
aggaagcagcatatccattcccccaaattcccacacaagaacaacccaaggaggagggtcctcccctccaagattcaagcttctctcttggtttcctccgcagttgcgattctgcggagcgctgaatactacggtaatggattccaagaagatgtatgtttgctccctgcctttgatgccatacgtcgtcttcggattcgtcggctcccaactgccgtcagctcccaactggcagtcctataaagtggatgatccgaatgcgccgagaatgattcttctcgttattttgtacatctacgtcatcttgctggctaaaattaagaacgacaggatctacatcgagacggcaactgccgtggtgatatcttacgtgtcgctacttcaaatcagctggagctacatctggctcgttcccttccccattgtcgcgatcggcttcatcgttgctctgtgcaaggagctcagtcacgaggacgaggccggtggatcacattcacaggagcagagcaatgaaggtgaaggcgaagctactacgtcttcatgggaaaaggtagaggggctggcggcagtaacggtggtgccgtactgggcgcttctcatcatgggcctcttccatcctgacaagttcgccgtctcccagttcctcctcttcttcagtttcatgctgggggcactgaccatgatgatgactcggctggtggagacggggcgggccattgcccaccgcggcatcgtgccggcgtccgagctgctttggaaagcctcgctcgtggtgctgctggtggcggtgcacgcagtggcggcagagctgctgggagagaacgcgttactcctgtgcatgccggaaatcctgccggtgctgctgtggctcagcgttcgccttgacactgctgacgacaggatcaagctggtcctggacagtaatctgctccccgcagcactacctgcagtcctcgccatgctagcgaagggcgagcccctgctctactggtgcagaaaggcgttggtgtcttgtgttgtttcggcgcttcttaccttctacgtttatttcatgctgtgccagtggccgggaggacaacgcgatcgcacgctcacaggttcctctttgcagcacgcgctcatccatctcaagtcttgggcaaaggttttgctcaaagcggtggctgtgctgctaatatttgtatgcattctttccaactagttctactgcaagaaccggtggtctcatcatcagccgaccaaatcttcgatgtgtagcatgtacgttaaatgaatccattcaacatctgttcttcgactgccatattgctaaatgtgtttggcgttgtattcaagttgcgtttaacatttcacctcctaggagcattgatcatttatttacacagtggctttatggggttgat

SEQ ID NO: 111075 - DNA, 1590 bp, Zea Mays
aggaagcagcatatccattcccccaaattcccacacaagaacaacccaaggaggagggtcctcccctccaagattcaagcttctctcttggtttcctccgcagttgcgattctgcggagcgctgaatactacggtaatggattccaagaagatgtatgtttgctccctgcctttgatgccatacgtcgtcttcggattcgtcggctcccaactgccgtcagctcccaactggcagtcctataaagtggatgatccgaatgcgccgagaatgattcttctcgttattttgtacatctacgtcatcttgctggctaaaattaagaacgacaggatctacatcgagacggcaactgccgtggtgatatcttacgtgtcgctacttcaaatcagctggagctacatctggctcgttcccttccccattgtcgcgatcggcttcatcgttgctctgtgcaaggagctcagtcacgaggacgaggccggtggatcacattcacaggagcagagcaatgaaggtgaaggcgaagctactacgtcttcatgggaaaagttcctcctcttcttcagtttcatgctgggggcactgaccatgatgatgactcggctggtggagacggggcgggccattgcccaccgcggcatcgtgccggcgtccgagctgctttggaaagcctcgctcgtggtgctgctggtggcggtgcacgcagtggcggcagagctgctgggagagaacgcgttactcctgtgcatgccggaaatcctgccggtgctgctgtggctcagcgttcgccttgacactgctgacgacaggatcaagctggtcctggacagtaatctgctccccgcagcactacctgcagtcctcgccatgctagcgaagggcgagcccctgctctactggtgcagaaaggcgttggtgtcttgtgttgtttcggcgcttcttaccttctacgtttatttcatgctgtgccagtggccgggaggacaacgcgatcgcacgctcacaggttcctctttgcagcacgcgctcatccatctcaagtcttgggcaaaggttttgctcaaagcggtggctgtgctgctaatatttgtatgcattctttccaactagttctactgcaagaaccggtggtctcatcatcagccgaccaaatcttcgatgtgtagcatgtacttttcaggggcacatactggatgagacaatggatgctgctgctaaaggaagaagaaaaattacaagtaaagcagggatgcaggctgcttgaagttgcaatgatgcaaatctttgctaaaaatggttggaactttagtaatcgattgtgcttgtaatctgtaatgttatggtggcatctatgtttcgagtatggttttgttcctgtttgaacccagtatttttgatgtattggacagctatatgcccaatatttttgatgtattggacagctatatgcatattgtcatgcagaggttggaataatcaagttattcccttttctaaaaaatatgtaaaaaagatcctccagttcataatttgactgcgaaatgaatattttcataatctgttcccctgttagacatatggtttatccc

SEQ ID NO: 111076 - DNA, 1576 bp, Zea Mays
aggaagcagcatatccattcccccaaattcccacacaagaacaacccaaggaggagggtcctcccctccaagattcaagcttctctcttggtttcctccgcagttgcgattctgcggagcgctgaatactacggtaatggattccaagaagatgtatgtttgctccctgcctttgatgccatacgtcgtcttcggattcgtcggctcccaactgccgtcagctcccaactggcagtcctataaagtggatgatccgaatgcgccgagaatgattcttctcgttattttgtacatctacgtcatcttgctggctaaaattaagaacgacaggatctacatcgagacggcaactgccgtggtgatatcttacgtgtcgctacttcaaatcagctggagctacatctggctcgttcccttccccattgtcgcgatcggcttcatcgttgctctgtgcaaggagctcagtcacgaggacgaggccggtggatcacattcacaggagcagagcaatgaaggtgaaggcgaagctactacgtcttcatgggaaaaggtagaggggctggcggcagtaacggtggtgccgtactgggcgcttctcatcatgggcctcttccatcctgacaagttcgccgtctcccagttcctcctcttcttcagtttcatgctgggggcactgaccatgatgatgactcggctggtggagacggggcgggccattgcccaccgcggcatcgtgccggcgtccgagctgctttggaaagcctcgctcgtggtgctgctggtggcggtgcacgcagtggcggcagagctgctgggagagaacgcgttactcctgtgcatgccggaaatcctgccggtgctgctgtggctcagcgttcgccttgacactgctgacgacaggatcaagctggtcctggacagtaatctgctccccgcagcactacctgcagtcctcgccatgctagcgaagggcgagcccctgctctactggtgcagaaaggcgttggtgtcttgtgttgtttcggcgcttcttaccttctacgtttatttcatgctgtgccagtggccgggaggacaacgcgatcgcacgctcacagttctactgcaagaaccggtggtctcatcatcagccgaccaaatcttcgatgtgtagcatgtacttttcaggggcacatactggatgagacaatggatgctgctgctaaaggaagaagaaaaattacaagtaaagcagggatgcaggctgcttgaagttgcaatgatgcaaatctttgctaaaaatggttggaactttagtaatcgattgtgcttgtaatctgtaatgttatggtggcatctatgtttcgagtatggttttgttcctgtttgaacccagtatttttgatgtattggacagctatatgcccaatatttttgatgtattggacagctatatgcatattgtcatgcagaggttggaataatcaagttattcccttttctaaaaaatatgtaaaaaagatcctccagttcataatttgactgcgaaatgaatattttcataatctgttcccctgttagacatatggtttatccc

SEQ ID NO: 111077 - DNA, 1449 bp, Zea Mays
caagcttctctcttggtttcctccgcagttgcgattctgcggagcgctgaatactacggtaatggattccaagaagatgtatgtttgctccctgcctttgatgccatacgtcgtcttcggattcgtcggctcccaactgccgtcagctcccaactggcagtcctataaagtggatgatccgaatgcgccgagaatgattcttctcgttattttgtacatctacgtcatcttgctggctaaaattaagaacgacaggatctacatcgagacggcaactgccgtggtgatatcttacgtgtcgctacttcaaatcagctggagctacatctggctcgttcccttccccattgtcgcgatcggcttcatcgttgctctgtgcaaggagctcagtcacgaggacgaggccggtggatcacattcacaggagcagagcaatgaaggtgaaggcgaagctactacgtcttcatgggaaaaggtagaggggctggcggcagtaacggtggtgccgtactgggcgcttctcatcatgggcctcttccatcctgacaagttcgccgtctcccagttcctcctcttcttcagtttcatgctgggggcactgaccatgatgatgactcggctggtggagacggggcgggccattgcccaccgcggcatcgtgccggcgtccgagctgctttggaaagcctcgctcgtggtgctgctggtggcggtgcacgcagtggcggcagagctgctgggagagaacgcgttactcctgtgcatgccggaaatcctgccggtgctgctgtggctcagcgttcgccttgacactgctgacgacaggatcaagctggtcctggacagtaatctgctccccgcagcactacctgcagtcctcgccatgctagcgaagggcgagcccctgctctactggtgcagaaaggcgttggtgtcttgtgttgtttcggcgcttcttaccttctacgtttatttcatgctgtgccagtggccgggaggacaacgcgatcgcacgctcacaggttcctctttgcagcacgcgctcatccatctcaagtcttgggcaaaggttttgctcaaagcggtggctgtgctgctaatatttgtatgcattctttccaactagttctactgcaagaaccggtggtctcatcatcagccgaccaaatcttcgatgtgtagcatgtacttttcaggggcacatactggatgagacaatggatgctgctgctaaaggaagaagaaaaattacaagtaaagcagggatgcaggctgcttgaagttgcaatgatgcaaatctttgctaaaaatggttggaactttagtaatcgattgtgcttgtaatctgtaatgttatggtggcatctatgtttcgagtatggttttgttcctgtttgaacccagtatttttgatgtattggacagctatatgcccaatatttttgatgt

SEQ ID NO: 111078 - DNA, 2355 bp, Zea Mays
caggagagctactccgcatactgcacgtcgaggtttggacgcctcatcaaccgtccatcaatttttgatatggagaatgaagagtatgctgaggatctttgtcgagatgtctgggctactcatttcccatccgagccatttgaccttgactcgaatgagattggtggaaacagtgttgataatataacatgtgacaatgtcaatggtgaaattgtcaaaatggtgagacagtacgctggcctagcagaccgttttgcctcactctttgtgcaggaaggtgtctaccatgttgctgctaggcggcgatatgtgcgtttcctggaccttatgaagaaggttgcgtgtgcaacccaagagtgcacacggcttgtgcctagcctagacatattactgatgtggcttgctcaccagagttttcctgtgtgttatgccacggatatggtagcgatgggcatcagtgacaatgttgcaaaagtgggtgtttgttatggcgaagtggtgagcaatgaggcggtaaggaggacaaaggaactgtgggaggatgcatatgatgaaccatatgatatggctggatcagaggttgatgtgggagcagttagcacagcaagggaggcattttactgggtgccagcagcatcagaggaggatgccaaccggctatacaagagtttgcagccaagattccttattgaggtatatgtgttcttgaagggagaatttgataaggagcccaccagcaaggagttcctacgattgcgaacacagaggtgtcacagatcactaaagctcaacatatcgatgtccaatttatcctgcaaaagctggcagaaagtatggcacttgtattgtgaatttgcaactcggggcctcttcattgagttcaggcgcacccttagtgggtgcttcaggaaaagcaagttcctcaagaacatctcattctcatggagcgatgtgttgcatgagaaagcacttgctctcacagaagaacttgatgtcaggatgagagcgatggcatcaattacccctccagttcaagcaccatacttgttgaagtgtgtgcctgatcgagtaactgatgatggtggggccatgatttctgatgtcatattgcgcatgagaaattaccgtccccaagaaggacgttggctgacacgcactgtacttgatcacagtgggagagaatgttttgtcatccggatgagagtaggcagagggatttggcggagaggtgctgaaactcccatggcagtgaaatgggaggataggagcattgaggttcgagaaggatcatggtcatacattgccagtacaagctctgttggttatgctcctgaaaagatagtgggcacaggaacagtgatgaaagatcatcaggagaataaggtagtttggagcttatcaacaggagatacgctgacaatacgtttgggagatgaactcagctttcagttaaaaaatgacagctcagaagaggaggcaaggctgcttgtcgggaggaggttgagctacagagtaaacacagataatgcgtcgagcaacctagtcgaggaggagcaatacctgacacttgttcgtaagtcaccgtatcatcatggtgacagagcaaccgtgcttctaaactggaaattacttgctgtggagttcttacctgaagaggatgcagtttttgttcttctcctatgcatggtgattgcacggaccatgacagagatcaggagagaagatgtggctgggcttttagtgcggcggaggataagtgaagcaagggccgggcagagagactggggttcggtgatgcttcctggctcgctttcaccggatcctcatctgcagccttggtaccggaacgcaacgcaggttttgagctctgcggagacaggaccagtgctcacaaagtactcacctgctgacgggaaggacatgttgtacaggcaagctcttataccctgatgaagccctaatagagattattaccataccatcaggacttgcctgatagataaaaaaaacgaacccaatcttcctgggtatcgcagggaaattatttcatttcctcaatgctatgacatacgacatttgtacatgacaattttttgtggttcgagctgttgtttcactaatgatgattgtcctttgatacgaatccaatgattgctgtcatatattgtttgtactgagaattttacacatttcatttcaagtttgtctggtttctgtagtttgacaatgaactaaaagaagagcttatgtccatttgaacaaactgattatagaggataaaggattcagaatctgatatccgaagagtctgaatgttcatctcgtgcatatttcttcaggaaaaaaaaaatagaa

SEQ ID NO: 111079 - DNA, 2350 bp, Zea Mays
caggagagctactccgcatactgcacgtcgaggtttggacgcctcatcaaccgtccatcaatttttgatatggagaatgaagagtatgctgaggatctttgtcgagatgtctgggctactcatttcccatccgagccatttgaccttgactcgaatgagattggtggaaacagtgttgataatataacatgtgacaatgtcaatggtgaaattgtcaaaatggtgagacagtacgctggcctagcagaccgttttgcctcactctttgtgcaggaaggtgtctaccatgttgctgctaggcggcgatatgtgcgtttcctggaccttatgaagaaggttgcgtgtgcaacccaagagtgcacacggcttgtgcctagcctagacatattactgatgtggcttgctcaccagagttttcctgtgtgttatgccacggatatggtagcgatgggcatcagtgacaatgttgcaaaagtgggtgtttgttatggcgaagtggtgagcaatgaggcggtaaggaggacaaaggaactgtgggaggatgcatatgatgaaccatatgatatggctggatcagaggttgatgtgggagcagttagcacagcaagggaggcattttactgggtgccagcagcatcagaggaggatgccaaccggctatacaagagtttgcagccaagattccttattgaggtatatgtgttcttgaagggagaatttgataaggagcccaccagcaaggagttcctacgattgcgaacacagaggtgtcacagatcactaaagctcaacatatcgatgtccaatttatcctgcaaaagctggcagaaagtatggcacttgtattgtgaatttgcaactcggggcctcttcattgagttcaggcgcacccttagtgggtgcttcaggaaaagcaagttcctcaagaacatctcattctcatggagcgatgtgttgcatgagaaagcacttgctctcacagaagaacttgatgtcaggatgagagcgatggcatcaattacccctccagttcaagcaccatacttgttgaagtgtgtgcctgatcgagtaactgatgatggtggggccatgatttctgatgtcatattgcgcatgagaaattaccgtccccaagaaggacgttggctgacacgcactgtacttgatcacagtgggagagaatgttttgtcatccggatgaggcagagggatttggcggagaggtgctgaaactcccatggcagtgaaatgggaggataggagcattgaggttcgagaaggatcatggtcatacattgccagtacaagctctgttggttatgctcctgaaaagatagtgggcacaggaacagtgatgaaagatcatcaggagaataaggtagtttggagcttatcaacaggagatacgctgacaatacgtttgggagatgaactcagctttcagttaaaaaatgacagctcagaagaggaggcaaggctgcttgtcgggaggaggttgagctacagagtaaacacagataatgcgtcgagcaacctagtcgaggaggagcaatacctgacacttgttcgtaagtcaccgtatcatcatggtgacagagcaaccgtgcttctaaactggaaattacttgctgtggagttcttacctgaagaggatgcagtttttgttcttctcctatgcatggtgattgcacggaccatgacagagatcaggagagaagatgtggctgggcttttagtgcggcggaggataagtgaagcaagggccgggcagagagactggggttcggtgatgcttcctggctcgctttcaccggatcctcatctgcagccttggtaccggaacgcaacgcaggttttgagctctgcggagacaggaccagtgctcacaaagtactcacctgctgacgggaaggacatgttgtacaggcaagctcttataccctgatgaagccctaatagagattattaccataccatcaggacttgcctgatagataaaaaaaacgaacccaatcttcctgggtatcgcagggaaattatttcatttcctcaatgctatgacatacgacatttgtacatgacaattttttgtggttcgagctgttgtttcactaatgatgattgtcctttgatacgaatccaatgattgctgtcatatattgtttgtactgagaattttacacatttcatttcaagtttgtctggtttctgtagtttgacaatgaactaaaagaagagcttatgtccatttgaacaaactgattatagaggataaaggattcagaatctgatatccgaagagtctgaatgttcatctcgtgcatatttcttcaggaaaaaaaaaatagaa

SEQ ID NO: 111080 - DNA, 1656 bp, Zea Mays
tatggattgtacttcctccaccctgaaaaaaatgcaattctacttctatttttagtcaaactattcttagcaacagtgatattttttacacaaataggtatattatggaaacatattccatgatgaatctaacaatgcttatctgatattataaatattaatatactttttgtataaacttggtcaaactctatatggtttgactccgtactatgttataattagaattaaattgttttcatgggggagtaataaacaaagaaccattattggtgctcacagctgaaagaactggcagcacaagaatcttgatttctatagtaaacaagtttttctatgcaatatacaaatgagtgcatgctgtagagttcatcattttccttttcaaaaatgtaacaccgcattggcaacctctgaagagaagattgaagacatatggtaactgtattatcacaaacttaatttgcaccattatgtttgttgtttaactttgttcttaaaaaggtagtattctagaatttcatatagacacattccttagcaacgaggtccgctgattaaactgtagaatagcctttgtattggtccctaagtttcagtttcatatgattttcatgtgtcatttaaatgtaattgaaacattctgttctattaaaatgtaaaatataagttggtttactacactgttgatatatgacttcattttttgtcactgttctaaaaatatacaaagccatttcatgccttttagatgcactgcgatgtactatttaccaggcaaggctgcttgtcgggaggaggttgagctacagagtaaacacagataatgcgtcgagcaacctagtcgaggaggagcaatacctgacacttgttcgtaagtcaccgtatcatcatggtgacagagcaaccgtgcttctaaactggaaattacttgctgtggagttcttacctgaagaggatgcagtttttgttcttctcctatgcatggtgattgcacggaccatgacagagatcaggagagaagatgtggctgggcttttagtgcggcggaggataagtgaagcaagggccgggcagagagactggggttcggtgatgcttcctggctcgctttcaccggatcctcatctgcagccttggtaccggaacgcaacgcaggttttgagctctgcggagacaggaccagtgctcacaaagtactcacctgctgacgggaaggacatgttgtacaggcaagctcttataccctgatgaagccctaatagagattattaccataccatcaggacttgcctgatagataaaaaaaacgaacccaatcttcctgggtatcgcagggaaattatttcatttcctcaatgctatgacatacgacatttgtacatgacaattttttgtggttcgagctgttgtttcactaatgatgattgtcctttgatacgaatccaatgattgctgtcatatattgtttgtactgagaattttacacatttcatttcaagtttgtctggtttctgtagtttgacaatgaactaaaagaagagcttatgtccatttgaacaaactgattatagaggataaaggattcagaatctgatatccgaagagtctgaatgttcatctcgtgcatatttcttcaggaaaaaaaaaatagaa

SEQ ID NO: 111081 - DNA, 621 bp, Zea Mays
ttcttcaccaacaagcttgatcccctgccctgccctcggcatttgctcaacctccgaaacaatccagtccacaaagaaggggggttcgcctcatgttatcgttgtcgagccagatcccccgacgtagcagcttcaacttcacgttgtaaaacccctccttcacccgcataccaaatgtcgagaagcgaaagcatcaactgaaggtgacgtcgtgaccgagacgaacttcaatagtgacgccttcaggaaaggagtgacatctgggacaccatcgtcgcttgtccaagatggactgggctttcacctatggaagacaacgctggggaatgcgacaccctcaacagaggaagcggcgcccatgggcgttaccttcgccgaggctttcacccaagatgttccctagcacatcaccaggccaggaccccgggtcaaagcatgtagactccattgtcgccaccgccttgacatcccgcacaaacccttccaaaggggcatcgacgtgccaattgccgcagtaggcgcaaagctgtgttgaccaccaccccctacagctaggtacacggaaccaggaaacaccttgtcgcgtgcatcatgacgccgcgcgcccgagccgatgccggc

SEQ ID NO: 111082 - DNA, 586 bp, Zea Mays
caacgcaccggcaagcatcagcggatcatcatcaagcagatcgaacgaaccccaagacacaaccggccgtcgactagcgcatctccaacgactgaaacaatggcgcaccacttcctgggcaacaagcaccatggaggagaggcggccaaggtgaccgactggcgcaaggaggagaagcaccacaagcacatggagcagctcggccagctcggcgccgtcgctgcaggagcctacgctatgcacgagaagcagaaggcgaagaaggacccggagcacgcgcactcgcacaagatcaaggaaggggtcgccgccgccgccgccgtgggcagcgccggctttgccttccacgagcatcaccagaagaaagacgccaagaagcaccgccaccgtggacaccatcaccactagttactgacggcttccattctcatttgttaccgggcgcgcctggcagtcttgctcatatatatgcaccgaccgtcgatttatctaccagttttagtatacaaataaatggggtctctcgaatatgtatgtatatatcatcgtaacgtcctagtatatattattactgtgtgtcacgtac

SEQ ID NO: 111083 - DNA, 117 bp, Zea Mays
atggcgtcgaagcttgaagggaggggtgcaagctcgttgggcgcgccgacaacccacgagatgtccgatggctcagatctaggggtcgccaaccatgggaagggcctggcagcgtga

SEQ ID NO: 111084 - DNA, 1122 bp, Zea Mays
catttttccctagccgccaccagcagctcttctctgtttcctggacgtgcgcagggagctgagctccttctcccatggcgcctccacacttccagccgccctcctctgcccagcagccgagcgcccagctcctcccctcggcagccatggcgtcctccccttcctcccgccctctgctgtccacggcgagctacagcagggagccgagctccaagctcccacggcgctcgagctccactcctccctgttcgtcttcaacccaagtcggcgccctctcgctggctgtcctctccgtcgcgcccctactggccgtgcccctcacgctggcacacaggcgcccaggcaagcttccccatggcgctcgactccctgttccatggagccctgtggtcgcccccttcttccccttgtggctgcgctcctctgctccctccatggcgccccctgctccttcctcgacgcgctgtaggtgctcgacaaatgcgcagctccatttctcccatggccgtggcctgcttttcccggccccctgcgcagcatctccctcccccaagtccctgcgcgcgcacagcagcagatcgccccaccttccctcgctgcgcagcccctcggcgaaacgccgctgttcctgcagccccgacaccttccctggcttcctcactgctagcgctgcgcgcgtgccacatgttcggcgatctgtccaagtggggtgttgagcagtgagcagcaagccgtcaacgcccgccgtgtgctcgctgttttgcgcagcccatccgcgacgccgtcgaaaaaccgtgctagccgtcaatcgccattcgtcgcgcacgcgcgttcaatacaagaccggtcgggtgaaccacgtgcttgcataactcaaatccgatcccgctcaggttgattgatttatagtttaccatacgtatgatttggttgatgtcatgcagtgcacgtatatgtatggatatgtgtaaaatgttttggttatacgcattagtaggttcgcatttgcggttggagaacaagaagttgtttgctgtgtgcgatttgtagtttgtctaaatacgttttggtcgatgtggtgtgtattggtgtttgaatatatgtggctgcgatgattcgttt

SEQ ID NO: 111085 - DNA, 1797 bp, Zea Mays
atttgtgctatgaacagtacacggtcgtaacttagtccacaattaaatagcaaacttcataattagtattaatacgttagtattcatacgttggaattttatgcattttaaaaattacaaattcgcattcttctagtacacgacacgagtggcttgcaccacacaactggcttctacagcaagccacgacctcctggcttccttgacacaccgaaggcatctataaataaggtccccctgtgggcatgctccactcatctagacattcatctcttctctaccatccgccatttcatcaaaagtatgtagtacgtactcttagttcagctcgtcatggactcattcaaaagcctagtgttgtcttcgtcatccgatgattctgacgatgagatcgataacttcttggtttgtcaacatgttgaccaccttggagtaggagccacgagcacgcgtcgtaggcgctcttcattgcctcgccgagttatccaaagggaccacgctactggagaaaatctcatcaagcaccactacttcggacctaatccagtgtatccaccacatgtttttcgtcgaaggtttcggatgcatcgtcctttattcctacgtatccttcgtgccgttcagcaagaagacgactatttcactattcgatgtgatgcaacaggtttagctgggctcggtccattgcaaaaagtatgtgctgctttgcgtatccttgtgtacgggttaccaaccgatgcggtcgatgagtacatacagattggccagactacggctagggactgtcttatccgtttctgtcgcgcaatcatctcttcctttagcgaacgctacctccgtatccctaaccacgaagatattgctcgcatactaagtgtaaacgctgaaagggggtttccgggaatgctaggctccatcgattgtatgcattgggaatggcgcaactgtcctactgcatggcagggacagttttgtgggcgcaattcgaggccaacaatgatactagaggcagtcgctgggtatgacctctggatttggcatgcctttttcggaatgcgtggtactaacaatgatatgaacgtccttcatcgttcaccagtgtttgatccgttacgtaatgggactatggcaccattgaacttcactattaacggtacaacgtataatttcggatactacttagcggatggcatttatccaaattggccaacctttgtcaaagcaattcgtcacccatttgatgagaaaaggttcactttacaaccaagcaggaaagttgtcgaaaggatatagagcgagcatttggagtattgcaggcgaggtgggcagttcttcgtggcccagcttatggttgggatcgtactcacctcgctgagatgatgactgcttgcattattatgcataacatgattgtcgaagacgaaggagatggtgcagcaaacgtggatttcattgggcccactggccccctagaagtttgtaataatattcccgaggtacgcaacgagtggctacacaatcatatccggtctgaattaccaaacgatcccgatcaggacatcactagtcagtcgacatatttgtcgttgcaacacaacctcatagaacacctgtgggcacgtcgagggtcaatgggttgaagcccttttctgcaaactatgatggccgcatgttctgtgttccatgtctgtagcttatcatgtcatgaatctgttacaaataaagtgcacatgtgctctgcttggtctcttgtatgaatgaacctgattgtcaaatataatattatgaagttatgaa

SEQ ID NO: 111086 - DNA, 83 bp, Zea Mays
caaaaatgtagaatgtttcaaaaaataatggtaactgttatggacattataaaagtatcttttagagagttatcatcaaatag

SEQ ID NO: 111087 - DNA, 128 bp, Zea Mays
ggtgcttagatggaaactaaaatattttatgcatttattataacactgaccgaatgttatttagtctacaataacatatccactggatacccgatacccggtggatacccgatgggcacgggtacagg

SEQ ID NO: 111088 - DNA, 281 bp, Zea Mays
aagttgagggaaccgaccgccgtgggatgtcgaggtgctctggtcgagagaagtggggggtcggagatgtgagcagagatccgccgtgcgctagaaccggtcacgccgtcgtcaaaccctcggtaatcagctcatggcgttcgctggagggtgttgtgggtgatggtgccctcaccgtgcggttttgctgcctgggatgcagggaatttctccccggaatcaagccgccaccgcagtaccgcgcgtggccatggtcagaattcagtgttgtgccgtagctg

SEQ ID NO: 111089 - DNA, 540 bp, Zea Mays
cgagcgtgaggagcgctgctactgctgctgcttggagagtaggcgagcgcaagacgaggctgtgcagcgagtagcgaggacatagggcaccaccatggcgctgtccacgacacaatgctcacccgggcattttgtcgaacagccgatgggcaccacggagaacagcgaggagggttcactgttgtgcgcaaggaagggcgccatggagaaagatgaggctagcattggcttgagggtgagcctgtcggcgatgcagtgggcggagggggcgctggacggtgcccaaaacagagatgaacagagggaggagtcggtagaggagggcgtagggaactagtgaccatggacggggaaaagaccacaccatggggggggggtgttcaccggcgcgagctcagaccagagggggccctgcgccgaccaagggagagtggaggtcggccatggccacactcaaggtgcgcagggcactgagaggagtagccatggccatggaggcccttgctgctagaggtgcaagaaagggggggctgagctaat

SEQ ID NO: 111090 - DNA, 348 bp, Zea Mays
atggagaaagatgaggctagcattggcttgaggggggcatggccagaggcgaaagtgtgtcgagttggggaggctgggcgcttcggaagacgaagatcccatggccgacttggagctggtggttgcagagagaggggagctcgtagggtcgagctgctgggagatgggagcggctgctccctgctcttggggaagaagggcgccgtcgagggaggtgaagccaaggggggaggggtcgagcgcccatggtggccctgctcctgcgctgaaccagagaggaggaagacgctaggagatgcttctgcgctaaggaacaaagggaggaggaagaactacgctggctgctga

SEQ ID NO: 111091 - DNA, 222 bp, Zea Mays
cccaagagggatcgagcctcgcaccgggggcgggccggacccagctggacgtggaggcggcagctctggatggtcatccttgcggatctcctcctcctcacaatcctcttcgccgcctggctcgcagtctgccggggattcagctgcattggtcggtaaatagctacacaacctctaaggtacgtacgtaaatcactaaatcaaatccatggcctttcttcc

SEQ ID NO: 111092 - DNA, 98 bp, Zea Mays
ttttttttcctttctatttcatgctcaccgagatttccgtcctattgaatgcgccgccaccgcccatgtggccagtctgggaatcggggtgaatcaat

SEQ ID NO: 111093 - DNA, 303 bp, Zea Mays
atggcctccttcaccttgttcctgtgcgcacggaggaacttgagcggtatcatgtccgtgcgctcgtcgtcgcccaccagcgacacgcctaaatcagcgctggtggccgcctcgggctcaaacgaggaggtgacaacggtctcctcaacagctgctcgaatagcgtcatcttccggtatcgctgcagatgtcgccgcctcgctctacgcagccttccacctcaatatctcctctgccctctcgcgtccgctcctcgaccgcttcatcgtcgccggaagggagctaggcattatgcctttatag

SEQ ID NO: 111094 - DNA, 366 bp, Zea Mays
ctcagacatcaatgcttatgaggtggaccttggtaccgatgatgagaagcactgcttctgccgtgagtcagacttgttagctgtagttgaatgaattttaccatgaaaatttcggacttacctgggaatgctccaacagcatgaacttatcttgcccccactttgttgtatgccatttgaacgttcgtgaattcagcttctagatgattgttagttaccgttgatttttggttgccataaattggaattatgttaatggccattttctttacagaggcccttgctcacgtttggaatatgaaactccgctgtgtgaaccgaacttgaaatgtttacattgcccatctgatgtctgtgcttctaaac

SEQ ID NO: 111095 - DNA, 598 bp, Zea Mays
ggtcttctgcttgcttgtgcccaggtagctaccagagccgacgctcgtgtcccagccatggtggccgtcgaccaagcctctaatcccaactctaagcgccgcctcttctccccgtgccaagctcgccctcgactctgaccatcggctcacagtcgccggttccatgcgcccagattctcctttcatcatgccactcatcccccatggtcgtagcttgcccctgtgctcgacgccccctactcaggttctggagatttcaccctacaccaagcacttgacgccagctcccttgcctctccatcgcttagctcgtgccacttggccaggatgccagaataacgtcatgccccctgtgttggagctcgccctaaacgctgccgtcatcttctgtcgtcgagtcaccatctccagcatccgcgtgccaatccgcgtcgtcctcagctcgtcgcacttccttcaacagtagctacgtcactaggcccttgacgtcgtgctgtgcaccaggacgatctgtgactcgcatgcgtgccctcagaccatcgccttctagcttatgttgtgcactgtcgacccacactacgtccatgacgtgctcgtc

SEQ ID NO: 111096 - DNA, 2359 bp, Zea Mays
ccttcccctgcttcgtcctcgtttctcctcgaacccacccagcagcgccttcttccttcttcccgcccaacctcggccatgcccgtagcggcgctccgtcctcccccggtcgctgtcggcgcgggacgccgcagcgcccgactccaggcgcggttcgccctccgcgcgagctccctcgaggcgtcggcggcagtgacggtgacagtgaacgggtctgcagaggccgcggtggagaggaaggagaaggtgcaggaggataaggacaacgagggactgccggtgaaggaggagcaggagagggggctggaggtcctctacgacgacggcttcggctccgtgaccgtcaaggactacttcgcggcggccaaggtcctgtgccgggacgacggtgggccgccgcgctggttctctcccgtcgagtgcggccacccggccgtggaccaagcgccgctgctgctcttcttgccaggaatggatggcgtcggcacgggactcatcctgcaccacaagtctttggagtgttcgaggttcggtgcttgcatataccagtcaatgatcgtacaccatttgaaggactagtacaaatcgttgaaaatttgatcaagcacgagcatgatttatccccggacagaccgatatatcttgtcggagattcatttggcggatccctggcactggcagtggcagctcgtaatccgcagattgatttggttctcatactagtaaacccagctacatcatttgcaaagactccattgcagccagtattgcctctactggaatcagtgccaagcgagtttcatgctacagtgccgtatcttctcagttttgtcatgggtgacccactgaagatggctgcagttagcattgaaaacaacctatctcctccagaaactctgcagaaattgtcagacagtctcacatcaatgcttcctttgctttcagaactgtctgatattataccaagggatactcttctatggaagctcaaacttctcaaggcaggagcagcctatgcaaattctcgtctccatgccgtgcaagccgaggttctacttcttgccagtggtaaggacaatcttctaccaagcggagaagaagcggatcgactcttcaaggcactgaaaaactgcagagttcgatacttcaaggacaatggccatacactactgctggaggatggcgtcaacctgttaactgtcataaaaggagcgaacatgtatcggcgtggaaggcaaagggattctgtaaccgattatctcccgcctactctaagtgaattcaggcaaacatttgatgtggatcacaggctgttccaccttgcactgagcccagtcatgatgtccaccctgaaggatgggaaaatcgtccgcgggcttgccggtgtccctgacaaaggcccagtcttgttcgtgggctaccacgcgctcatgggcattgagctgagtcctctgtacgaggagttcctgagggagaagaggacagtcgtccgcggcatggcgcacccgttcctgtttgggaaaaagttcgagtcgtcgcgccaggagacgtcccgtttcgacactgtttctatgtacggtggactgccggtgaccccgatcaatatgtacaggttgttccagaggaaccaatttgttctgctctaccccggcggcgttcgggaagctctgcacaggaagggtgaagagtataagttgttctggccagatcagccagaattcgtaaggatggcggcgcgctttggtgtaactatcataccctttgggtgtgttggagaagacgacgttctcgagttggttctggactacaacgatcagaagaacattcccgggctccgggaatggatacagtcgatcaacaaagaagccgagagagtgagggacagcgtaaaaggagaggatgggaaccaggacatgtacctgccagctcttctcccaaaagtgcctggccgattctactacctgttcgggcagccgattgagatgaaagggatgggcaaccttgtcagagataggaagagcgcgaacgaggtgtatctacgcatcaaatcgcaggtggaggagatcatgtcgtatctcaagaggaagagggaggaagacccttacaggagcctaccgcagcgtgcactgtaccaggcaacatggggcgcctccgctcaggtccccacttttgagccatgaagattgggagtagggaagggcgtctgcgagcggactgcaattctttgacaagatgcaatgcgttctcatttctgaggagatctccctccctcatacgctgattacatatacggactacggactagtataccgcaaatattgtacatttttaggaaaaatatgaaatgatgtttttaaac

SEQ ID NO: 111097 - DNA, 930 bp, Zea Mays
gttatcctcggtgtcgttacccccaccatggccatcgtgctgctggcccttctcctcttcccgtccgcctatgcccaaccatggtcagtttgcggcaacacgggcaactacacggcggccagcacctaccaggacaacctcagccagctcgcggcaagccttcccaagaaagcctcttcgaacacgagtcccctcttcgccacgggtaccgcgggtgcagtgccggacctggtgtacgctcttgcactctgccgtggggacatcaacgcctccgcctgcaaggactgcgtcaccataggcttcgaggacgcgcagcagctctgcgcgttcaacaaggaagccaccgtgtactacgatagctgcctcgtcagcttctccaacgaagacttcctgtcgactaccgtcaacggcaacgagaacgaggtcaccgtcctcatggacgcccagaacttcacggagagcgcggactacatcaggctcctcttgttcactctgctgaacgacacgtccgagtccgcgatcaacagcatcaggaggttcacgaccgcgcggatggacattagctccctgccgacgatttactgcgctgtgcagtgcacgcctgacctcaccgccgacgagtgcgccgcctgtttgcaagacttcccgcaggtgacgctccagtacctcgacgggcagcgaggaggtcgacttctcggggtgcggtgtaacatgaggtacgagatctacaaattttaccaaggggaccccatgcttcgtattatctctttggcttcggcagtgccaacgatcggtaaaacccctcccggaacaccagtcacggtgtatccgcagcctccacctgcagcgccaccagcgccgcagatgataaccacgcctatcgcagcacaagaagagacaggtatttctggctccaaatctcagtactag

SEQ ID NO: 111098 - DNA, 1005 bp, Zea Mays
atggcctctagtgccactccctatcttggtgaattggacgcaaaggtttcgacggaacagttattctaccaaactaatgctagatttatgtacgcttacaattcaggagtgctgagttcgcaggacagagctggtgctaataggattgaagaaaacgccttggtttggacaattgaacagaagagttcagagtttactctttttgacctttctgagttactggaggccacaaaatcctttgcagaagaaaatagacttggacagggaggtttcggccctgtgtacaaggggcaattatcagatggtcaggaaattgcagttaaaaggcttgcttcgcattcaggacagggtttcacggagttcaggaatgaagttgaacttatagctaagctacaacacacaaatttggatatggaccctaaaatttcagattttgggttggcaagaatctgtagctccaatgatgctgaaggaaacacaaagagggtagtcggaacatatggctacatgtctccggagtatgcctctgaaggcatctactcggtcaaatctgatgtgttcagctttggtgttctacttcttgagatccttagcgcgaaaaggaattcaggttttcaccaatatggagactttcttaaccttctcggatatctgtacagatcatggaggcttgatgagctttctgctgttctgcagacatggcacctgtgggagataggaagatggcttgatcttgtagaagcatccatttcgaaagagatgcatgaagcagaggctaggcggtacattaacatcgcactaatgtgcgtccaagaaaatgcggacgatcggcccaccatgtccgacgtagttgctgcgctaaatagtgagagtgtggttctacctgagccaaagcatccggcttacttcaacctcagagtatctaaatctgtggaatcagcagttgttgttgaggcgtgcagtctgaatgagatgaccatcacccaagatccccaaggcagatag

SEQ ID NO: 111099 - DNA, 2336 bp, Zea Mays
ccggtggcttctcattcattgttgattgattgatcctccccgcctcactcctttgtctcctcgcctcgtgctcgctcgctcccctcgccctggcgaggagggcagcagaaaccctagcggctcaggccgggcgggggttagatgctccaaggttcgagagggaagggtaggttagtggtgcgccatcgactatgggctgcgtcttcggccgggcggctgcgtcgtcctctgcagcgccgaagaagaagtggggcaaggggaggtcgtccccgcagcccgaagcggggtcgccctccgcagtcgccgccaccgacggggacgggaggccgcggcggcggctcgggggccgcagggcgtcgggacccaggcagggttgcgtccccgctgctgccgcggcggagcagctcgccgccggttggccaccgtggctcgtcgcagtcgccggggaggccctccgcggctgggcgccgcgccgcgccgacacgttcgagaagcttaataagataggatcgggcacgtacagcaacgtgtaccgggcgagggacaccgtctctggccggatcgtcgctcttaaaaaggtccgcttcgataacctcgagccagaaagcgtcaagtttatggcccgggaaatactgatcctaaggagactcgaccaccccaacatcatcaaattagagggcttggtcacctccaggatgtcatgcagcctttaccttgtcttcgagtacatggagcatgatcttgctggtcttgcggcaagttgtgatgtcaagttcacgttgcctcagataaaatgttacatacagcagctgttgtcagggcttgagcattgtcatgacaataatgtattgcaccgggatatcaaggggtcaaacttgttgttggataataatgggattcttaagattgcggattttgggctggcaacattctttgatccacgacataaacgaccaatgacgagccgagtggtcacgctatggtaccgtccaccagaattgttacttggtgccactgagtatagtgtaggtgttgatttgtggagtgctggatgcattcttgcagagctcctgtatggaaagcccataatgcctgggcgcactgaggtggaacagttgcacaagattttcaagctatgtggttccccttctgaggagtactggaagaagtctaaattgccacacgcaacaatattcaaacctcaacaaccctataaacgttgcatcagggagacatttaaagattttcctacatcggctctgccattggttgaaactctgcttgcaattgatccagctgagcgacaaactgcctcagctgcattacacagtgattttttttcaaccgagccttatgcttgtaacccttcaagtctgccaacatatccaccaagcaaggagatggatgccaagttaagagacgaggaggctagaagactacgagcggctgcaaaggccaagggagaacagaaaaggactcgaccacgtgatcgatctcggagggctggaccagcaccagaagctaatgcagagattcaagcaaacttagaccagaggcgacgaatgataactcatgcaaatgcaaagagtaaaagtgagaagtttcctcctccgcatcaggatggaggtacgggtaatccgcttggatcctatcatcatatggagcctatgttcgagcaccaggatgcttccttcagtacagtagtccccatagagaaggggacctcacaaacatggtccgggccgttgtttgatccagcagctctcgggcagtcgaggcggaagaagcaaactaccctagatgctaaggctgctgcttactcaaagcagctccaaaaggaaaagggagggatacgagcccgataacaaaatgtcgttttcctggtgagcatgtggagggaccgtgggaaaggttcatcgcctacggatgaattttcttgttttgttcctctggtggttggaaacaggcaacaatgcgctgctgtagggtgaagtcttccggattgtgtacatgtcatgtggtagcgtttccaagtactgtttagatgcttctgaacaagctgccgtcacccggacgggactttaggggtttgagactcgtatttgtgctctttatggcaattcagttgcccatgtgtatatatggagcaattctttcttgtgtatgtacagagacggcggtagctttgatttcttaataatgaatcaagtgtgatggcgaccttcctcacgtaacagtggtccagtaattgttggttgttaaacttgctgcggtggattgcttcgccttgtgattctcaacaagaaggcaatgttctttcagttttcttgtctgta

SEQ ID NO: 111100 - DNA, 2333 bp, Zea Mays
ccggtggcttctcattcattgttgattgattgatcctccccgcctcactcctttgtctcctcgcctcgtgctcgctcgctcccctcgccctggcgaggagggcagcagaaaccctagcggctcaggccgggcgggggttagatgctccaaggttcgagagggaagggtaggttagtggtgcgccatcgactatgggctgcgtcttcggccgggcggctgcgtcgtcctctgcagcgccgaagaagaagtggggcaaggggaggtcgtccccgcagcccgaagcggggtcgccctccgcagtcgccgccaccgacggggacgggaggccgcggcggcggctcgggggccgcagggcgtcgggacccaggcagggttgcgtccccgctgctgccgcggcggagcagctcgccgccggttggccaccgtggctcgtcgcagtcgccggggaggccctccgcggctgggcgccgcgccgcgccgacacgttcgagaagcttaataagataggatcgggcacgtacagcaacgtgtaccgggcgagggacaccgtctctggccggatcgtcgctcttaaaaaggtccgcttcgataacctcgagccagaaagcgtcaagtttatggcccgggaaatactgatcctaaggagactcgaccaccccaacatcatcaaattagagggcttggtcacctccaggatgtcatgcagcctttaccttgtcttcgagtacatggagcatgatcttgctggtcttgcggcaagttgtgatgtcaagttcacgttgcctcagataaaatgttacatacagcagctgttgtcagggcttgagcattgtcatgacaataatgtattgcaccgggatatcaaggggtcaaacttgttgttggataataatgggattcttaagattgcggattttgggctggcaacattctttgatccacgacataaacgaccaatgacgagccgagtggtcacgctatggtaccgtccaccagaattgttacttggtgccactgagtatagtgtaggtgttgatttgtggagtgctggatgcattcttgcagagctcctgtatggaaagcccataatgcctgggcgcactgaggtggaacagttgcacaagattttcaagctatgtggttccccttctgaggagtactggaagaagtctaaattgccacacgcaacaatattcaaacctcaacaaccctataaacgttgcatcagggagacatttaaagattttcctacatcggctctgccattggttgaaactctgcttgcaattgatccagctgagcgacaaactgcctcagctgcattacacagtgattttttttcaaccgagccttatgcttgtaacccttcaagtctgccaacatatccaccaagcaaggagatggatgccaagttaagagacgaggaggctagaagactacgagcggctgcaaaggccaagggagaacagaaaaggactcgaccacgtgatcgatctcggagggctggaccagcaccagaagctaatgcagagattcaagcaaacttagacaggcgacgaatgataactcatgcaaatgcaaagagtaaaagtgagaagtttcctcctccgcatcaggatggaggtacgggtaatccgcttggatcctatcatcatatggagcctatgttcgagcaccaggatgcttccttcagtacagtagtccccatagagaaggggacctcacaaacatggtccgggccgttgtttgatccagcagctctcgggcagtcgaggcggaagaagcaaactaccctagatgctaaggctgctgcttactcaaagcagctccaaaaggaaaagggagggatacgagcccgataacaaaatgtcgttttcctggtgagcatgtggagggaccgtgggaaaggttcatcgcctacggatgaattttcttgttttgttcctctggtggttggaaacaggcaacaatgcgctgctgtagggtgaagtcttccggattgtgtacatgtcatgtggtagcgtttccaagtactgtttagatgcttctgaacaagctgccgtcacccggacgggactttaggggtttgagactcgtatttgtgctctttatggcaattcagttgcccatgtgtatatatggagcaattctttcttgtgtatgtacagagacggcggtagctttgatttcttaataatgaatcaagtgtgatggcgaccttcctcacgtaacagtggtccagtaattgttggttgttaaacttgctgcggtggattgcttcgccttgtgattctcaacaagaaggcaatgttctttcagttttcttgtctgta

SEQ ID NO: 111101 - DNA, 745 bp, Zea Mays
tcccctccgcctctcggtcaatccaccgcgtccaagcttcattcctccgcactcgaaatccaaagcgccccgccccgacccgaaccctaatcctgcatttcctttcccgccaccgcccgccccaatggcgaagccggtgaagtatgacgacgaggaggagatctcctcctcctccgccgaggaggacgatgaccagtccgccgccgccgcctccggatctggtgaggaaggggatgacgatgaggaggatgctgcggcgctgcccacggaggaggaggaagctgagggcgaggggcagcaagaggaggaggtcgacgaggaagagatcgaagccgtcactaccggcgctggagctgaggacggagaggacgccagtgccgctaccgccgctgaaggcgaagaggagtcccagtccaccgaggacgacgaatccgtcgcaagggacaaggacaacggcgacgagactgatgcagtggttgggaagcgtgagaaaacaaggctaaaagaactccagaagatgaagaagcagaaaatccaggaaatactggatactcaaaacgctgccattgatgctgacatgaacaataaagggaagggacggttgaaataccttcttcagcagacagaaatatttgctcactttgcaaaaggaagtcagtcgaatgagaaaaagcctcgtgggagtttggtggaaattactggcacttcatttggcacgacacttttgaagttgaaaagattatga

SEQ ID NO: 111102 - DNA, 3322 bp, Zea Mays
agtcaatctgcaggggacgtcatgcatcaaagatgactgaagaagaggaagacgaagaatacctcaaagaggaagaagatgcccttgctggtgcagggggtacacgtttagtttcacagccttcatgcatcaagggaaagatgcgtgattaccagttggctggacttaattggcttatacgattgtatgagaatggtatcaatgggatattagctgatgagatgggtcttgggaaaacacttcaaactatttcattgctgggctatctgcatgagttcagaggtatagctggtcctcacatggttgttgcgccaaagtccactcttggcaactggatgaaggaaatccaacgtttttgccctatcttacgtgccgtgaagtttttggggaacccagaagagcggaaccatataagggacaatttgctgcaacctgggaaatttgatgtgtgtgtgactagttttgaaatggcaatcaaagaaaaatctgcgttgaggcgcttcagctggcgctacataatcattgatgaagctcaccggataaaaaatgaaaattctcttctatcaaagactatgaggatttacaacactaattatcgtctcctcatcacaggcactccactccagaataatctccatgagctctgggctctcctcaatttcttgctacctgaaatatttagctctgcggagacctttgatgaatggtttcaaatatctggggaaaatgatcaacaggaggtggtgcagcagcttcataaggttcttcgcccattccttcttaggaggctcaagtctgatgtagaaaagggcctacctccaaagaaagaaacaattcttaaagttggaatgtctcagatgcaaaagcagtactatcgtgctctgcttcagaaggatttggaggttattaatgctggtggtgaacgcaagcgattgcttaacattgccatgcagttgcgcaagtgctgcaaccatccatatttattccaaggagctgaacctgggccaccctacacaactggtgaacatctaattgagaatgcaggaaaaatggttctacttgataaattgctgcccaagctaaaggagcgtgattccagagtccttattttttcacagatgaccaggcttttggatatcttggaagattatcttatgtataggggatatcagtattgtcgaattgatggaaatacaggtggagaagatcgtgatgcatccattgaagccttcaatagtccaggaagtgagaagtttgttttcttactttcaactagggcaggtggccttggtatcaacttggccactgctgatgttgtggttctctatgacagcgattggaatccccaagctgatctgcaagctcaggaccgtgcacatagaataggtcaaaagaaagaagttcaagtgttccgcttttgcactgagtacactattgaggaaaaggtgattgagagagcatataagaagctagcattggatgctttggttattcagcaaggacgattggcagagcagaaaactgtcaataaggatgatcttctgcaaatggtgcggtttggtgctgaaatggttttcagttctaaggacagcacaataactgatgaggacattgaccgtattatagctaaaggagaggagacaacagcagaacttgatgcgaaaatgaaaaagttcactgaggatgccatcaaatttaagatggatgataatgctgaattgtatgacttcgatgatgagaaggatgaaaacaaggttgatttcaagaaacttgttagtgataactggattgagccacctagaagagaaaggaagagaaactactctgagtctgactactttaagcaagcacttcgccaaggtgcaccagcaaagcctagggaaccaaggattccaagaatgccgcacttacatgatttccagtttttcaataaccaaaggctaaatgaattgtatgaaaaggaagtgcggtaccttatgcaagcgaaccagaagaaagataccattgatggtgaagacgaagatcagttggagcctttgacagcagaggagcaggaagagaaggaacaattattagaggagggttttgcgtcatggacaaggagagacttcaacacatttattcgtgcatgtgagaaatatggtcgcaatgatattaaaagtatatcatctgaaatggagggtaagacagaagaggaagttcaacgttatgctagagttttcaaggagagatacaaggaactgagtgattatgatagaattataaaaaatattgaaaggggggaagcaaggatatcccgcaaggatgagattatgaaggctattgggaagaagctagaccgctacaagaacccatggttagagttgaaaattcagtacggccaaaataaagggaagttctataacgaggaatgtgaccgctttatgctttgcatggtgcacaaacttggatatggaaactgggatgaactgaaagctgccttccgtatgtctcccttgtttcgatttgattggtttgtgaagtccagaactacccaagagttggctaggcggtgtgatacccttatccgactggttgagaaagaaaatcaagaatatgatgagcaagagaggcaagcaaggaaggagaaaaggcttgctaagaacatgactccaacaaagcgagctgcactaaagaattcagagggtgagaatactccaccgagttcattcaagagacgacggcagtcccttatggacgactatgtgggctcgggaaagcgtaagagaggctgaccacgtttggcatcctcccttagacatgccgtctctacaatgattttaataccctgccgcgcagtagtgcttagttcctcttgcacgtgagtcgaatacctcaagggcatgtgactagcgtaatttatgcaatgatgacataggttagttattaatcctaaatgaagcatgtatgcgcatgctgtgttagtgtcgtagatctggactttgcaattgcaactgttgctgcccagctgacacagatccctttcgctgcaatgcggtcctgcattttgccgccactgattttgcacccaaggctaaacccaacgcggcagtagtaactgttgcactcaggatccacgtacacaaaaatgagttgaggcataacgtcccaactcggctggtggtatatgttaacagccaatcatgtttaagctattactctgatcgttaaggtggatccgctaaggccttcggttatttctgatccatgtggattggaatgtattgggcggaatcgagacggatttgacttgctatagatttaaatcgactcaatcccactc

SEQ ID NO: 111103 - DNA, 2573 bp, Zea Mays
agttttcgtgatcaccaattttagtaccttaaaatgaactctttataattgtttctcgcaacttttgcaaaggttcttcgcccattccttcttaggaggctcaagtctgatgtagaaaagggcctacctccaaagaaagaaacaattcttaaagttggaatgtctcagatgcaaaagcagtactatcgtgctctgcttcagaaggatttggaggttattaatgctggtggtgaacgcaagcgattgcttaacattgccatgcagttgcgcaagtgctgcaaccatccatatttattccaaggagctgaacctgggccaccctacacaactggtgaacatctaattgagaatgcaggaaaaatggttctacttgataaattgctgcccaagctaaaggagcgtgattccagagtccttattttttcacagatgaccaggcttttggatatcttggaagattatcttatgtataggggatatcagtattgtcgaattgatggaaatacaggtggagaagatcgtgatgcatccattgaagccttcaatagtccaggaagtgagaagtttgttttcttactttcaactagggcaggtggccttggtatcaacttggccactgctgatgttgtggttctctatgacagcgattggaatccccaagctgatctgcaagctcaggaccgtgcacatagaataggtcaaaagaaagaagttcaagtgttccgcttttgcactgagtacactattgaggaaaaggtgattgagagagcatataagaagctagcattggatgctttggttattcagcaaggacgattggcagagcagaaaactgtcaataaggatgatcttctgcaaatggtgcggtttggtgctgaaatggttttcagttctaaggacagcacaataactgatgaggacattgaccgtattatagctaaaggagaggagacaacagcagaacttgatgcgaaaatgaaaaagttcactgaggatgccatcaaatttaagatggatgataatgctgaattgtatgacttcgatgatgagaaggatgaaaacaaggttgatttcaagaaacttgttagtgataactggattgagccacctagaagagaaaggaagagaaactactctgagtctgactactttaagcaagcacttcgccaaggtgcaccagcaaagcctagggaaccaaggattccaagaatgccgcacttacatgatttccagtttttcaataaccaaaggctaaatgaattgtatgaaaaggaagtgcggtaccttatgcaagcgaaccagaagaaagataccattgatggtgaagacgaagatcagttggagcctttgacagcagaggagcaggaagagaaggaacaattattagaggagggttttgcgtcatggacaaggagagacttcaacacatttattcgtgcatgtgagaaatatggtcgcaatgatattaaaagtatatcatctgaaatggagggtaagacagaagaggaagttcaacgttatgctagagttttcaaggagagatacaaggaactgagtgattatgatagaattataaaaaatattgaaaggggggaagcaaggatatcccgcaaggatgagattatgaaggctattgggaagaagctagaccgctacaagaacccatggttagagttgaaaattcagtacggccaaaataaagggaagttctataacgaggaatgtgaccgctttatgctttgcatggtgcacaaacttggatatggaaactgggatgaactgaaagctgccttccgtatgtctcccttgtttcgatttgattggtttgtgaagtccagaactacccaagagttggctaggcggtgtgatacccttatccgactggttgagaaagaaaatcaagaatatgatgagcaagagaggcaagcaaggaaggagaaaaggcttgctaagaacatgactccaacaaagcgagctgcactaaagaattcagagggtgagaatactccaccgagttcattcaagagacgacggcagtcccttatggacgactatgtgggctcgggaaagcgtaagagaggctgaccacgtttggcatcctcccttagacatgccgtctctacaatgattttaataccctgccgcgcagtagtgcttagttcctcttgcacgtgagtcgaatacctcaagggcatgtgactagcgtaatttatgcaatgatgacataggttagttattaatcctaaatgaagcatgtatgcgcatgctgtgttagtgtcgtagatctggactttgcaattgcaactgttgctgcccagctgacacagatccctttcgctgcaatgcggtcctgcattttgccgccactgattttgcacccaaggctaaacccaacgcggcagtagtaactgttgcactcaggatccacgtacacaaaaatgagttgaggcataacgtcccaactcggctggtggtatatgttaacagccaatcatgtttaagctattactctgatcgttaaggtggatccgctaaggccttcggttatttctgatccatgtggattggaatgt

SEQ ID NO: 111104 - DNA, 1607 bp, Zea Mays
atggccatggcgtcacagtgtgccctgtccgtcccgcccaaccggtcaggattgcctaggcaaccttcatatactactggatttgggactgctttaaatatagagacacttgttgctgccgcggaacaaagagatacaccaattgaggacaagattctttttatgatcaacaatatatccatctcaaatatggaagctaaggcaaaggaatttaatgaggtcatacaggaacagtattatacttggtttgcacaatacatggtcatgaaaagggcaagcattgaaccaaatttccatgatctgtatctgaagttctttgataaagtaaactcaaaatccatgaacaaggaaatactgaaagccacatatgagaactgcaaggtcttgttaagatcagaccttatcaaatctagttccgaggagcgctccttgctaaaaaacctaggcagttggttgggaaagttcaccattggtaggaatcaggcactaagggctaaggagattgatccaaaatctcttatcgtggaggcatatgagaaaggattgatgattgcggtcataccattcacttcaaagatccttgaaccttgccagtcaagtatcgcatatcgatctccaaatccctggaccatgggaattctaagtctacttgctgaaatttataatcttccaaacctcaagatgaatctgaaatttgatattgaggtcctcaacattcctttttttgatagtttctttattgactttgtatctgccatgctacccatggccatgctaaatgttcttttgggatttcaggtgctatttaagaaccttactgttgacataaaggatgtgaaaccaacctccctgctcaaagatcgtctgtgcgaagtcgagggaaatccagatttttcaaataaagatgttactgcatctcaaacccctgtggttgcagaagtcccttcagggaccatcccttcactaactcatatggaacaacaacctgagatcaatatcacatcccgagctatgagccttccaaatatacttaatcagtatgctgctcctgtccgtctacctacaaacagcacggtagaagatgacaaagttgctctaatgatgcctgagcaagtgccctcgttgacccaggtttcgccagcacaaacacaatcaacatcaccatctccattttctgttaaccagcttatggcagctattccacgtgaagagatacgtttcaaaataaatccaaagctcggctcccttggtccacaactgcaatatagcaaaattatggatttggctttggataaggctaacagggagataatactccctgttattcaaagaagtgtgactggcgggaggaacaccgggcgtgtaggagtcatcaagaacagggagaagcacaagggcagctttgagaccatccatgtgctgcttggacctttttgctatgtctagttttctcctatttgttgtataggaaaacatagaatataattcaaatttggtggtcgcaaaagtgtggagactttaattcatataaagttaggcttaacattaatgcaaacagttgtattttagtttagatttagagtacacttatgtatgcgttgtttgac

SEQ ID NO: 111105 - DNA, 1773 bp, Zea Mays
tcccagccgccgccgactctatctctcccttccctctcaccacctcctcgtcatcctcagcgtgcacgctgcgcgtggccgtagtgggggtggccccgcggcacgtcggctgccgaggcgctggtctcgccgagggcccagatgcaggtgctctcctctaccaacctcgccgctgacttctcccgcgcgctgccgcccggggcacccatccccatgctccgccgtgaggtgctccactccttcctccgccgtcgaggccgagctcgtccagggcctcatcacctccgccgtgaggtgctccactccttcgtcttcaagctctcgccccaggggtgcgctagtgccaggtgcggcgagccagcagatcaaggaaaccgcccgtggccgccccaagcgttacatctgcactggctgctgctggtgacaagcaagaacaaccaaaggtattttcagtttatcactgtccatcagttgaaactaaaaatgccctgacctgcctcaaatgcttaactttataactgatgaagtttctaatcacaagatttacttaatttatactattatcttctgttgcagtattgattataaatgttgcaaacttgcaagtaccaacgactcttttcaattaaaatgctgattctattttccatttctactatttgtattgtatattatttattggatagagattagccgcgaattccatgcggaggccagagcacctgtaatgattccggggcagtttttttgcgcgcagtaaagaagtctacataattgccaagaatcatcttcatccatggggatccggtaaagcagcagcccctcggctgggtaacctactgtgaagcatcaggtcagcagtgaaggagatctgagttcgaagcaaatttgccgcgaattctctccggaaatcattcgagtggctggattttgaagcgcagccatgggatcggaggattttgtctgtaaaatgatgtgattcggcgggtgagagactggttcttccgggtccattgtagcagcagtcctttttttatctccttagttttgttggagttcttccgggtgagagactggttcttctgggcccagcggcgggtgagagactggttcttccgggtccattgaagcgcagccatgggatcggaggattatgtagacttctttaggccttgttcgtttgtatcggattgtatccgtaatcattccagctaatcaaaatttatataaattagagaagcaatccggttaggaatcgttccgacccaccaatccgtaacgaccgaacaggctcttactgtgcgaaaaaaactgcctcggaatcattacaggtgctctagcctccgcatggaattcgcggaatctgcagctgtgactgactctgctatggcagaagctgctcttcaaatgtctgtccaggatgcaaacatgtccagtgacactgatatgagtaaggtgtttgaagacagaacgtttgtgtcatctatccttaattcgtttcctggtgttgatcccaatgatccatctgttaaagatttgctggcatcattgcacagccagaaagaggaagagaagaaggaagacaagtcagacaaaacagaagacgagaagaactgcttcaagctggagtgatgtcgctgtggtgcttttgtgactgatcatctctggagcttttgtgaatgatgtagctagctatctgtaattgatctagttgtgaatgatattataattgtgatacttttgtgaatatataattgtggtgcttttgtgttt

SEQ ID NO: 111106 - DNA, 950 bp, Zea Mays
ctatctctcccttccctctcaccacctcctcgtcatcctcagcgtgcacgctgcgcgtggccgtagtgggggtggccccgcggcacgtcggctgccgaggcgctggtctcgccgagggcccagatgcaggtgctctcctctaccaacctcgccgctgacttctcccgcgcgctgccgcccggggcacccatccccatgctccgccgtgaggtgctccactccttcctccgccgtcgaggccgagctcgtccagggcctcatcacctccgccgtgaggtgctccactccttcgtcttcaagctctcgccccaggggtgcgctagtgccaggtgcggcgagccagcagatcaaggaaaccgcccgtggccgccccaagcgttacatctgcactggctgctgctggtgacaagcaagaacaaccaaagctcttcaaatgtctgtccaggatgcaaacatgtccagtgacactgatatgagtaaggtgtttgaagacagaacgtttgtgtcatctatccttaattcggtatgtattattcttaaactaatggcatacaggtacattttagctgcagcttcaagaatttattggcccttttatgtgtaaaataacagtttcctggtgttgatcccaatgatccatctgttaaagatttgctggcatcattgcacagccagaaagaggaagagaagaaggaagacaagtcagacaaaacagaagacgagaagaactgcttcaagctggagtgatgtcgctgtggtgcttttgtgactgatcatctctggagcttttgtgaatgatgtagctagctatctgtaattgatctagttgtgaatgatattataattgtgatacttttgtgaatatataattgtggtgcttttgtgtttatgtgatggatctatgactgtggtatactgattaattgtgtatgtctttatgattcgtgtat

SEQ ID NO: 111107 - DNA, 894 bp, Zea Mays
cctctcaccacctcctcgtcatcctcagcgtgcacgctgcgcgtggccgtagtgggggtggccccgcggcacgtcggctgccgaggcgctggtctcgccgagggcccagatgcaggtgctctcctctaccaacctcgccgctgacttctcccgcgcgctgccgcccggggcacccatccccatgctccgccgtgaggtgctccactccttcctccgccgtcgaggccgagctcgtccagggcctcatcacctccgccgtgaggtgctccactccttcgtcttcaagctctcgccccaggggtgcgctagtgccaggtgcggcgagccagcagatcaaggaaaccgcccgtggccgccccaagcgttacatctgcactggctgctgctggtgacaagcaagaacaaccaaagtaaagaagtctacataattgccaagaatcatcttcatccatggggatccggtaaagcagcagcccctcggctgggtaacctactgtgaagcatcaggtcagcagtgaaggagatctgagttcgaagcaaatttgccgcgaattctctccggaaatcattcgagtggctggattttgaagcgcagccatgggatcggaggattttgtctgtaaaatgatgtgattcggcgggtgagagactggttcttccgggtccattgtagcagcagtcctttttttatctccttagttttgttggagttcttccgggtgagagactggttcttctgggcccagcggcgggtgagagactggttcttccgggtccattgaagcgcagccatgggatcggaggattatgtagacttctttaggccttgttcgtttgtatcggattgtatccgtaatcattccagctaatcaaaatttatataaattagagaag

SEQ ID NO: 111108 - DNA, 703 bp, Zea Mays
aagcaagcacaacaagtagtcaaagcatctagctcgttacaagtggctcttgtcgcctacaattttgccttcttccaagtcttgtttgaagttgctctctgcgaagagccggtagagaagttaatatcgtctagcaatggaccgggtgacgaaactggcttctcagcgcgcggtggtcatcttcagcacgagctcctgctgtatgtgccacacggtgacgcgcctgttccgcgagctcggggtgaacccgacggtggtggagctggacgaggaccccagggggaaggagatggagaaggcactggcgaggctgctcgggcgcaaccccgctgtgccggcagtgttcatcggcggcaggctcgtcggctccaccgacaaggtcatgtcgcttcacctgagcggcaacctcgttccgcttctgcgcaatgccggcgcgctctgggtgtagccgtgttgcatatatatgtagctagccgtgttccattccatatgcatgctatctatcaggagaggagacacacggagggaagtacgtagtaataattaattaagcaggcctttttatctgcaccgtaataattttccatagaggacggagtgttagatcacggcctctttttcgtgatccgcatcaagttaaatatttcatcagagtatgtatcagaaagatatatatgaggtgaatatagcatcacgttggagt

SEQ ID NO: 111109 - DNA, 234 bp, Zea Mays
atggagaagcggacaaggcgcgatggctaccgaaccggcggtgcagtgggcggtcgtcggctatggcttgcggcctccggaggtgtggcgggggtgtcaaggattgaggattggcccagcaagattgcgtgctgcctttcaagcctagatccagatagtcgtgtggatctcttccctagaggcatctctaatggaactgccgtgcggaggtcgttggatctcgcagccggctag

SEQ ID NO: 111110 - DNA, 1070 bp, Zea Mays
gtcgagggaatacgaacgtcgtacgagaacctttctccctcctccacctttctccttttcttgccacggcaaaacaccttcgccggcgagagcatggcgatggcgtaccgtgtcctggaggtcaccctggtgtcggcaaatgacctcaagaaagtgtcgctcttctcccggactcgcatctacgccgtggcttccatctccggattcgacctccgcatcccttcccacagcacccaagcagaccacagcaacggctgcaacccctgctggaacgccgtggtacacttccccatcccggctgccgctgacacccgcggcctcgcactccacgtgaggctccgcgcccagcgtctatacctgggcgatcgcgacatcggcgaggtgtttgtgcccatcgacgacctcctggccggcgccgacaagggtggcgatccgaggcccgtgagctaccaggtgcgcaggccgcactctggccgcgcccacggcgtcctctacttctgctataagttcaccgaggtccccgccgtctcttgtgtctcggaaccggaaagcaaacaagtccagtacgccaagaagtacgtgcaggactccaagaacacgacggacaagactatggtgccgcccaccgtgtacccaccgccgcaggccatggcgtccgcatacccgccgcaacaatattgttcgccgtacgcggcgtacccgcggcagccttacgggtaccctgctccgccaccgtacgggtacaatgctgcttccccacaaccggcgatgtacaactacgcagcacagccggtagctgcaccggcgaggcatggcggaggtatggggatggggctcggcctagggctcctaggcggtgcggtcggggggatgatgctcggagaggcgatcggtgactatgagaccgacgccgcttatgatgccgggttcaacgatgcattggcattttagatctatgttgtcgtgcagtcatggagattattgtccttgtaaatctctaattaatacgaaacgatgaaatagaatttgcattttgtatctcttatcataaggctatctatattttttcc

SEQ ID NO: 111111 - DNA, 1450 bp, Zea Mays
cgcgcgccaccacccaccaggccactactcgcgtgcatatcattatcatatcagagccgggaacctcaagccagcgacttgctctgctgctttcaaatcttagtctcttatagctaagctcgcaagggctaagacacactgatcttggttcacacatggcttccttgttgcgctggaaggacaagtacgtgaaggagaggctgcagggcctgtcctgctcctcggcggccgccacctccgtcgtcccctccaatggccgcgccatcgaccggcactctccgcacctccgggaccctcaccggcgtctcccgccaccggtgcccaagccacccagacccagctctagtttcagtactaccaaagattcgtcctcctcctcctacaagcagcggcagcagatttgccacttcgacgtcgatggcaaagacaaaaggaagaataagaagaagaagagcacagcagcagcagccgctggtagtggtagctcgccgtcggagcataggagaaacggcaaggagaaggcgctgcagctgcagcaggtgagccccgcgagctcgtcccggttcctgctcaactcctccaggctcatgatgcagtccgacgacgaaaccactgccgtcgactccctgccgccacttccgtccccgcggcggccctccttcgttgacgccgccgccgaggacgacacagacacattccccagcagccacggcgatgccgcgtcgccggctgttccgtcaagaaggcctcagctcgtggcgccggcgccgccactggaattattcgctgagccgtctgcatcaggcgcaggctcctcctcctcttcgtcgtcagagataactggaggccatgtcgtcgccgccgctgacaacactgtcgtggtgagatcatgttccacgagaacagggcagcaccaggtagtggttttgagggtatctctgcactgcaaggggtgcgctggcaaggtgaagaagcacctctccaagatggaaggcgttacttctttcgacatcgacatcgcgacgaagaaggtgacggtggtgggagatgtgacgccgctaggcgtcctcaacagcatctccaaggtcaagagcgcccagttctggcctgactctcgctcctctttctctacgccaccgcgtgcctctgcctccttctgagctgcccactagcttcgtcacaaacttaatggttgggacgccaacacggtggtctttcaaatatatagttccttttttctccatattatcgatcgaggaaaatatatatatttgcacaatccaatcaaaagttcctctaccacaaaagatgcattatacaaaatttaactttaactatatatataggcgtctttttatgttttgaagctcgttgtaataagattatgaaagtataatgtatattttcaattttattaaatacaaaaatagggggacctaaagctatgata

SEQ ID NO: 111112 - DNA, 126 bp, Zea Mays
atttcttttatattgaaagcccaattaattaatataaacagtaataatattaaagaatttttttcttcaagtgtttgattttatttgcctttagaataattttgtttgctcatatttgatttatgg

SEQ ID NO: 111113 - DNA, 96 bp, Zea Mays
tgcgcctcgtcccggcacaggcagcgacgacgattttattattctgcacaggtcttcagggcggtcaacaggcccatcaccaatgatgatcttccg

SEQ ID NO: 111114 - DNA, 2082 bp, Zea Mays
cagacctccccggcatttccgacgtcacctcacctccctccccggccattaatcctcgtcccccccgcagtgcccgcacccacccggttgtcatcgtcagccgctcgctccctcggtcactcactcactcactcactcccctctagtacatcactcaccgcccgccaagcgcgaagctgtcactctgctgaccgcttgacagagcagagcacggcacctagccgccctctcaccgacccatggccatgggcggcgcgttccccttccagtggcccgagggccccgcggatcctgttctcgacgacgtgaccttgcctccgctgcccacggcggcgcccgacgccggggtcgccgcgtactacgcggacgcggcggacgtgcacgcgatgcacatggcgctgcccgatttcgcggcggcgctggcggcgatgcggcgggaggaggaggaggccgcgggcatccgcctggtgcacctcctcatgagctgcgccggcgccgtcgaggcggccgaccacgctggcgcgtccgcgcacctggcggacgcgcacgccgcgctcgccgccgtctcgcccacctccggcatcggccgcgtggccgtgcacttcaccgccgcgctgtcccgccggctgttccctcccacgccttcgccttcgccttcgcctccgcccccggccccgcacgccgccgacgccgaccgagccttcctctaccaccgcttctacgaggcgggtccctacctcaagttcgcgcacttcacggccaaccaggccatcctggaggccgtccagggctgcaagcacgtgcacatcatcgacttcagcatcatgcagggcctccagtggccagcgctgatccaggccctcgcgctccgccccggcgggccgccgtcgctccgcctcacgggcattgggccgccgtccccgccagggcgcgacgacctccgcgacgtcggggtccgcctcgccgacctggcgcgctccgtgcgcgtccacttctccttccgcggcgtggccgccaaccgcctcgacgaggtgcggccctggatgctgcaggtctcgcagggcgaggccgtggccgtgaactccgtgctccagctgcaccgcctcctcgccgacgctccctcgtcgggcgacgcccgggcgcccatcgacgccgtgctggagtgcgtcgcgtccgtgcgccccagggtgttcacggtggtggagcaggaggcggaccacaacaagccggggttcctggaccggttcacggaggcgctcttctactactcggcggtgttcgactccctggacgcggcgagcggcggcgcgggcgacgcggcggcggaggcctacctggagcgcgagatctgcgacatcgtgtgcggcgagggcgcggggcgcagggagcggcacgagccgctgtggcggtggcgtgacaggctgggtcgcacggggctggccgccgtgccgctgggggccaacgcgctgcggcaggcgaggatgctggttgggctcttctccggggaaggacactgcgtggaggaggccgaggggtgcctgacactgggctggcacgggcggccgctcttctcggcgtccgcgtggcgcgcggaagagaacaatcagagtgacagcaggagcaggagcagcggcagtgaggagagcaatatcagctgcagcagctagagcgtcgctactttactgtaaattccttcggtgagaggctagtagcggggtttactgtaaaatcgcggtgcccgcgatccaaatggttcgattgagagggcgttggcatcggtcgtaaatggcagactgaaaaaaaatgacatggaattgtgttaggcatgtcgtcgttagctgaataaacggcactgaaacagcgtccctggaaaagccattgcaatcgtagaagctctagaaacacttgctccctcgtccctcccatggatttgttttagagcatgactggatgcttgcgtggcctgctgacacatcgagcacgacaagatgccctggcatttctgagctggctggttacaacagcaacgagcaatatgtgaacctcctcatctatcgaaagaaaaaaaaaagcaaatccacg

SEQ ID NO: 111115 - DNA, 1297 bp, Zea Mays
attatgcataaggatatatacgaagcaattgccgaattaggtaaattctttcaacaattatgtgctaagactctaaagttagatgttttgcatacaatgaaagctaaaatcccagtcattttgtgcaaacttgagaaaatatttcctcctgctttctttgatgtgatgctacacctagctgttcatttacctgatgaggcaatccttagaggcccagtacaatatggatggatgtacccagtagaaagacgattgttgacattgaaacggtttatgaggaacatggcaagacctgaaggatccattgcagaagcatatatcgctaatgagtgtttgacagcatgctcaaggtactttgatgatgttgacacacgacacaatcgtgaaggtaggaacaaagagcgtgttgatttgagaaaaaggtgatttttctatgttccagcatggagttgatctacttggagcaccaaggcttacatatcttgaagataattatgacagaatggtttggatatacaaggaagagttagcggatcaaggaactccttatgttcaaaaaacccatgataagcaattttctttctggtttaagaagcatattgcaaaactacgttacgttgatggagaagacattactgatgacctatttgcattgtcatgtgaaccggaccttcgggtttgaatattttcagcatgtcttgtcgatggggtttgatatcacactatcgaccaaataattgagttgcgttataactcagatatgtccaaatgtcgcacagtggttctatttcgttgtgattggtttgacacttatagcaagaaggttagaatgaaagatgatggatattttagaagcatcaaccatggtagttgttggtacaaggatgatccttttattctatcaacataggcaacaaaagtattttacttggatgacactaaacactgtgaaagctggagaattgttcaaaagtttacacataggcacttatggaatgtcactgaaaatgaaaatgaggaaacacccacgggcttgggactatcataccaagatgaaacatgtgcaggttttcatgtacatgtgaatgaaggaaatttgaatgatgaagtactagatagtgaagattgtcaccacgtagatacaagtttagttgacgagtttcgtaaaccaaggcaagacaatgtgcaaggagatgagacaagcgatgatgaagatgaaactatatggcaatatgttagtgatgatgaaagtccaacaattcttgtcgaggatgatgatgatgatagcgatgccgag

SEQ ID NO: 111116 - DNA, 904 bp, Zea Mays
cctccttccctcctcgcactctgtgttgcagacctccgccaccggaggttcctgcgggtgcgtttgccctgacagaacactggaggcccctgcgggtgcgctacccctgaccaagcaaccacggactagtctaccgccgtccgcagcatccgttcaccttcaccccgcctgcgcgctctctctctgcgacgactgggtgggctactgcagccgccgccgccctacgccgggtgccgaggccttcgccggtctcttcgctggtgacgagcactcaccaggctgcttcatcgtgaaaaattgttgcatgcagccacgcacatggtttgcactatccacctacacagtgatctatgcttctgaccccacatgccttaggtctatctgcaccagaaagaagtgaatcgtttcaaggtgtctatatactttttggatgctttaagaaagggcctggaagcattgcacgggtaacatatttgtctgacagcgattgattttgggaaccaatttggtaatcagtacaatggagtgcaacagagaagaagccttgaaagccagggaaattgctgttaagaagttggaaagcagagattttgttggtgctaaaaggattgcccttaaagcacagaggattttcccagagatagagaacataccccagctgttaactgtctgtgaagtacattgtgcagcagaagcaaaagtaaatggaatgttggatttttatggaattctccaagtagaaggaacagcagatgaggtgaccataaagaagcaatatcgtaagcttgtcctctcacttcaccctgataaaaacagttatgctggtgcagaatctgctttcaagtttgttgcagaagcatactcaacattgtctgatcgaaccaaacgatatgcatatgatgtc

SEQ ID NO: 111117 - DNA, 538 bp, Zea Mays
aaatatcttttctagagagaacaaagaggggcctgtgatggaaggagttaaattttcagcaaagaattctactgtaccagattttggtgacaggaaaaacctaggtggtggggtggatacatcagcagggccaggttctgcagaaatccctactccacggagatcttctaggagaaaggcttgtgctgatgccaacaacatcctgaattctccaaagaaaaagagtcggacactcaaagattggttctcaaatgctacctccagttctaataaagtagttgatgataatgttgcccatgctgatggacatgttagtgaacctcatgtgtctagcaaaacagataatcaagatagttgtgttgtcaatgaaggcaataaaagaaacactaaaacaacttgtgatccacctgctgagaagccttggaatactgggagtttcacgtaccctgacccagaattttttgacttcgacaagtgcagagatgtcaaactgtttgcagttgatcagatatgggcactttatgatgaattcgatgcc

SEQ ID NO: 111118 - DNA, 1802 bp, Zea Mays
aacccaagccactctcccccgtttctaggcttcacagcctcgccaacaactcccgtcctccacttgcccttctccgccaacagactgtccccggccgctgccattgccgattgctcacatccgcgttcgtgttcgcatccgcatcagggtcacctgcgccggcgagccatttgaaagggaggagtagcagactctcagaggtggacatgacgctgttgtgcgtgccgctggtggggcggacggtggaggagatgattacagacgcggcggcggccgccgccaccggcggcgacatggtcgagatccggcttgacttcatccaggggttccgcccgcgtgagcacctaccgcccctgctccgcggctgcccactcccggccctcgtcacctatcgacctgtctgggaaggaggccaatatgaaggtgatgacaccacaagatttgagacactacgtttagcaatggaattaggtgtagactatgttgatattgaattgaaggttgcagacaaatttatgagctttattgctggccataagccagagaaatgtaaacttattgtttcttcacataattatgaatatactccatcatgtgaggaaattacaaatcttgtcgctagtatacaagcagttggagctgatatagtgaaagttgcaacaaccgccaaggacattgtcgatgtatcacggatgttccaagtgatggtacactgccaagtgcctatgattggactcgtaatgagtgaaaaaggtttaatgtcaagagtgttagcgcccaagtttggtggatatcttacatttgggatactgaatgctacaaagacatcagcttctggacaaccaacagttgaggacttactggacatttacaacataaagtgtattgggcctgatacaaagattcttggtcttatagccaacccagtaaaacagagcaagagcccaattttacacaataaatgtcttcagtccattggatataatgctgtttatcttccacttcttggagataatcttgctagttttctggagacatactcatctcctgacttttcaggatttagttgctcacttcctttcaaagtagatgctgtacagtgttgtgatgaacatgatccagttgctaagtcaataggagccataaacactataattagaagaccagatggcaaattagtggggtacaatacggactacattggagctatatctgctattgaggatggcattggaggtccagggtcaaaggatgctgtcatctcaccattggctggtaggcttattgttgttgtaggagctgggggtgctggtaaggcaattgcttatggggcaaaggagaagggtgcgagggtagttatagcaaatcgcacctatggtaagatctctatttctacaatacatgatgtttaagattgtatagctagtacaaatttactatcctgcacatccatcgttagatctaaaattgggaaggatgtgagttgtaccggtgaaacataattacatgcattctcctaacctacaaaagtatgcatctactatacgaacatattgttttccatattattttggttatctgtcatgaggttgtcaatcctaaaggtaataaaaacgaacatcagtgtgacagtctgtatgttttttgtttttatgtctagatcttgtttcctctcatgtcttcagaacagttagttttgttctacatagcgatgttgttttgccatcaattgtttctcaagagtcttggtggcatttggctcgtgttctagcaagaaatgagaatctatgacagttgggtgc

SEQ ID NO: 111119 - DNA, 2151 bp, Zea Mays
aacccaagccactctcccccgtttctaggcttcacagcctcgccaacaactcccgtcctccacttgcccttctccgccaacagactgtccccggccgctgccattgccgattgctcacatccgcgttcgtgttcgcatccgcatcagggtcacctgcgccggcgagccatttgaaagggaggagtagcagactctcagaggtggacatgacgctgttgtgcgtgccgctggtggggcggacggtggaggagatgattacagacgcggcggcggccgccgccaccggcggcgacatggtcgagatccggcttgacttcatccaggggttccgcccgcgtgagcacctaccgcccctgctccgcggctgcccactcccggccctcgtcacctatcgacctgtctgggaaggaggccaatatgaaggtgatgacaccacaagatttgagacactacgtttagcaatggaattaggtgtagactatgttgatattgaattgaaggttgcagacaaatttatgagctttattgctggccataagccagagaaatgtaaacttattgtttcttcacataattatgaatatactccatcatgtgaggaaattacaaatcttgtcgctagtatacaagcagttggagctgatatagtgaaagttgcaacaaccgccaaggacattgtcgatgtatcacggatgttccaagtgatggtacactgccaagtgcctatgattggactcgtaatgagtgaaaaaggtttaatgtcaagagtgttagcgcccaagtttggtggatatcttacatttgggatactgaatgctacaaagacatcagcttctggacaaccaacagttgaggacttactggacatttacaacataaagtgtattgggcctgatacaaagattcttggtcttatagccaacccagtaaaacagagcaagagcccaattttacacaataaatgtcttcagtccattggatataatgctgtttatcttccacttcttggagataatcttgctagttttctggagacatactcatctcctgacttttcaggatttagttgctcacttcctttcaaagtagatgctgtacagtgttgtgatgaacatgatccagttgctaagtcaataggagccataaacactataattagaagaccagatggcaaattagtggggtacaatacggactacattggagctatatctgctattgaggatggcattggaggtccagggtcaaaggatgctgtcatctcaccattggctggtaggcttattgttgttgtaggagctgggggtgctggtaaggcaattgcttatggggcaaaggagaagggtgcgagggtagttatagcaaatcgcacctatgagaaggctgtacgtcttgccaatgcaattggtggtcaggccctgagattagaagacctggaaactttcagacctgaagaagggatgatccttgctaatgcaacatcattggggatgtacccaaatgttgatggtactcctattccaaagaaagccttgggtttctatgatgtggtatttgatgccgtatatgccccaaaagttactcggcttcttcgagaagcagaagaatgtggagttaaagttgttagtggtgtggaaatgtttattagacaagccatgggtcaatttgagcatttcaccggtggtatagaagctcctgaaagcctgatgcgtgagatagcagcaaaatacacctagcaggctaatggcgaaaacctatctttgatgaatatttgcccaaagattttctcgggctgagtgaataaatgttttgcagttatcatgtttgctgttatgttagatttagccgacttgtcacctgcacactgtaagattatgttgccatgctatagtgttcttgtacctgcaatagaagagttgcaagaataaagagtcagcttagaaccaacgttatgatgaccaagggggaaaatatgcatcaaacaatgattcagttggcagttggttcagtgctgatcatggcggttatactgtcctgcataatttcattgtacggttccgatggcatatttctttttttggaaaaaggaaaatttattgataactcagaataatatcaagattatactgttacaaataaagaggctcaatt

SEQ ID NO: 111120 - DNA, 1380 bp, Zea Mays
cacttttccctcacgtctctttctctccccaagccgcctcctccctgccgttccgtgaagcaccaggccacgtgcgacgtgcccttatctcctacaacccgtcgttggtccgatggtcattccaagccagtgccgttctcctttggccgtccctgctcccgctgtgaggtcacccaggccacagcctcgtcgaaccgcatagcccctgcgctccttccccagccgcgcttaacccagccctccctgctcgatctccttcgagccgtaatggctccctggcgtgtccggctccctgcccctctccatggcgtcgcccagctctagctcgcccccctctgatctatgcgcaggggtttcttccatggcgagctcccctgcaaatttcatctagccgccggccgagtttccttggtggtcgcttacccccagcatcggccagagcttgctgtcattccccaacaaacatatggctgtaggtgagagatttcagaagtctgttggatgaagaaaagagaagtgaaatttgtgcagcgcccgtcaggtgttaggtttaatagcacaaataagcttggattcacaccagagtttctagggcgtgtgaagcttgtaacctcctttgcatccctgctcggtgttgggctctacaactattttctgaaggaagttcctctaaggaaaatatttctcgtgacaaccattatatgttcagctcttgggatgacacaggtgcttcttgtaactggattaaatcggaagtttgggattagtgacaagtggttttctattggtgattcattaatcatcacagtccttggtcaggtactggagcaactgagcggccagtcaccggtattttccaaggcaaggtacactgtgaggtcgtttgggatccggcgcaatgagaagatcgcatgctatgtgacggtgcgggtgagaaggcaatgcagctgctggagtgtggcttgaaggtgaaggacaacgagctgctgaggaggaacttcagtgacactggttgctttggatgtggtatccaagagcacattgatcttggcatcaagcgtcggagaagaagcagtcgaacccgatgcgggagatgaaggtccagaagcttgtgctcaacatctccgtcggcgagagcggtgatcgcctcacccgcgccgccaaggtatatatgcccattccccagaatacttctctgtaggttctacctgctgtttctttcagttcgttccgcgctcgtgtgacctagagcaaatgtgtttgagtcgcatctagttgtgccccactagtccacttccatttttatgagaattagttctgcactgcagcctaatctcagctcctcaagctgtccaatctcctgtgttgttgacaccactt

SEQ ID NO: 111121 - DNA, 103 bp, Zea Mays
atgtgctttttcaagctctttatcctgatcacaaatgcgagtagcctgatccttgatccgaacttgagcttcgtccaggtttgtttcagcatttttaatcttc

SEQ ID NO: 111122 - DNA, 1725 bp, Zea Mays
actggttaacctgtgtatcatatatattaataaaacttctgatttttaacacctacagtcccgcaaacactgagacctattgagacctctttcatcctacaacatcgaccaatttactaaagcgactcaggcaatctaataaatattatacctagtcagtccatccatcaatccactaacacgaataacaaatttacttaccctgactaattcgacgtgatagttgcaagcatgatgacggtttctggttgacgtcattgatcacacacgtctggcgagcgaggcacatagtttccattcttgaccaaatacccgtgggattcctttttgtcgagatggtgacgcgtggccagcaccagagtgtcttcactgtttggggcttggcgtagacgagaatggcgatcgacgacctcgacgtgccagcgcgacgatttccattcgacgaagaggatggcagtacgacttattcgagttgaggcgagcgtgatccaggtaccacaacagtacgccgacaagtccacgacgacacaacgaggtgatcgagacaacgcacagcctaacgggtaaagatggcgcgacggctggcaagctaggctagctcggataggaataaccgacgtgatgaccatagcgaataggaaatcgacaaccggcaaaaaccgatagccgaacatgaattgtacagatcgacgacatgaggcccgatctggtgagcacgacaaaaaggagggcgtcgctgccgctgctccgagcagcagttcttgctgctgaggcagacgagcacgacggaggccggggtctgggcatcgagccagcgcatcatgtggtttggaaaccacaccacccacacgaagcgcttgccgcagagcaccagaccatgcgccgttcgcgcagagctccaaaattgcgcgtcgaactaggagccgaggcgagcgcggcaagtgagctgagggagcgtgacaggaaactcaacggcgacgatctgggcgagcgcgacacaagagaccagagaaagagacgcgctgacgaggaagcaggaagccgtgatgaaggagctcggcgtgcagactaggcgagctgggcgcgcggcaatcagagagcaggaacccgggcgcacgcgcagggaaacggacaccgcggcgggccagggaacgacactggacgaagcctgcgacggccggaccaacccagaacacgagcagggcgcaccgcagctggagggcgagcgccatggggaacgagcagagggggacgcagtccgagctgggaggaggcgagcaccagagatgcatggtggcgttcgcagagcttgccagcggggaagaagacgatgggagagggagccgagctggagctagaagaagcttcggccatgggggatacagggggctggggcgagctcggggaggaataccgcggcgcgcaggaaaactggacgctgagcaagaacacggcagggaggagctcggccgggcgccatggggcgagctcggggaaggtccacggcggggttcgcggcgtaggatgaagagaacagggcgcggccatggcagagaagaacgcgcacagggcgacggcaaggctgagcggcgcgcagggaggagcgcgcgcggcgagcagagcaagcagccgagggcgtggtggagtgagatgggaggagcggctggaggttgaagagagagggcaacgcggcagggaaaggggctcagcgcggcacagaaaaag

SEQ ID NO: 111123 - DNA, 3237 bp, Zea Mays
ttccacctccgtctgtcgtacccgtgtggttgagctcggcttcgagctcccatcccccatgcgccgtccgtcacctcgtcctcggcgcgcgcctctgcttcctggtagccgcgcccagcttcctctcttccgcgcgccccctgcttctccttggccggggcttcatcctctccctgctcgccatggctggtcgagcttttttccagccacgaagctcccatggccgccgagctcagcctttgctcctccctgcgtcgcgcgcctggcttgctctccagctcccgtgcacgcccggatcctcttcctcccaggggctcggccgcatctccatctcccagcaagcgccctaccgaagccctcccatggcgttgttcctccctggtgccgagtctctctctgccaatcgcccatggcgcccagccgcttggccttcctggtactcgctctccctcagtgccctgtcccttgtacgacgcccttcctgctccagtttgtatttttttatagctggccgttgttcacctcgccgtcatcgacctcccctcgccctcatcctctgcagggccagccctgagggtgtgcagggtatgccaccgctcagggcccccaatatccgtaggaccccgtatacctagataatgtccaaatacatatatgttacaggtaaatctctattctcgttttttgttatgtctctgattttttggcaattatctcttcgaggtcgtgcaacattttgctaatgacgaatactaaatattaattgatgcgggaaggtcggaaggtgttgtacatatgtgcttgtggcgttgctcaattctagcctaccggagggtccaccctgataacctacgttgtttaatccaagtttagtttgctgaaatttgtttccagaaaatttgctctaatgtatttaaatttggtttactgtgcattttaaggtttaggctagtttgacaaattaaaagtaaaaaactcgctctcaaagcaaatatagagttatattacataatatgtataattttataactcataaaatattgtaacagtctccagtcatatcattttaaaaaaaaatgtgtaaatcatcaacttcttttatttttcagatatcatttaaagttgaaaaatagcagaatcaaactttcgtataggacctctatgtagattttcgcttagggccccccaaaatgtcaggaccggccctgatcctctggctgccgcccctccctattcttggtggtcgagtcttctcccatggatgctggccgtcgctgccctccctggtgctcgacaaaatgggtgacctacctcattctcgaccttgctgtggtggtcggtcacgccatggtcgtggatgctctacattctcgctatcgcgtctttaattgccgttggaaaggaaggtttcaggtttcggagctgatgaagtaagcgaagctcgaacgacgctctctaggtgtccgtcggatttccgatgccagacgtcgtcctctctgttccgtgtctccctgcatcttcatcgatgtagcatcggtcgtcaacctcgccgtggcagctctcaaactaggagtgttggtgcaaaaccgtcgtcaccccgtcattgcaggtcgctgcgctatcgtttgcttatgtttcatcatctgcgccatggcacttgctattgtccctagtttaattctatgtgtggttaatggtcgaagtctagattgcaaatgccaattttaatgaagggtatgtgtaggcatatatgtgatgagctgtcgaattaatgatatgtaagataggtctagtgtttctatcggctagttgtcatattcgactagaattatgtgagccaattatatggatacaatgatgacttgctttagaaattgtcgtgtcgatgttcagcatcagtgaaatgtcatagatgggtcgtcggtcatttagattaataaccttgtttaggtaatcaagtaaaatctgattgtgcttgagctgaatttttgctacacgcatcctcattattgtggtaatagttgagtgaagcaaatcatgttttctgtgaatgtgtgatatataaaagttgtagataatttctttatcttgctggtgtaaaataatcatggccataggtctagtagtttaaaagatatgattttcttaagtccagtttcagaatctgtccaaaattctgtacaggtttcgaaaattggattgtttggctaaactaaactgagaatcagcccttagtaattatagaagaattgtagtacttttcttaagctttccaacaaattttggatcaccctttttggtgatctataagttaagttacagctgtttgaagtgggatctctgaatctgtccaaatttggacagcagagcctttctcatgtcttttgactttgatatgtattgaattaacatgtgatgtttataaatgaattgtaaacaattctattagctttctaaaaatttctaggatcacctgatttggatgcctgaaactctagttatggattttttaagtaagtagtcgaattctgtccaaatctggataaaaattacgtttagtacagtttgacctttctaaaggtcgaatcttattatgatgataatacaaaagttatagaggactttataagctttacataaagtcctagtttactatttttggatgcatatcttgtgagttatgagctaaacaaatagttgctgttctgctgtccaaattcagcaaatatgaaatgattgcttggaatttcttttgtgtgggtaactagatttggttagttcttgtcttgattaataaagtcttgtagttgcatatggttatttcttttctttctcaatgctctacttgttagaatatttagtgtgctactttgtttaattggtatgctatacgaggtagcttagagatagttgtttagaaagtaataaattgtatctatctatattttagtcctaaatgtctagtattgatgagtctaaattttgctagattttcagtgttatgatctagctaaagaaagtataggaattatgtatggtttattattctgatgtttgaattaggtctgattaaaactggaagatcctgattgttgtgttagaacgtcataggtatctattgtttccctataagagttttaatgcatgctttaagtgtttaatcctcgtccatatagtattatgttgtagtatgttattcctctgtatgttcattcatgtgcattatgcatatcattt

SEQ ID NO: 111124 - DNA, 1393 bp, Zea Mays
cataaaatcaacgcatggcacactgctgtatgacagcgttactggcttactgcagcggatctggttccgtggaccgcgagagaggtgagtaggattacaggaaatccaatccaacccgcgccggctgcgtggccactgccgccgctcggtcttgtgcttgtccaggtccaaccgtccaaggataaaaaatgagcacgaacctgggaggagcctcttgcttcggcttcggcttgactcagatgcagcccgccgccgttaggctccggttgccgcctgctcgcgccgcggacacttcgtcctcccagtcgccggcgcgcctgacggcggtgctggagcaggtggaccagttgctaagccaggggaacgacatggccgcgctctccctcgtgcgcagtacgcaggggggtgacggcgggctccgggcctttggcgccgccaggcaggtacctcaacgactttataaattggatgagcttaaactgaatgggattgatacttctgctttcctatcacccgtagatctgacactaggatcaattgagagaaatctccaaatcgctgcagttctgggagggttttctgtatcagctgcattggaactttctcaactccaaatcctgtttctcatactaggtctactatctttgtggtccgtggactttgtatattttggtggtggggtgagaaacttggttcttgatacaattggtcactatctcagccagaagtatcacaacagagttatccagcatgaagctggtcacttcttgatagcttacttgcttggagtgcttccaaaaggatacacaatcacaagcttagatacacttatgaatcaaggatcgcttaatgtgcaagctggagcagcttttgtggactatgagttccttgaagagatcaatacaggcaagctatctgccacgatggttaacaagttctcgtgtatagcactagccggagttgcagcagagtatcttctgtatggacgtgcagaaggaggattagccgacatcaataaggtctgagcatcaattgcttctgctgggttcatatttcaccgtgttttatgttttgtgtatcccatataccttatgcgcagcttgatggattgctcaagggtttgggtttcacccaaaagaaagctgattcacaggtgagatgggctgtgctgaatactgttctcatactgcgtcgccatgaaaaagctagatcgcagcttgcagaggcaatgtctacagggaagtcggtgggctcttgcatccaagtcatagaagagtgtataagcactgacgatatttaacgtggatatgttgctgaccctacgttgtctcaatggcatgttatcaacaacaaatcaaggcttgtcaatccaaaagaggatttgagtattaaa

SEQ ID NO: 111125 - DNA, 1448 bp, Zea Mays
cataaaatcaacgcatggcacactgctgtatgacagcgttactggcttactgcagcggatctggttccgtggaccgcgagagaggtgagtaggattacaggaaatccaatccaacccgcgccggctgcgtggccactgccgccgctcggtcttgtgcttgtccaggtccaaccgtccaaggataaaaaatgagcacgaacctgggaggagcctcttgcttcggcttcggcttgactcagatgcagcccgccgccgttaggctccggttgccgcctgctcgcgccgcggacacttcgtcctcccagtcgccggcgcgcctgacggcggtgctggagcaggtggaccagttgctaagccaggggaacgacatggccgcgctctccctcgtgcgcagtacgcaggggggtgacggcgggctccgggcctttggcgccgccaggcagatctgacactaggatcaattgagagaaatctccaaatcgctgcagttctgggagggttttctgtatcagctgcattggaactttctcaactccaaatcctgtttctcatactaggtctactatctttgtggtccgtggactttgtatattttggtggtggggtgagaaacttggttcttgatacaattggtcactatctcagccagaagtatcacaacagagttatccagcatgaagctggtcacttcttgatagcttacttgcttggagtgcttccaaaaggatacacaatcacaagcttagatacacttatgaatcaaggatcgcttaatgtgcaagctggagcagcttttgtggactatgagttccttgaagagatcaatacaggcaagctatctgccacgatggttaacaagttctcgtgtatagcactagccggagttgcagcagagtatcttctgtatggacgtgcagaaggaggattagccgacatcaataagcttgatggattgctcaagggtttgggtttcacccaaaagaaagctgattcacaggtgagatgggctgtgctgaatactgttctcatactgcgtcgccatgaaaaagctagatcgcagcttgcagaggcaatgtctacagggaagtcggtgggctcttgcatccaagtcatagaagagtgtataagcactgacgatatttaacgtggatatgttgctgaccctacgttgtctcaatggcatgttatcaacaacaaatcaaggcttgtcaatccaaaagaggatttgagtattaaatccactcttaaggctagtttgagaaccttatttttttaagagattttcttttttttttaagataaattagtttattttctcttgagaaaatagaaatctcttggaaaattggagttgctaaactagcccttagtcaaaaatgactagtagagaatttaatcttcaattgccttctggatttacgtaaccgaacaagctctattctatgtta

SEQ ID NO: 111126 - DNA, 1305 bp, Zea Mays
cataaaatcaacgcatggcacactgctgtatgacagcgttactggcttactgcagcggatctggttccgtggaccgcgagagaggtgagtaggattacaggaaatccaatccaacccgcgccggctgcgtggccactgccgccgctcggtcttgtgcttgtccaggtccaaccgtccaaggataaaaaatgagcacgaacctgggaggagcctcttgcttcggcttcggcttgactcagatgcagcccgccgccgttaggctccggttgccgcctgctcgcgccgcggacacttcgtcctcccagtcgccggcgcgcctgacggcggtgctggagcaggtggaccagttgctaagccaggggaacgacatggccgcgctctccctcgtgcgcagtacgcaggggggtgacggcgggctccgggcctttggcgccgccaggcaggtatattttggtggtggggtgagaaacttggttcttgatacaattggtcactatctcagccagaagtatcacaacagagttatccagcatgaagctggtcacttcttgatagcttacttgcttggagtgcttccaaaaggatacacaatcacaagcttagatacacttatgaatcaaggatcgcttaatgtgcaagctggagcagcttttgtggactatgagttccttgaagagatcaatacaggcaagctatctgccacgatggttaacaagttctcgtgtatagcactagccggagttgcagcagagtatcttctgtatggacgtgcagaaggaggattagccgacatcaataagcttgatggattgctcaagggtttgggtttcacccaaaagaaagctgattcacaggtgagatgggctgtgctgaatactgttctcatactgcgtcgccatgaaaaagctagatcgcagcttgcagaggcaatgtctacagggaagtcggtgggctcttgcatccaagtcatagaagagtgtataagcactgacgatatttaacgtggatatgttgctgaccctacgttgtctcaatggcatgttatcaacaacaaatcaaggcttgtcaatccaaaagaggatttgagtattaaatccactcttaaggctagtttgagaaccttatttttttaagagattttcttttttttttaagataaattagtttattttctcttgagaaaatagaaatctcttggaaaattggagttgctaaactagcccttagtcaaaaatgactagtagagaatttaatcttcaattgccttctggatttacgtaaccgaacaagctctattctatgtta

SEQ ID NO: 111127 - DNA, 1506 bp, Zea Mays
cataaaatcaacgcatggcacactgctgtatgacagcgttactggcttactgcagcggatctggttccgtggaccgcgagagaggtgagtaggattacaggaaatccaatccaacccgcgccggctgcgtggccactgccgccgctcggtcttgtgcttgtccaggtccaaccgtccaaggataaaaaatgagcacgaacctgggaggagcctcttgcttcggcttcggcttgactcagatgcagcccgccgccgttaggctccggttgccgcctgctcgcgccgcggacacttcgtcctcccagtcgccggcgcgcctgacggcggtgctggagcaggtggaccagttgctaagccaggggaacgacatggccgcgctctccctcgtgcgcagtacgcaggggggtgacggcgggctccgggcctttggcgccgccaggcaggtacctcaacgactttataaattggatgagcttaaactgaatgggattgatacttctgctttcctatcacccgtagatctgacactaggatcaattgagagaaatctccaaatcgctgcagttctgggagggttttctgtatcagctgcattggaactttctcaactccaaatcctgtttctcatactaggtctactatctttgtggtccgtggactttgtatattttggtggtggggtgagaaacttggttcttgatacaattggtcactatctcagccagaagtatcacaacagagttatccagcatgaagctggtcacttcttgatagcttacttgcttggagtgcttccaaaaggatacacaatcacaagcttagatacacttatgaatcaaggatcgcttaatgtgcaagctggagcagcttttgtggactatgagttccttgaagagatcaatacaggcaagctatctgccacgatggttaacaagttctcgtgtatagcactagccggagttgcagcagagtatcttctgtatggacgtgcagaaggaggattagccgacatcaataagggtttgggtttcacccaaaagaaagctgattcacaggtgagatgggctgtgctgaatactgttctcatactgcgtcgccatgaaaaagctagatcgcagcttgcagaggcaatgtctacagggaagtcggtgggctcttgcatccaagtcatagaagagtgtataagcactgacgatatttaacgtggatatgttgctgaccctacgttgtctcaatggcatgttatcaacaacaaatcaaggcttgtcaatccaaaagaggatttgagtattaaatccactcttaaggctagtttgagaaccttatttttttaagagattttcttttttttttaagataaattagtttattttctcttgagaaaatagaaatctcttggaaaattggagttgctaaactagcccttagtcaaaaatgactagtagagaatttaatcttcaattgccttctggatttacgtaaccgaacaagctctattctatgtta

SEQ ID NO: 111128 - DNA, 1524 bp, Zea Mays
cataaaatcaacgcatggcacactgctgtatgacagcgttactggcttactgcagcggatctggttccgtggaccgcgagagaggtgagtaggattacaggaaatccaatccaacccgcgccggctgcgtggccactgccgccgctcggtcttgtgcttgtccaggtccaaccgtccaaggataaaaaatgagcacgaacctgggaggagcctcttgcttcggcttcggcttgactcagatgcagcccgccgccgttaggctccggttgccgcctgctcgcgccgcggacacttcgtcctcccagtcgccggcgcgcctgacggcggtgctggagcaggtggaccagttgctaagccaggggaacgacatggccgcgctctccctcgtgcgcagtacgcaggggggtgacggcgggctccgggcctttggcgccgccaggcaggtacctcaacgactttataaattggatgagcttaaactgaatgggattgatacttctgctttcctatcacccgtagatctgacactaggatcaattgagagaaatctccaaatcgctgcagttctgggagggttttctgtatcagctgcattggaactttctcaactccaaatcctgtttctcatactaggtctactatctttgtggtccgtggactttgtatattttggtggtggggtgagaaacttggttcttgatacaattggtcactatctcagccagaagtatcacaacagagttatccagcatgaagctggtcacttcttgatagcttacttgcttggagtgcttccaaaaggatacacaatcacaagcttagatacacttatgaatcaaggatcgcttaatgtgcaagctggagcagcttttgtggactatgagttccttgaagagatcaatacaggcaagctatctgccacgatggttaacaagttctcgtgtatagcactagccggagttgcagcagagtatcttctgtatggacgtgcagaaggaggattagccgacatcaataagcttgatggattgctcaagggtttgggtttcacccaaaagaaagctgattcacaggtgagatgggctgtgctgaatactgttctcatactgcgtcgccatgaaaaagctagatcgcagcttgcagaggcaatgtctacagggaagtcggtgggctcttgcatccaagtcatagaagagtgtataagcactgacgatatttaacgtggatatgttgctgaccctacgttgtctcaatggcatgttatcaacaacaaatcaaggcttgtcaatccaaaagaggatttgagtattaaatccactcttaaggctagtttgagaaccttatttttttaagagattttcttttttttttaagataaattagtttattttctcttgagaaaatagaaatctcttggaaaattggagttgctaaactagcccttagtcaaaaatgactagtagagaatttaatcttcaattgccttctggatttacgtaaccgaacaagctctattctatgtta

SEQ ID NO: 111129 - DNA, 95 bp, Zea Mays
ctgaaatcggtgcccagccactcctctacagccgttgccatctccctcctgtagctcgtcttctacgcgccagatcttcgtccagccgccttggc

SEQ ID NO: 111130 - DNA, 325 bp, Zea Mays
gtagtaagtcacttgtttactccatgatgacaatagcaagcagatcacggtggtgcctatggatgctacaacaagaaagatcaaaagttcttttggatggatgcaactacatattttgttttgtattttctccaaaagagaaatttgcaagtgaacttaaaattgtgaaaccaacatgtggttgtactagctagtatcttgagctttcacaagccaaacttagtgttgttgctgcttattttgatctttattacaacaaaagcaaacatgtgaactttatctatgaatgcagtacaattgttattgtcatgaatgaaaacatgag

SEQ ID NO: 111131 - DNA, 231 bp, Zea Mays
atggcttcgatactcgaaaaagccggctgcgaccatgtcaaggctgtcggagaaactaacttccgcatggccattgatgatatcaaagctcctttgaagactatactgaacgctgcaaagagattttgcttagatctatgggacaaaggaggccgacagctagctgccctggaagctgaagaatacaccacgaagaacaaggagttgaaaaagacaaagaaagcaaagtga

SEQ ID NO: 111132 - DNA, 392 bp, Zea Mays
gtttttctccctgacgatgattagctctgttcaaaagtgtatcacatttcacaagaaacaagcttgcatatatgtcctccaactgtccagatcagtaaaagtatcatgttgtagcattttatgcagaattgagaacaatactgtaaaggacaaataaataaatacattgactacgataacaaaaagcaaacgtaattgcagctagtgattaaatacagataccttattacatgtcatcaattttttcctcaaatatttttttcatgaacatgcaagagagtggtgtatcattataatacaaagggtaaagaatcctgattaaactcacatacccataggctcacagatggcaaatatgcctttccacatacgtgaacaaacaagttggaacg

SEQ ID NO: 111133 - DNA, 919 bp, Zea Mays
atccgtcgccagttccttaatcctcatccagcgtgggatttttttggttgccgacccagcctgtcttccacctccgtcgctccctggtggccatggcgagctcccctgcgatgcgcctccacgtcccaggccagctcggcctcctccctagcaccgtcccttctcctccctgctgcagctcgcccatctccctgaacccctccaccgcgcccctctccctggcttccgagcttcaaccatggtgtacggcgagatggggctcgggtacatgtaccactgcatcaccatggggagatcaccagggcctccggtgccgtcggtctcttctacggcgcacaccctgtcttcttcctccagacccgtcactccaccggccgtgcttgtctgcagtgcccatggccggtccgcgctcgcgcccacacgaagcatcaggagttcaggtgcgccgaacggggggaagaagcagccaaccacactcgctactcaccagtcatcttcctcgccttgtcgccgctcgccgtcgcttgtcttcagcttgatccccgctcgtcatggcttgtcttcagctcgttcatcttcatgctcggccctgactctaccagcgctcccctcgtcgagctcgtggtcgtgcttctattcctcgctccctctgtgttcgatgaaatgtcgagctaggaatcaatgacctcgcctcgtcctcgcaattgtggttggcttgtgtcgttgcctgccccaccgtggtgctcaccaaaacacctgaacccgagtttcgtcgccgtccgtgcgaatatcatgctggttcgatcttggtaagcaaagtagttattcatgttatttaaattgatgaatggattggttgtatgtgttaattgtgatgggtgatgaaatttaggcttgggtactatttacgagaaaaata

SEQ ID NO: 111134 - DNA, 252 bp, Zea Mays
atggaggcaaaacacccaggtgctccatgcgcgccatgggcatacacccagccgatgccgaggtcggcccagggaggggcaccgagcgctactgtccatggcgcaggggacccagacgccatgactattggccggagcagaggcgtcggtctgaatgggggcgctgagccagagaaaagcaaaggtccgaccagggcgacggcggctcacctgctcgagctgggggccggtccggccatggccagcgactga

SEQ ID NO: 111135 - DNA, 123 bp, Zea Mays
gtccgtttacatcgtgcctagaatagtcacgaaaattatccaaacgaggtttagccagaaccttctaaactgttactcctttgatttttccgtttcgtgattcggaaaatgaagtgtgtagcc

SEQ ID NO: 111136 - DNA, 420 bp, Zea Mays
atggcgtctgggctcctcccctccactatctccctcctcaagcgcgcactccctgctcctccatggccgcaccgtcttcccagcagcgccccctctctgctcgggccatggccaccacgccgagttccctacatgcgctcgaccccccagctcgatctccctcggtcgtgctcactccgggccgctggcgccgtcgctgagctcatccctgctatggtgttggctaccgcaacgcctgctcccatctccctaatgcctcatcattcctgttctccctcacatcgtgagctcgcctctgcgtgtttgtatggcgccacaacagtctcataccaacaaccactaccgatgtccgtggttaggacagaaggtatggtgttcggaaaataccttatgatcgacatcatctcaattcgtgtctag

SEQ ID NO: 111137 - DNA, 333 bp, Zea Mays
gtactctacataagtgtactctaaattgagcctaactaagtatataacttgacgtcaatgctctcattgtggttttcatcagatacatatgatctttctgaaaggggaactattccatctcgaccatggaaaagcttgaatgctgactcaaagcctgacccttcctaaaaaattggacccttgcctccttgacactagtacaatttggctctatacaagcggtaggctttttacatcacaggcggttcggttagaaaaccgcatgtgacgtcccaggcggttcagtacgcctgtgatgtaatagtatcacaagcggtttttgtttaggaccgc

SEQ ID NO: 111138 - DNA, 387 bp, Zea Mays
atggcggcttcctctgtcggccttgcgctcacccagggccgcgcagcccctgctctcctctccagccgagcttctccttcaccttcccgtcgcacgctcctcaagttcccagcaccggtcgctcctcctctgtgtgcgccgtcttccctgtatcgcgtgcaaccacgccatctgcgtgcctcccttgctccggctgctcgtcgtggccggctccctgctcggccgctcatctccctgtgctccatctccagctcgtcgtcgcttggtttccagctctgcatgcgccctgctccctgctctcggcgtcccaatcttggccgcgccttccctgtccttggagctcgccagcgccagtgcctcgccggtgttttcgccgtcatgccatga

SEQ ID NO: 111139 - DNA, 369 bp, Zea Mays
atgcttgggtctctggtcgcgcgtctttctatctcgcgctcgtctcgtccgatgcctcggcaacaccgtggtcatcctccctcgcggtgttgttgtttaccccactattgtagtcgtgcctcatacgctgctcgtctgaaatacccaagccaaatgagcatcatgcgcgactcaagttcggttcgtctagattagtcagtcaaggagagattccaagagttgtggattgaggagaaagtgaaactcagtttaatgctcgccatgtgtttgaatgaagactttattcgcagactattagcattcttgcaagcttcgagttggagttactttggataagaaatccttgttgttcgagagaagcgaggcctg

SEQ ID NO: 111140 - DNA, 1690 bp, Zea Mays
gtcttctctctccaagccacggcgtcaagccgctcctccgctcctccccggcttctcctccgcgcagctcctcctccagcttccctacgcattgctgtagccccttcccatggtcgccgcagcgtcacactcctccctgccgatctctccctctcactgagtccttccccagctcatcacgcccagctcggatttcttcttcccggcgcccggctccagcgcacccacctccccaagctcgtcgcgaacccccagctccctctgcccagctcgcgccctgctcccctgcgcgctggtcggcaatcggcatcctgcgtcgtccacagttcgctggccaagctccatcttccatagtcgcgccctggctccagcttcctccctgcttcccagctcgcggcgcccctgcttttctctctctcctccatggccacgtcttgccgaggtccctgctgtagctggttcgccggtgcccgaacctcgctgtcgacctccctgttcttgccctcccatcacgcccaactgcttgcctgtgctcagctactatctgcggcatcgcgcgacgttcgtcatctatgctagtccatgccgcgcgacccatctgcgcgcgatgctccctactcgcatccgtacagaactgcgccatgtcctgtactgagctatgcatccgcgcttcctccaacagcagctgtgtcagcagaccctcgatgtcgtgctgtgcactgggactgttgtagctcgtctgcatgcccagccgtttcaaaccacgccgccgactctcggcaccacgagctcatcttctcttacacacatctccgcagaccctgccttatcacacgtgtgcgttatcgagctcgtcgtcgttccgtacgtcatcaagaaatcccgagagtgggtaaagaagcgattctcgcgtggcgctcgtcaaatattcaacaaacttcttgaacatattatcgttgttatttctgcgaaatccaagtcggatttaggtacgttaattgatcacatgatgcgggggactaaagccgagtgaccccaagtaatgcaaagagtcgactactctgagaaacagtgtcgatggaccacaggtgaatggactgaatgaatgccaagacaaaggatggtcgccaagtggacgtcgtctaacaaacattaacgtagtatttattccagcatatccttgagagtctttctccttagtcaggtaagtcttgctgagtacttgtgatgaggacatcactcccatggatacaaacaacactcctcaagttgactacccaattacttttgcacgcgctcgacaattgaatttataggtgatctcgttcctaagtaattattcttgtgcatttgagagtagtatgctacctaatgatttaattgtacttaggaatgaaggggaggaccagctaggacgtcgggatcaagatggaggcccaagttgacgttcagaatctgttccggcgctgcgacaccgtcttttgggccatgtatcttcgttgagcccattaggggcgcgtccagggtttgcgtaaccctagagtctttattaatagctgccacatccttgttagaggcgggttttgcttatgtttagatctgccaagaacagtcgccgtagatcggtttgtgagaccccaacttgtgagcttaatcattcatccgcaatattctagattgtgttctttct

SEQ ID NO: 111141 - DNA, 654 bp, Zea Mays
ccgggtgtcgtctgttgtaccccagcactcgtgcttgcccctggcttgcgttagcgctcgtgcgcctgctcgttgtcactgcggcgcactcgctcttcgtccatcaggcttcttgcgtgctcgtgtttgccgtcgagctgttgaacccgtcctcccttgctcgtgacttcatcgtcgccagagccctcactggattcgtgtcctcgccagctcgctccagacttgatctcgtcgttgtttcgtgcgtcatcaagaaatcccaagaatcgggtgaagacgaagctagcagcgtgatattccccaagtgctcgacacaagggctgaaccaaaatccttgccgtgttcgcggatagcgcatcagatttagtatggtaagccgattcatatttttgttagcttaattattggtttgatgaatatattgtgtacataagtataaagtggtcgtgtcacgcgaaactcaagtttaaaatgattattgtgtaagaagaactaataacgtgaagaattgatttagtaatccaaacgattatccgataaggctgtcatcgttgattttgtaggatattttggtagtcaaacctgaaatatttgattaattattgacatgtaaaatatgtgaggcgtgaaataaaaataaaatagttctttgtg

SEQ ID NO: 111142 - DNA, 486 bp, Zea Mays
attttgggttatcttctacacaacaatgctcatttcatgcatatgtgtacgttcaggttaggtcctgatttggatggcaggagaacctcaagcctgtttacatgtgccatctgccagttagacctggagccaagtgaaggcatttcggtgcatgctggatcgatcttctcttcgacctccaggccatgggaaggcccattcctctgctcggactgccgtgagaagaaggatgccatggaaggcaaacggcccagtggcgtcaaggttctgtagtatacagcaaccgatccttgtagcagcccgaaaaatcccacccttcttatttccttttctcgtgaggaccctttcaaagttttacaatttgtttactttgaattcggaagattttaggatgcctcttattatgcgatgaaatagcaaacaaagtaagccctgtgacaaaaggagatgtcgtcgaggaaagaggtcaggaacgcaggaaattaa

SEQ ID NO: 111143 - DNA, 153 bp, Zea Mays
atgctgtttagtcaacttctgagaagggtccttcgctttctttctaaaaataaaagacttcagcttgctcgtctttttaggaggagacagaggccgtattgtttgaccaggtgggattatgtcaacaacaatgcaagttgtatcatcctttag

SEQ ID NO: 111144 - DNA, 653 bp, Zea Mays
cacaaagaactattttaattttatttcacgcctcacatattttacatgtcaataattaatcaaacatttcaagtttgactaccaaaatatcctacaaaatcaacgatgacagccttatcggataatcgtttggattactaaatcaattcttcacgctattaattctccttacacaataatcattttagacttgagtttcgcgtgacacgaccactttatacttatgtacacaatatattcatcaaaccaataattaagctaacaaaaatatgaatcggcttaccatactaaatctgacgcgctatccgcgaacacgacaaggattctggttcagcccttgtgtcgagcacttggggaatatcacactgctagcttcgtcttcacccgattcttgggatttcttgatgacgcacggaacgacgacgagatcatgtctggagcgagctggcaaggatacgaatccagtgagggctctggcgacgacgaagtcacgagcaagggaggacgggttcaatagctcgacgacaaacgtgagcacacgcgaatcccgatggacgaagagcgagtgcaccacaatgacaatgagcaggcgcgtgagcgctaacgcaagccaggggcaagcacgagtgctgggtacaacagacgacacccgg

SEQ ID NO: 111145 - DNA, 104 bp, Zea Mays
gtaattacttaaatatattagttgaaattaatttattaattactcaagacattcatgtaccgacagatgatctgatgctatgttttcccgacagtcagtgtgcc

SEQ ID NO: 111146 - DNA, 554 bp, Zea Mays
atttgcttttgagccacacttgtattttcatccccttccgagccgaaggtacatttataattcaatattgtttctattactctaggataagataataaagttaaatgaataatgttatatgattattcatgttatcttttatgtttcatatgcttcgtcttttgtatactgtgatgatgaaggttcgtccttcatgaccttcgtccggagatcgttatatcctaagggaaataatgcttcgaaggacgaaggaccttatcgtttaacattttctgtgttgccttgttcttagctcatagcatttgagaacaagtccccaacaggaatctcccccgagattcaagaagaagttagcaagaaaaaaaggttggttcatcggatgttcacaagactttacaaacaaatatgccaactatcaagagactcatcactctctcggcttgatgttatgcccagcaacctgttaatctcttcgattgtctaaattattttgtactttgagcgggtaaagacaacttcctcctgattatcaccgattgagttatgctttgagg

SEQ ID NO: 111147 - DNA, 1700 bp, Zea Mays
gtcgtcggtaatatctcgagccatccggcaccaaatcttcctccacgccgccggctgcccggcgcccacaggatacagtccagagaaatgccggccaccgccgcccagccaggtgcaacccctcggtccgcaatccgcttcctccgcctccgcagcacccaaacctcaaacctcgccatccccacgcgcactgctgcgcccccgcacgcgcgcctccgctgccacctttcccgctccagtgattccactccaccctcaccccccaccacccccgaccccgaccccgaccccgaccctgaccctgaatccgaatccgaatccgaagataccctacgcttcgccttcgcgtgtggtggcgcgggcgccggtggtcgcgtttactccgccatcgcgctcgccgacgagcttcacgcctcgctgccgtcctctcgttccctcattatcggtgcgcccgccccgtccttagagtcctcagctgccgccgcggcctcgtacccgttcgcccccgtcccactgcactgcctcccgcgcgggatcctcgccgcggcgctgcacctccgccgattccgcccgcacgtccttgttgctacaggaggcgctcccgcgctacaggcctgcctcgcggcgctcatgctccgcctccccttcgtgatccaggaccaggacgcctctccggctcccgccacacgcctactcgctcccttcgcccgccgcattttcctcgccttcaatgctcccgtgcggctcctccccaaacgcaggtgcgcggtctacgggaaccccatccgcatgtccatcctcaagtgcagagcatccaagactgaggccttggcgcgcttcttcccgagagcggggttattgggcgaacacgaggcccaggtcgtgctcgtgcttgggggagcggaggggtcgccggagatcaatgtggcggtgctcaacgtctactacgagttgctgaggaggaataaggatcggtacattatatggcagacggggacggagactttctgcgagatggagagcctcgtcaaaggccatcgccggctttttcttaccccgttcttgcatgaactggaaatggcatatgctgcctgtgatgttgtaatttctcgagctggtgccatgacgtgcaccgagatattggccactgggaaaccatcaattctgataccattgccaacaattctggaccatcaccaaacgagaaatgcatatatcatggctgatatcatgggagcaatggtcatcactgaagatgaacttgattctagcagtctcacatctgcagttgatgaaatttttggtgatgaaaaattgatggcagacatgtctcagaaggcactaactgcagcccgaccaaatgcttcagctgatataatccgccacatatgttcattgattggttcaacctacccatcatgaaactggttttagacattgcaaagagttcatgtcatgaacacattttgtattgtttttttttgagcaaccgcatcatgtcatgtttttcttgaggtggaaactgatgtttaattccatcatgacagtgcagtttgcgcctgcttccaggtagcgttcaattggctattcttcacatccaatggacgactttttatttttttgatacaatgataatgtggagctgccgttggttcatgaatggtaatgtaaatggtaacaataatgatttagagtgtgct

SEQ ID NO: 111148 - DNA, 1715 bp, Zea Mays
aatatctcgagccatccggcaccaaatcttcctccacgccgccggctgcccggcgcccacaggatacagtccagagaaatgccggccaccgccgcccagccaggtgcaacccctcggtccgcaatccgcttcctccgcctccgcagcacccaaacctcaaacctcgccatccccacgcgcactgctgcgcccccgcacgcgcgcctccgctgccacctttcccgctccagtgattccactccaccctcaccccccaccacccccgaccccgaccccgaccccgaccctgaccctgaatccgaatccgaatccgaagataccctacgcttcgccttcgcgtgtggtggcgcgggcgccggtggtcgcgtttactccgccatcgcgctcgccgacgagcttcacgcctcgctgccgtcctctcgttccctcattatcggtgcgcccgccccgtccttagagtcctcagctgccgccgcggcctcgtacccgttcgcccccgtcccactgcactgcctcccgcgcgggatcctcgccgcggcgctgcacctccgccgattccgcccgcacgtccttgttgctacaggaggcgctcccgcgctacaggcctgcctcgcggcgctcatgctccgcctccccttcgtgatccaggaccaggacgcctctccggctcccgccacacgcctactcgctcccttcgcccgccgcattttcctcgccttcaatgctcccgtgcggctcctccccaaacgcaggtgcgcggtctacgggaaccccatccgcatgtccatcctcaagtgcagagcatccaagactgaggccttggcgcgcttcttcccgagagcggggttattgggcgaacacgaggcccaggtcgtgctcgtgcttgggggagcggaggggtcgccggagatcaatgtggcggtgctcaacgtctactacgagttgctgaggaggaataaggatcggtacattatatggcagacggggacggagactttctgcgagatggagagcctcgtcaaaggccatcgccggctttttcttacccctttcagatgttcctacttgtgaaggttcttgcatgaactggaaatggcatatgctgcctgtgatgttgtaatttctcgagctggtgccatgacgtgcaccgagatattggccactgggaaaccatcaattctgataccattgccaacaattctggaccatcaccaaacgagaaatgcatatatcatggctgatatcatgggagcaatggtcatcactgaagatgaacttgattctagcagtctcacatctgcagttgatgaaatttttggtgatgaaaaattgatggcagacatgtctcagaaggcactaactgcagcccgaccaaatgcttcagctgatataatccgccacatatgttcattgattggttcaacctacccatcatgaaactggttttagacattgcaaagagttcatgtcatgaacacattttgtattgtttttttttgagcaaccgcatcatgtcatgtttttcttgaggtggaaactgatgtttaattccatcatgacagtgcagtttgcgcctgcttccaggtagcgttcaattggctattcttcacatccaatggacgactttttatttttttgatacaatgataatgtggagctgccgttggttcatgaatggtaatgtaaatggtaacaataatgatttagagtgtgct

SEQ ID NO: 111149 - DNA, 958 bp, Zea Mays
gccgtcacaacaccttctcccttcctcctttcagccaacgtgctgctccagccggtcttcttcttccctctgctgtccatggcatgcagcaagctgggagctctctccttctcccatggcgcagcgtctccctcccccaagctctagcgcgcacacggcagcagcaaccagcagattttcctccctctgctgtccatggcgagcagcagcccacaccatcttcccatggaaaccagcagcgcgcaggagggcggcaaggctggaccgacgcccctctgttgcagccatggcacctccctccctctctgctcgtgtgcaggaaacccccttaagcgcagggaacctcggccctcccatggctgccgaccacctctgcccccttgctgtcccaccccttctccctcaaaccagcgcccccctgctcgcgtcaagggtggccagctccctgctgtggccgaccatggctgcccagcagcaggagactttctcccctcggctcccccatccgagcacccaaacagtgcccctccctgctccatttttgctgttcctgcgccctcctctgcccacagcggtgaacccctcctcgctgttcgtcgtggtgcctgccagctgttcgtcaaaatgcgcagcaagccgcgcgctgccggctcgctgtttcgtgaagcccagtggacagcacgccgtcgacgctcaccgtggtttgctgtttttgcgcagcccctttgtcgtcgtcgttcacccccggtgagaccgcgacgatttatgttcgattccgcatcgggttattttcctatgattaattgcgtatgtgctgtttggtttttgttttgtggaggagaggaaccctgcgttttgcgagaagaaggccaatcattcaacgctcgtcggatgtttggagcgatgcacaaatcagaatcaccgtcattcttgcaaacaccgtttgggtttgtttatg

SEQ ID NO: 111150 - DNA, 962 bp, Zea Mays
ctagccgtcacaacaccttctcccttcctcctttcagccaacgtgctgctccagccggtcttcttcttccctctgctgtccatggcatgcagcaagctgggagctctctccttctcccatggcgcagcgtctccctcccccaagctctagcgcgcacacggcagcagcaaccagcagattttcctccctctgctgtccatggcgagcagcagcccacaccatcttcccatggaaaccagcagcgcgcaggagggcggcaaggctggaccgacgcccctctgttgcagccatggcacctccctccctctctgctcgtgtgcaggaaacccccttaagcgcagggaacctcggccctcccatggctgtcgaccacctctgcccccttgctgtcccaccccttctccctcaaaccagcgccccccctgctcgcgtcaagggtggccagctccctgctgtggccgaccatggctgcccagcagcaggagactttctcccctcggctcccccatccgagcacccaaacagtgcccctccctgctccatttttgctgttcctgcgccctcctctgcccacagcggtgaacccctcctcgctgttcgtcgtggtgcctgccggctgttcgtcaaaatgcgcagcaagccgcgcgctgccggctcgctgtttcgtgaagcccagtggacagcacgccgtcgacgctcaccgtggtttgctgtttttgcgcagcccctttgtcgtcgtcgttcacccccggtgagaccgcgacgatttatgttcgattccgcatcgggttattttcctatgattaattgcgtatgtgctgtttggtttttgttttgtggaggagaggaaccctgcgttttgcgagaagaaggccaatcattcaacgctcgtcggatgtttggagcgatgcacaaatcagaatcaccgtcattcttgcaaacaccgtttgggtttgtttatg

SEQ ID NO: 111151 - DNA, 663 bp, Zea Mays
tcgtgtgcatcgcgacagccgtcctgaccgcaaagcagtccgcgcaataaagtttgcccggccgcgacctcgccttgttccctgccgcactcgcctccgtggccgctgcctagcccatctccttgatgccacacgggtcctgttgcctggtcccggtgctcaagtttaccctcggctcgcgtcgacgctcgcgcgtctgctcgtcgtctttatggtgcacccgctctcgtccatcgggtttcgcgcgtgctcgcgtttgccgccgagccgttgaacccgtttttccctgctcaacctcgtcttcgcccttttggtggtcatcgtcaatatggtgctggactacgctcctttatctggtcacactggttgtcgaccttgttggtcctttttgtgtcaaaccagcaagctccgtcaccgtcactcaactactcgccccgcgtgtgctcgtgaattttcttggtcgtgtctgctaagctgaccaacgctccagctcgccgttatcaccaagtcccacgcagtcgtgctgtctttcatcgtcattcattcctttttttcccgccatatgccgcctcgtcatgacgcgtgtcgtcgtctttaatctcaatagatcttctgatacgcgcctcgccatgcttcgcctcctcatgatcaaccccatctggg

SEQ ID NO: 111152 - DNA, 508 bp, Zea Mays
cactccttagaagcctccgacgtacgactctgcctgctcctcttcgctgtgtggcactgctcccctcgcgagctccctcagcgcgcttccatgtccacgctccgtcgacctagcgctcggtctcgctacaccatcggtgaccgagctcatctacttcaacgccaaccatgcctcttgttggagcgaaggcagaaacgccacccttcgctcgaagtctccgctgcttagccgctgctctgacagacaaagcagatagggacacccttcgcttgatcggcaccagacgaagaccggcgacgaaggcatcccacagtgcggcctcgtccagctcagaggcccacgtgcgttccggcccattataacgggccctgcgtggccgccgcgtgttacgggcctaatttgtaaaggcatccctttaattacagtctgtaaccctgctttatgggaatattttgggataacctaggtagctgagggcacatgcgtccttaacacaagcgctggacgt

SEQ ID NO: 111153 - DNA, 817 bp, Zea Mays
tttccctcctcaacctcgtcttcgcccttctggtggccatcgtcaatatggtgctggactacgctcatttatctggtcacactggctgtcgaccttgttggtccttttttgtcaaaccagcaagctccgccaccgtcactcaactgctcgccccgcgtgtgctcgtaaattttcttggtcgtgtctgctgagctgaccaacgctctagctcgccgttatcgccaagtcccatgcagccatgctatctttcgtcgtcattcattcctatttttcctggccatatgccgcctcgtcatgacgcgtgtcgtcgtctttaatctcaatagctcttccgatacgcgcctcgccatgcttcgcctcctcgtgatcaaccccatctgggtcatgtgggcggaagatctcaacaactgtcagatgtccgacgacaagctcgagccagaatttatcaacattctcacaagtattgagtcaggtttgatgctggtacgtttattgaccacgtgatgcggagaaccaaagctgagtcaaccccaagatgacgtaacgggtggactaattcgcaagatgatgctggtggattaacctaaagatggatagtcgaaacaagtatcagaacaaaagatgatcgccaagtggacgacgtctaacaacactaacctagtgttatccaggcaagccccagtgcatgcaaccccttccttgtgtttttaaataatttttacacactttaagtctagcgaaatgtgcattaggtttataggagttgcttggaaaccctttgatgcattgcctaccttgatatccatacctttataga

SEQ ID NO: 111154 - DNA, 1270 bp, Zea Mays
agaaacgctggtgtagcagcctgcgagcgcaggctttagcctctgcgtatcctgcgcgggttggccaccgctgggcatggccaacggacagccgcagccacgctgcccaatgtgcgatgccatctctcccagctactcgccgcacagccagtctcgcctttaagctccatgcatcagcctgccttgcttcattttcttttcagtcgaacgcaggagcacctgcagcatgtagcccggccttcttctacctctagccttcccctgtcgagctctttggtacatggaattttccccctctgctacacctcccctgggctacgcacttgtcctcacctccccgccatctacctcaaccagcagccaccatctccctgtatttcccagccgtggagcccaggatgccgaccagggacaccagcagccggcgtcccaagctcgagcagccgctgctcctcaacgccggcacccgccaagtttcgtcagccggtctgcagctcccctctgctcggacgccagtcgagctcctccctggcgcacctcgccagcagcagagaatctccaagtgcaggcgaccagcatctttccccatggcgcccctgctcctatctctagcccctcctctctgttccttgcgcagacgaatttcttctccaaggccgacgcttgttttccccctacttcatctcctccacgctgcaaggcagtaggcaagtccctgcatcctgctcgacctccgcctcctgtcgtcgtcctcgtcggcagcaagccgcgccggacactctgtgctttggccgcgtcgcgtccaggactcccatggctgcctccctggcgtacctcgcgcagcagccgcgacgccagttcgcgtagccacgtggatctccttgcgtcgcgcccttggcatgctcgacgtaatgccgcagcaagtagcagcagcgacacccttcgctgcgtcgtgctcgccagaacgggcctcacgtcgtcgatctgcgcagcgtctgcgcgtcgtcgtcgaaacccgcgcccttgtcgacgtcacgcctcgcgcatcgctcgtcggcaaagagcccaaactaatggcatgcatgcgcgatgtgagtcggccaggttgttcgccttgaatgatttgtgatttattttatttacgtattcggtcgatgatgtgcctgcatgtgaatatgtgcgtgaaaatataattgtatgaatggacgcgtgtagagaagaaaatgaagtagaaaagaactcggacgtttttatattttgataagaaaga

SEQ ID NO: 111155 - DNA, 503 bp, Zea Mays
atttgtgaaacatggcatatctacttagtacctgcattctttttgttgcttgttgatgatactaatactatctgatataactagttgccttttctctcttcggtaagaatctgcaattaaatttgacatccattggttatatattttttccttgttcagttaccacacatgctgccatctgaaaaggcattttcagctgctgtatctgctcttggcttctataacaaagacgtgatagtagtttatgatggaaaggggctgtttagtgctgctcgtgtttggaagtcagacatcacctagagctagggtgtccattcttgacatgtttctcttagtgataggtggatactgtctagctaggaacagagtcctgagggattgatggacgcatgcatcttcaatttctgtgtgttgtattactactggtacaatcttcaattcttgtgaacttatgtatttggacttgtgtcaatttgtgatatgaacatatatccatgtgtttg

SEQ ID NO: 111156 - DNA, 331 bp, Zea Mays
atggtcgtgccctgcttggcttctctggtgcacgcgtggttcgccggccaagtcccctcaccggcatcctccacagctcacccgtggccatcgctctgccaggccacgtccacctcgtctgcctatgcccccttctccaacttcaaacgcctcctcctaggcgccacttgcaggaactcagactcttccctccactgcgaccttccccgcctccctttctccgtctcccatgccgccggtggcggcgccgtcgtccctgttgatcacattggacaccgctgctcaacgccctgtaccagttcaccatggcctacatctactggagacccgg

SEQ ID NO: 111157 - DNA, 273 bp, Zea Mays
gctcgcttctgctggcgggttggccgtggaggcacagtcggccgtggcagccaacgcgtgcaggccacggaggagcgcgcgacgggactggccgtcccagctccatggtcgagctccctgcgtgcagccgcgcgctcctctactcggtgagaaatttgctattatggatgtcctcagatgcggcttcgacgatttggaggcgtaggcgagggattagctgatatggaaaagcagggaataggccactcgccaaaacgaacaagaacacttcat

SEQ ID NO: 111158 - DNA, 2748 bp, Zea Mays
gcctgaagcaccctcactttccccactccggagctgcacgggcacgcacgcagtttatccaacgccactgggcctcaacaacaacaatctcccaacgccgccgcttccgccgcatcaagcgctagaactaggaacccctcccaaaggatctcaagaagacaaggacaccgtcgagtcgccgccagtcgctcgatggggtgcgggcagtcaaagatcgatcaagaggaggcggtgtttcgatgccgggagcggaagcggctgatggctgacgccgtggcctcgcggaacggttttgccgccgcccacactggctacactgtccgcctgaagagcaccggcggcgcgctatccgatttcgcccaaggcgaggcgccggaccctagcctggtgtcctcccatacccaccacgctccggctgtggcgacgtcatctgtctcgactccgccaggcccctccgcagcttccgtcaacagcccctccccgccgccgccgccattcgccgacttctctcattctagcctccaaagatcctcatccacccccaacattcctatgccggagccgagggccgcagccaaaaaccgccctcctgccgatgcttctatccgagaggaggatgaggatgaggatgaggaggaacaggatggacatatcaagatcgatagcgatgacgacagtgacgacgacagtgacgaagacgacgatcaccatgagcatgacgatgttagtgtggatgacatggtgcatggacaacaatcaaagcggattttgatgagtagtgtgggatcttctccagtaacaccacctccgcctccaaggttgaaccacaccccaccaacgcttgccacagcaacgccaccgcccccggtgctggagtcacagatggctacctgggactacatctttggcccaactcccaccccaccacccaccctagagcagcctgctgctgatactttgtggatggaaaggcgtgataaggagccagtggctgaggtgaaggcacctgtggcaaaaacagttgttagtaagccagctgctactgaggaaaggccaccagagacggccgtagagaaggataaagcaattgaggagatgatggctaatctaccgccatcaaaacctattgtgaggaagccacccaaagcacctggcccatcacaagaagcagcacactaccagcatgcctcttcgatgggtgcagttgaaattcggaaggggaaggtaatggtggcatcaggaactgccagcttgctacagattgttacacggcttgatgataactttcttagagcttcagagagtgcgcatgatgtgtcaaaaaaactggaggccacccggatgcattatcactccaaccatgctgacagccgaggacatatcgaccactctacaaaaattatgcacgttatcacatggaaccgctccttcaagaacttacctgaccatgaggacctgaacgataattttgagattgatgatagatttgaaactcatgctgcagttctagatagaatgcttgcttgggagaaaaaactgtatgacgaagtgaaggctggggagcttatgaaaaccgattatcagaagaaggtgtctctattgcagaagcaaaagaaacggggtgttaaacttgaaaccttggagaagacaaaagctgctgttagccaattgcacacaaggtacattgtagacatgcaatccatggattcaacagtttcagaaataaatcggcttcgggatagacagttattcccaaagttaatggaccttgttgatggaatggccaagatgtggagttctatgtaccgccatcatagaagtcagttcctgatcatttctggaataagaggtttcgagattcctcctattccaagggagacaactgattctcattacatccagacttgtgagctacgtgacattgttagggagtggcatacgcagtttgagaaattgatggacaatcagaaagcatacatcagagcactcaatgcatggctgaagctcaatctcatcccaattgagagcaacataaaggagaaggtctcctcccctccaaggctggtggatccacccatcaagcacctgctgcatgcctggcatgacgagctcgaaaggcttccgattgagcttgcaaaaactgccatcaaaacctttgctgaagtcataagcactatcgtgcatcttcaggaagaggaagtaaacctaaggaggcggtgtgatgaaactcgtagggatctgaaccgaaagaaggcacagtttgaggactggcatcaaaagtacttggagagacagacagcagaaactcaaaacatagatcctgtcgaggataggaaacgcaccatcgaggaactagagattcggctgagagaggaggaggggcaccatcttaggcatgccaggcaggtgcgggagaaatcacttgcaaacctccggacacacctgccagaacttttcaggaacatgtccgattttgcttacttttgcaaagacatgtacaacaatcttagaaaaactgctgcgctgtccaaagatgaagtctaaggctgatgatatttgtgcgtgtgtatgtatactcgacaagcagtagaatgtttgctggtaacttgtcctgatgccgtctagaatacataatagtcggcattaattatgtttgtaaattggaatggacattccggactccccattgtttatttccatgctatgtactgcattggtgcgtggataaaaatctttgaattgctctaa

SEQ ID NO: 111159 - DNA, 1291 bp, Zea Mays
acgccgcgcgctgcttcttccttatcttcttcccctctgctggcactccttccacacgcgcgtagcttcttggcgctttctccatcacgctctctccagcgcccatctccctcctctactcggtcctcctctctgcgcgcaggagcttctcccatggccacggcgccctggctcctgctctccacgtcgtgcgcgcctgggcacttccccaggtggccgtctgccctcctgcatcgcgcccagccgagcctgctccctgagctccttccctgccgcaccggagctccctccatggcgcccgagcgccctgccctcggcttcctgcttgcatcgcgcgccctcgtcttcagcccggtgctcatctctctgctcgtcttcttcaatcgtcgagcgctctccctgacgcgctcgcccatgctgcggtgcccctcctcggacagcgcccggccggatctcccttgtgccgcgcccctgctcctccctgttccagctcggtgcccagagccccagcgccggtcgcccgtctactcttcgccatggcacgcctcaagcttcaccctgcgcgcgcgaagctctcagctcgcccagtctgcgcgccgcggtttctctccccatggtgctcctccttgcccctgctccgatttcccttccgtgctgcagcccctcagctcactccctcaacctcgctgactcgccaagcttcctgctcgcctctgcgcagcgccccgctccctatgtccgttcccagccgtgatgctcccttgcactcggcctgctctggatccgaggctggtcgctatgtgtgctcaactttgtcttgtcgcaaaaccctgatgccgtagtcccctaccgtgccctggatgtcgtgcttgttgtggccggctctggtggtcggcatcatcgaccgttgattctatcattagccacgctcattcattattattccgtacgccgcaagaaagagatctagagaatctggataaagaaaaagcgaacccctccgtcgcttccatgttgtgctgaggaatgctcccaccggacattgtcgtcaatctcacggattcaaattgggtttagataatgataagccaatttattgttccagataatgtttgattgagggtttggatatattaattacatttgtcctctggctcatagtatatgtgttgtggttgtagatataatatttattaggatactcgaatcgcttgcagcgatttggtcaaggtcgtgtagtgaatcgccagtttgagatgtagattatgggaatagagtttcggtgggtata

SEQ ID NO: 111160 - DNA, 501 bp, Zea Mays
atgccgcgcgccgtgctctgcctctccccaagctcctttcgctgctcgctcggatcttgccctggtcctgctggtcgcttctcccctacgcatcttcaagctcagccgccggtctctacttatggcgcgccctccatctccattttgctcggccgtgctccctaccgagctctctcatggcaccctgagcttctgcgcgagctcgccggtgaagctctagttcctgctcgattgccgttctctcctgcgcgccgcagattttccccgagctccctcgccgtggccctctgctcgattcgctatagcttatccgagctccccatggcgcccggatttccctactgcccgtccgcgcgttctgcttcctgcgcgcagctgcgagctccactctatcgctcggttcctgccaaagctcgcgtcgttcattgtgctgttgcgccatcgcctcggtctggccgagggccaggagctctcaatactcagctccctgttcatccataa

SEQ ID NO: 111161 - DNA, 242 bp, Zea Mays
cttcctgcagccgcgcgctccttcgacggcgcggatcccgcgccctcgaatcacgccagcagatcccacaatcaagcagcggcgacaggaataggggcgggctacgcgggcgctactgcggcgagggtgagggcgagcgctccggtgccgcggcgccgttcatcgtaatcggtcgtgctcctggagggaacggctgcagagtggacgggatcgaggagggggcgggcgggggccgcccgtga

SEQ ID NO: 111162 - DNA, 312 bp, Zea Mays
atggctgctggccggaggtggaagaaagggggcgccatgaggagagagctccctgctcctgcgcttaaccagaggaggggaggagaggagaagtggcgtgtggggaaaaagggagagaggtgggctgccatttatggacgagaagctccagagcacgactgccacgtttctccaatgcagcaattcatcgaacacgtgggaacgcgagacgtcgacccgaacggcactgatttcagacttagaagaattcaaatcctgaaatcagatttttattctgtcttgatggcactgtttgagattcttagaaattaa

SEQ ID NO: 111163 - DNA, 1376 bp, Zea Mays
agctccctcctctccctcccatggcgcacagacactccttctcggccatctccagcactgcgcccagcccagccgcgccgagtttctccctcgccatggctggtgccttctttgctctcctctccagccgcgccaagctcggcctctgcttctcttgcgtcgcgtgccgagctccatccatggccggagctccctccccgctcgaatttcgccaggcccgcgtggctccttggcgcccctctcctcggaactccctcctctcgctccagctcgccacgcactcctctgctcggcgcctttcctgctccccaagtccggtgccctgcggcctagcaccgcgcccctggtcctgctcgtcctatcagtcgagtttcttcttccccggcacgtcgctctctctcccttgtcttctctcccctgcgcgctagtcgctcgtcttcctgtgagcgcacctgctccctcggccctctccctgacgctcgacctctctgcttctctccacgtcgctctcaggtctccggctcccatgcgctcgccctgtgcacgagttgccgcaccctgggagctgctcttgccgtcgtggagctctcacggccagctcccacccttttgacgcgcacccatttttcccctttcgcgcggcttcccagctccagctcggccctgtcttctctatgccatggtcggcatttcccagcgaagctcaacgtcaccaccattgtgaaatgtttgatccgacttcgtcgtagacctcgccggttgtgcacactccggcctcctcctgtccatggccaacctgcccgccatggtgtcgcgcgtccctgcgccctacttgttcctggccctcgcgctggctcgcctcatcgccgaattccagaaccagcgttgtagctcagctcgcccaaatcctagccatgattcccatcacgccctgtgtcggcatgctggcccgatgctgtcgtccttcttcatcctcatcttcgcctcgacctcgcgtggtgctcggccgtgcacagctgcttgtcatcgacgtccctacgagttgttggtcgtcgctcatgttcacctccatatgatgggtggtgtgggtggtaacgtcctggtgcgctattcatttggggtcgaggatgtgcttgaaccagagatattcaaagtggatgctggacgttcttgcaccgtggacacgttgaagatccatagcatattgcggtgctccattccgtaggtctccaacttggtgccaaggagagaaattcctaggaactgggtaatgaagcaagattcgtgcaacgttttccaagtgtccgatggattgcttgacctcggattcgttgtcatctcgtgtagttgaatcattttagtcatggtaagtgtaa

SEQ ID NO: 111164 - DNA, 1377 bp, Zea Mays
ctagctccctcctctccctcccatggcgcttggacttctccttctcggccatctccagcactgcgcccagcccagccgcgccgagtttcgccctcgccatggccggtgccttctttgctctcctctccagccgcgccgagctcgacctctgcttctcttgcgtcgcgcgccgagctccatccatggcgggagctccctccctgctcggatttcgccaggcccacgcagctccctggcgcccctctcctcgtaactccctcctctcgctccagctcgccgcgcactcctctgctcggcgcctttcctgctccccatgtctggtgccctgctgcccagcgccgcgcccctgctcctgttcattctagcagccgagtttcttcttccccggcacgtcgctctctctcccttgtcttctctcccctgcgcgctagtcgctcgtcttcctgcgagcgcccctgctccctctgccctctccctgacgcgcgccctctctgcttctctccacgccgctgtcaggtctccggctcccatgtgctcgccctgtgcacgagtcgccgcgccctgggagctgctcttgccgtcgtggagctctcatggccagctcccacccttttgccgcgcgcccatttttcctcttctgcgcagcttcccagctccagctcggccttgtcttctctatgctgtggtcggcgtttcccagcgaatctcaacgtcaccactgttgtgaaaatgtttgatccgacttcgtcgtagacctcgccggtcgtgcacactccggcctcctcctgtccatggccgaccagcccgccatggtgtcgcgtgtccctgcgccctacttgtccctggccctcgcgctggctcacctcatcgtcgaattccataaccagcaccgtcgctcagcttgcccaaatcctggccatgattcccatcacgccctgtgtcggcatgttggtccgatgctgtcgtccttcttcatcctcatcttcgcctcgacctcgcgtggtgctcggccgtgcacagctactggtcatcgacgcccctacgagttgtcggtcgtcgctcatgttcacctccatatgatggatggcgtgggtggtaatgtcccgacgtgctattcgtttggggtcgaggatgtgcttgaaccatagaaattcaaagtggatgctggatgttcttgaaccgtggacacgtcgaagatccatagcatactgcggtgctccattccgtaggtctccaacttggtgccagtgagactcattcttactctatttgttctcatccgaccttgaattattagatgctaattatgtgtgtatttttgtgcgagcagaggagagaaattcataggaaccgggtaatgaagaaagattcgtgcaa

SEQ ID NO: 111165 - DNA, 1641 bp, Zea Mays
tagctccctcctctccctcccatggcgcttggacttctccttctcggccatctccagcactgcgcccagcccagccgcgccgagtttcgccctcgccatggccggtgccttctttgctctcctctccagccgcgccgagctcgacctctgcttctcttgcgtcgcgcgccgagctccatccatggcgggagctccctccctgctcggatttcgccaggcccacgcagctccctggcgcccctctcctcgtaactccctcctctcgctccagctcgccgcgcactcctctgctcggcgcctttcctgctccccatgtctggtgccctgctgcccagcgccgcgcccctgctcctgttcattctagcagccgagtttcttcttccccggcacgtcgctctctctcccttgtcttctctcccctgcgcgctagtcgctcgtcttcctgcgagcgcccctgctccctctgccctctccctgacgcgcgccctctctgcttctctccacgccgctgtcaggtctccggctcccatgtgctcgccctgtgcacgagtcgccgcgccctgggagctgctcttgccgtcgtggagctctcatggccagctcccacccttttgccgcgcgcccatttttcctcttctgcgcagcttcccagctccagctcggccttgtcttctctatgctgtggtcggcgtttcccagcgaatctcaacgtcaccactgttgtgaaaatgtttgatccgacttcgtcgtagacctcgccggtcgtgcacactccggcctcctcctgtccatggccgaccagcccgccatggtgtcgcgtgtccctgcgccctacttgtccctggccctcgcgctggctcacctcatcgtcgaattccataaccagcaccgtcgctcagcttgcccaaatcctggccatgattcccatcacgccctgtgtcggcatgttggtccgatgctgtcgtccttcttcatcctcatcttcgcctcgacctcgcgtggtgctcggccgtgcacagctactggtcatcgacgcccctacgagttgtcggtcgtcgctcatgttcacctccatatgatggatggcgtgggtggtaatgtcccgacgtgctattcgtttggggtcgaggatgtgcttgaaccatagaaattcaaagtggatgctggatgttcttgaaccgtggacacgtcgaagatccatagcatactgcggtgctccattccgtaggtctccaacttggtgccaaggagagaaattcataggaaccgggtaatgaagaaagattcgtgcaatgtttgccaagtgttcgatggattgctcgacctcggattcattgtcatccgcgtgtagttgaatcattttagtcatggtacgttaagtgatcacgtaatgcgaaagacgagttgagtcaacccctagatgatgttaagcgtgggcttctccacaaggtgatgctgatggatgaacctgaagatggataaactaaacaagtgccaaggcaaaggatggtcatcaagtgatcgacgtctaacaaccactacaccatgaaacaattttagcgtcaaacatctgacgataaaaatagatgtttggcgacagcgagtatgtcacaaaataataccatcacactatctgtcggt

SEQ ID NO: 111166 - DNA, 930 bp, Zea Mays
atggatcacatcgagccaataagaaacacaaggactgaaagagatattgttgatgataaccatgaggatattacttctgaaattagttatgaagaattcgaatatcccatcaacgatgaaggaactttggcgaggaaaaatatcccagtttcttatgaggattggagactagttgattctaaaaagaagttcgagttatcgacaaaagtgaaggaatactatgaggtggatgaatctggtatagattatgttataacatctgcagcaaaaaagtggagagagtttaaggctagcctaaagaacaaatattttgatgaaacattgagttttgaagaacttattgctaaaagggatgaaagggtgaaagaatctgattgggagtggttgataacttattggatgtctccagaagcagaaaactcaagggtgcaccggtcagatgtggtggcacatgagaacaatggcaatgaccattcacaaaatgtggtcgaagatgacttgcatcttattaggcatgtggcaagcactatgggttattcaaggaattgtggaggcattaatactattgaagagcaaagccacaggcgagacatcgcaacaatggtacctcaaagaaatcatggatcatctgaaaatccagatgataatcatgttggaaaagaagtcatattatattctatgatgagatcagaagttcctgttgcaatagaaaatattatctcaaccgacccaaccaccaaggtgggagatattcctcttggaagggagtttgcacaagtttttgtgactcgcgtgctaaaaagggaaactactctaccacaaccatacataggtgtagagactatgggggatgccctttttatgcccgttacatggccaacgaacaaggaacctcatcattctcattgtggtaaatttgagagagggtag

SEQ ID NO: 111167 - DNA, 94 bp, Zea Mays
acgagatctcatagtactgaagcaaaaacaaattctttaatcaacagacaatggaagtttattgctggatctgtactcgatactccatagtagc

SEQ ID NO: 111168 - DNA, 794 bp, Zea Mays
tatttgcaaacactttacaaaatcattcacaaaagtactaacgcttcaagtgattcgcaaaagccttcaaaaaagcactccaacttcttgtatcctcttgttttaaggcacaagcttgtaggggttgtgatgtcgccacttacttgatgctaacaagacatttcctttaccaaaaccatcttcaacacttcgcccataaaaaagatcaattatatttttcaattgcttgtctgcaagacaagtgataattgcaataagtaacatgatatgttaaccagaaggtatgctagcaccagaaacatgatatgcccagaggtttttacgcggcgtcggcgcatgaaacacgatggtggtcaccttttttctctcaaacttgggcagcatatataataaataagttactacacccatcatataacttactttcaccacgttttagctctgtcctggacggctggacccacatatcagtggctcatcgccatcgacgtgtgggtaaaaaaaagagagagagggagaggggaagtggaaggggtagaggtcgcatatgcacacctctgtccacagcggcatgtacaaaactaaggacgaacgatggccgccgtcggcggctaatgctggtaggagccctgcgacgctggggacggcacgatggaggtggtccggacggtggcagaggaggcggtggtggaggacgacagccgcggcgtggccgtggccatggggcgcgcctgcctgatcaccacggtgggcaggcccgggctgcgcgcccgccgctactgctctttcaccag

SEQ ID NO: 111169 - DNA, 1044 bp, Zea Mays
gtcgtactcgtacgctaccttttatccatccatggcgccgccgccgccgccgccactccacccccatcaccactgcgttctcacccgcttccgctgcccggccaccggtaccgcccgcttcctcattcgcctaggcatcaaacccttctgttgctcctcggttccctcgcgaaccccacctcccctccatggaccctcgctccgccgcggacggcgcccgctggactacccggaccccttcgcccgcaccttcgacctggccgcgctacgcgtccctgccgccgcgtgcgcacccctcgagcgccgcctccggggccacctgctcaactggccccgcgtccacaacgtgatccgcctccgtaacgaccagggcctcctctcactgtcgcctcctcccccgggctaccccgccgaggagccggggggccccgccccacgggccaccgcagtactgcggagggagaagctggtccgcgagttgaacgcccgtggcttcctacggttcccaaacctcgcccgcctctcgcggcccagtcccctcgcgcggaagcggagggagaggaagggagacggcggcgatgaggagacgtgtgagcctgacaaagacaaggcctacgtggtggaggtagcgggggagagaagagaggacgacgacgattggaagggtctggtcggagaggagggcattgggagagacacgtggcggattggctccacccggttgctgttgcttgaggagagatacgccgagaggaaggttgatgagctgccggaggcagtgaaggatgtgttagaccatgaaactcaacatgatgagtcatctgcttttgagcttatacgatgtcatctaactttattttatacctactggtcaatgagtgaggtaccttaactagttctttgctgaatatctaagcacaattttacttctgaatttgttttactgattcctgatacatttctagttgttttcatgtgtttcttattaaggatagcatacattgtttcctttcatttctgctaatgggttcactcataagtcat

SEQ ID NO: 111170 - DNA, 1571 bp, Zea Mays
gtcgtactcgtacgctaccttttatccatccatggcgccgccgccgccgccgccactccacccccatcaccactgcgttctcacccgcttccgctgcccggccaccggtaccgcccgcttcctcattcgcctaggcatcaaacccttctgttgctcctcggttccctcgcgaaccccacctcccctccatggaccctcgctccgccgcggacggcgcccgctggactacccggaccccttcgcccgcaccttcgacctggccgcgctacgcgtccctgccgccgcgtgcgcacccctcgagcgccgcctccggggccacctgctcaactggccccgcgtccacaacgtgatccgcctccgtaacgaccagggcctcctctcactgtcgcctcctcccccgggctaccccgccgaggagccggggggccccgccccacgggccaccgcagtactgcggagggagaagctggtccgcgagttgaacgcccgtggcttcctacggttcccaaacctcgcccgcctctcgcggcccagtcccctcgcgcggaagcggagggagaggaagggagacggcggcgatgaggagacgtgtgagcctgacaaagacaaggcctacgtggtggaggtagcgggggagagaagagaggacgacgacgattggaagggtctggtcggagaggagggcattgggagagacacgtggcggattggctccacccggttgctgttgcttgaggagagatacgccgagaggaaggttgatgagctgccggaggcagtgaaggatgtgttagaccatgaaactcaacatgatgagtcatctgcttttgagcttatacgatgtcatctaactttattttatacctactggtcaatgagtgaggttttagaggtattactccctgaaggtgtaataattcctacaggttttgaaacaatagggcatatagcacacttgaatttgcgagatgagcatatgccttacaagaaacttattgcttcggtggttcttgataaaaacaagccaaaaatccaaactgttgtcaataagacagatgttattcagaacaactatagaactatgcaacttgaagtcttagctggcaatggttcccttcgtacgatggtcattgagagcggccttcgttttcaagttgatcttggtacagtctattggaattctagattagccacagagaggcagaggctagttaatatctttagaaacttggacgttgtttgtgatatgttctcaggggttggtcctctagcgatttcagctgcaaaaaaggtcaaatatgtctatgcaaatgacataaaccctaatgcagtgggataccttgagagaaacatggttcttaacaaacttgaaaagaaaatagaggtttttaacatggatgctagaaggtttgttagtgcaatatattcaagcaagcacgtgcaaccaatcacacaaatagtgatgaatttgcccaatgacgctgttgaatttttaggtgggttcccatttccttctttactggcaaaattccttcattgcaattggaatctatattgataccttttatgcc

SEQ ID NO: 111171 - DNA, 1333 bp, Zea Mays
gtgtttacttaatcttgcgatcctggttgtaagtggtttatccggggtccttgggatactcaaacagatcctgttaagttatccggtgcacatgcatagccgtctgaggtctttgagataagggcaggtgcatgtgggcccaataacttgggaggttctaccacgtagatatcttccttgatctacactctataaatcttgtatagagattgaggtgttttgggcactggttagggagttatggacccattaaaattggtttgtcagtggcttagaaatcaatggaaacttgtgaaaactgagtgtcaaaacatgtcaaacgaaatcggatgaatgccatcttttaatatgttgtgcctctattagttattaacatcttttatattttgtgaaacttgagttgttcaacaaaaatttgggaacgcgagacgtcaacccgaacgacactgattctagacttagaaggatttcaaatcctgaaatcagatttttattccgtcttgagggcactgtttgggatacatataaattgaataaagggtaggtgtatataaaatttgttgtataacataggttctacaacttttattaaaggtcaaaccttatatcttggttggaaattaaaattccactttggtcaatgtattatcattataagctcaaaactgaagtttttggccgaaggaggcattttcttgacattttctcaacacgaaccattaataacttttgttgtagagttcatatagagttgtttgagcaagatgacaaggtttgtttgaatttaaaaatttgcatttgttgacacgagcagtttcaagcacgcctagtatttatcttctcatgcgagcagttggttcaacttcgagaaatatttagaatacactttattgggggccttcgtcttccgaaggtcctaaaaaacatgatttaacaatgtttccggagttgtaatatatgaacaggtatcttcaaactcggatcggaaccacagtgggagaagcacgaacaatacgaagattgatgcagcgccgaagctacgcgcgagggagcttcggcataacagcatgaaagggaaccgacttaaaggggaaaaggctatttagacctcgatgaattattttatagtcattagcaaatgtaaagggcatggatgtaatttcacaagggctgcgttccatgcctataaatagatgaacaatacccctgtactgttcacgctgacttgcatttgctcgtgcatcacacttgtacttttaccttctatcaagccgaaggtacatttgtaatttgatatcatttatattttctatgataataaaatagaaatgag

SEQ ID NO: 111172 - DNA, 1043 bp, Zea Mays
aacatatgtatgctaaattaataaaaatggtcgcataacagcacaccgacacaacaaccgagctggtcataatcactaagcgtgcctatgctaaataaaaaggatcgtcgcaacctccatatctattaatccatccactaaaacaaaataatagcggtagcgaatcagagtatgattaccatattgaccataacttcgctcaaacagcaacgattcttgcgtagacccttttttccgagcacccggcaagcaccacatgggatttattgctttatccgaattctcgggatcgttcgacgacgcaagggatgtcgacgagttggagacttgcaaggtcgagcacgacaaggagttccgagggtcgacataagcagcacaaaattggaaatcaaatcatcagagtcgacgagcacgtcgtgggcacaacgtgggtcgacgacgaggtccatgacgagcatcgcaaggcacgacaaatgggaaggaggcgacgcacgaatttcaaagcatggagctcacggcggcttgagggagacggtcgtgggagggacttcggcgagctggagcgggatacggcctgggcgcgacgaagggagctgcgcgttcagagcggtagggagagcgctgaacggaacagggagctccgggcagagagccaaggcgcgaaggccagggaatccagggcacggcgagccaaaaacttcgcgcgcggctatggaaaagaaggcacggcagggaggagacctcggctggtggagagctcagcaaactccatggcgagcagggaaatacgcaggcagagggagcagggattatgggcgcgagctgaagacgagctcgactggaaacaggaacgccgtgcagagggagctttgcgagctgggatccggcgctggggggaaggagagatggaaggagagggaagcaaggggagggcgcaggaaagagccacggcttggagaggagcgctcggcgtcaagataactatccaggagcagagcgacggccaggccttggttcattacccgatcgctgttcagcaatga

SEQ ID NO: 111173 - DNA, 633 bp, Zea Mays
atgtcgacgagttggagacttgcagggtcgagcacgacaaggagttccgagggtcgacataagcagcacgaaattggaaatcaaatcatcggagtcgatgagcacgtcgtgggcacaacgtgggtcgatgacgaggtccatgacgagcatcgcaaggcacgacaaatgggaaggaggcgacgcacgaatttcagagcatggagctcacggcgagctggagcaggatacggcctgggcacgacgaagggagctgcgcgtttagagcgagcagggagagcgccgaacgaaacagggagctccgggcagagagccaaggcgcgaaggccagggaatccagggcacggcgagccgaaaacttcgcgcgcagccatgggaaagcagtcacggcagggaggagacctcggctggtggagagctcggcaaactccatggcgagcagggaaatacgcaggcagagggagcagggattatgggcgcgagctgaagacgagctcgaccggaaataggaacgccgtgcagagggagctctgcgagctgggatccggcgctggggggaaggagagatggaaggagcgggaagcaaggggagggcgcaggaaagagccacggcttggagaggagcgctcggcgtga

SEQ ID NO: 111174 - DNA, 102 bp, Zea Mays
aggcaatccagctgttcaagtaggtgctagaagcaaacattactatattgcaatgtggtattacctatattcagtgaaagccccatttatgttgggcaaggg

SEQ ID NO: 111175 - DNA, 96 bp, Zea Mays
tataacagggtcagattaagactggagcaccctgcagatcagagcgtcttgccaaatacaaccaggcaagtgattcctcgagaactgtactactaa

SEQ ID NO: 111176 - DNA, 360 bp, Zea Mays
atggagatgtggccgagcgccatgggtgagcagggagcagcgagggcgtggctgctggggaaacgaagctccacggcgagctggagcatcacggcgcgcaggagctctggccgagcgcagacgccatggcgcgcggcgagcagagcaggcatgcgcaggagattagagagaggagaaagacggcggaagggttggaggctagggaagccgagcgttgctgctccaccggtgcgggagctcggtggtggaagcagctggagtagatgtcgacttcgagatgagcctgagcgaaggtaccacggagataagaatcagacgtgtagggataagattgatgaagcaaaatatcagaagagatga

SEQ ID NO: 111177 - DNA, 1204 bp, Zea Mays
cagcagtgctgttctgtattcccaaattgccaccctgttctgcgtactcgtcgaaacgacgataaccacacgtctcgaaaccctaaggctgccccaaattgttatcccaaaccctagacctaaacggctccatgctgtgagaccaccaacagtgtccatggctctggacgccccggtggagcgacgggacgaggtacagatcgcgatggggaacggaaacggcgtggcgccgtctcaaccgtcgcggccagccggtcggccaacggctgctgcggcggcagcgccatacgcggacaggcggctgcggctgaacccaaatgcggatcacaagccggaagactacagcgacgtgcgcggcgagtacgcgccggccgtgtacagcgcactcgagcggcatctcccacccagcctcatcgatgccgaccgcgatgtcaagctacacttcatgcgggacattctcgcgcgctactggccgcagggcgagcgtaacaaggtgcaaaggcacagagaatataggcagaggatactccacctttacaagcctcttcatgaagaattatacaatatgcatccttcagtgttcttcttaccaacattccttgaagcagttaggagcaatacagaagaatgctttagaagtattatgactgagccaattcctggtgtttattcgtttgctatgttgcagcctactttctgtgagatgttattggaggaggtagagaactttgaaaaatgggtccatgctatgaaatttaagataatgaggcctaatacaatgaacaagtatggtgctgtccttgatgattttggcctggaagctatgctgaaccagttcatggaacagttcatagctccaatttctaaagttctttatcctgaggttggtggaggaacattggactcccatcacgcttttattgttgaatatgggaaagacagggatgttgaactaggttttcatgttgatgattcagaagttacattaaatgtttgccttggaaaacaattctttggtggtgaattatactttcgaggtattcggtgtgagaatcatgtgaattcagagacacaacatgaggaaatgtatgactacacacatattcctggttgggctgtactccaccatggtcgacacaggcatggtgctcgagctacttcatctggtctcagaataaatctgcttttgtggtgccggaggtat

SEQ ID NO: 111178 - DNA, 764 bp, Zea Mays
aaaaatacacggagcctgcacgcgtgtttctccacatgccctctccttctcggatcctctaccgtaatctcccggcgacgccgccgccatgtcttcccagtcttctgcaggaggtccggcgatccatcatccccactccaactaccacccgtacatctttcagcatgaccctccgctccactctaattcccgccgtcgccgccgtaaccatgatgacccatatcaaccctatctgcctctaccccacgctcactcccacggagccactgccgtcgttaccggcaccgttcgttgccatgtcccccgggatccacttgtgctctcacacctccaggagcgcctctttccgactctccctcaacatcacccgatcgcgggtccacccccgacgaagcgggcccgccgcgcgccagatactccgtgggatccgccgccgccaacgctgcagccggcacttgtcccggtggcgctagagaggcctccggatgtaggacattctgccggggcgttgctttcgcgtgacgagatcgagaggcggtctccatcaagaagggacgggatcgattccgcgcttgaggccaggctgcgtgcgtcctactgcgcctacctgcattgcctcggcaaccggctcgggttgccgcagacaacaattgcgacggctgtggtgttctgccatcggttcttcttccacagatctcatgcctgccatgatagatttgttagttgtctagtcttctacaagaatttgatagttgtgcaactta

SEQ ID NO: 111179 - DNA, 1427 bp, Zea Mays
aaaaatacacggagcctgcacgcgtgtttctccacatgccctctccttctcggatcctctaccgtaatctcccggcgacgccgccgccatgtcttcccagtcttctgcaggaggtccggcgatccatcatccccactccaactaccacccgtacatctttcagcatgaccctccgctccactctaattcccgccgtcgccgccgtaaccatgatgacccatatcaaccctatctgcctctaccccacgctcactcccacggagccactgccgtcgttaccggcaccgttcgttgccatgtcccccgggatccacttgtgctctcacacctccaggagcgcctctttccgactctccctcaacatcacccgatcgcgggtccacccccgacgaagcgggcccgccgcgcgccagatactccgtgggatccgccgccgccaacgctgcagccggcacttgtcccggtggcgctagagaggcctccggatgtaggacattctgccggggcgttgctttcgcgtgacgagatcgagaggcggtctccatcaagaagggacgggatcgattccgcgcttgaggccaggctgcgtgcgtcctactgcgcctacctgcattgcctcggcaaccggctcgggttgccgcagacaacaattgcgacggctgtggtgttctgccatcggttcttcttccacagatctcatgcctgccatgatagatttttggttgcgactgcagccttgttcctggcagcaaaggcagaagaaacagcatgccttttgaatactgttcttagggcttcatgtgaggtttctcaaaatcaggaattcaatcttcttccttacatgctatgtggtcaggactggtttgaacagtacagagagagtgtaatacaagcggagcaaatgatacttacaacacttgattttgaactcgaagtagcccacccatatgcttccctatcctctgctttgggcaaactaggactcacacatactgttctgtttaatgtggcttggaatctgatcaatgaagggtatgcatttatatttcttaacgcattgaccattacttactaacatatttacttttcttctagttattgtagaaaactgcaagttatcttgttaaactttcactctagtggacagtacatgagaattttgatatatagtagctttgtcatattgtaatctccgctgtttggatagcttctctaaaaattgtacctgggcactatacttgggccattaaatcttatctttcaaacatttatggcactgcaccatatttggttttgtagtcgtaaatgctgttccagtctggcacaaagacaaaacaaaggaacgttcagacaaaaaaattgtggctgtagttagttggactataatgaagttacaatatacagttcatagtgttagaatgtaatac

SEQ ID NO: 111180 - DNA, 492 bp, Zea Mays
cataggatcacattttacccaccaaccacatctgaaacatattggttattctttctgcactctgcacttcaagactagattgtagtcagtgcaatgctgagtgggattgaatgaagtaaatgcttcgagattttaaggctggttcggctataatgtgatattaaatatttccatgaatataatatctgtgatgttcactccacttgtcacataataagtgcctatgaatatcttcaactctgtcaaccaccacaaagtaactagttacttgtggtttgctcaatttttgtcagtgctagcttccactatttcattggttttagcatgaaagaaaatatgtatcaaacttcttgcaaaactcactgaaactgtgtaatagattttccagatttggtctttgtatatcctttattaactttttattttatacaatagttttgtctatcctgatgatctgtacctttcacgattaataaaaaataattcttccac

SEQ ID NO: 111181 - DNA, 1471 bp, Zea Mays
cacatgcatgaatcatatagcaaataacacaaactatgatgatgctacacaatagagaattgcacatttagcagcgaggcacattacaacacacataagcaaatattagatatagatatattactaagtacaactaatacgtttttccaacttaactggatctaacacaaacattaaaataataaaccaagctcaagtcctatataaaccttagctaaagcataacattgataatctaataaaattccgactcaccattataggacatccacgacttagaataagaatataagccattcaactagtttttataattattattctagactattatgactaacacgccaactaaacaaaatatctcatttatctataattcaacaagtagaacattatcatatcacatatagttctgcaaaactgctttgtaacaacccaaatatctaaagcgtttatgcgcacttgctattatgaaaatcttaggtttcaattaaaaacgactgatcgatgctactataacgcaagggatcatcatcatcctgtaataaggattctctcaagtaacactaaaagtactaccggctagacaatttcaaaaatgctaatcccacttcttacattattaatttaatcgtgccttgcatacaagtctaacaacacatgacacaactattgcataggaaatattactgcaaacaccttatggcaacatataacacacaaaaaaaataagaaaggtattcttcccaaagcatcgccacaatataactaaccaatccaactaaccgtaaaaacaaatcagcttaccataactgaatcgacttaacagatgagagacgacgatgatctacggttcaaaccttttcttgagcatctggcgagtgatgggcacatatctctcttcttcaccaccttgcccataaacataaccaaaagccaaaagagagcagacccgctcccctgagtcgagtagcacacaaatgacaaacacaacaaagtagatgtcgtcgaaggcatgctcgcgtcaagcagatcaaacgcgagacacaaggcgtgcaaccacaggcatgaggctggaagagcagcgaggtgaagtttgacaatcggtgcattgctgtcgaggtggtgctacgacgatgaagacgacgggatcgaacgatcgacgggatcgaacgatgcttcaactctatactacagatttcatcgagcagcccctaagtggcagcaataaggctacacacaacgtggctggccaaacaatacgacgacaagagcaaggaggtaccacagcacacaaaggacggcaagaagaagtttggcgccaactatgacgtgcgcgcatattcctaggattcgacgagctgggcagagcagagagccgaccccatgtggcaccgacgacaacgctaactcgcaaagctttcccgctgcacacagaacgccggtacggcatcacggcagactccaaaac

SEQ ID NO: 111182 - DNA, 207 bp, Zea Mays
atggcccctgccggcccccccttggctccgcccctggtcatcttcaatctagatgtcgcccagcaccagacctccgtctcccacacgccgttgtttgtgctcgacctcgccgcgttcatcgtatcgttgtccctgctgtctcgcgacgtcacgttcctcacacttcgttttctccatgtcaacgacgcttctggaattcccgagtaa

SEQ ID NO: 111183 - DNA, 595 bp, Zea Mays
acaccctcacagtcactaggttagcaatcacccctcaccctcatggaccgccgccgcctggctcatccacacggactgccgccgccccatgcccccacccacgcccccacgctcccatttccaacccacgccgcgcagcgcatgggacagcgagcagctgcccagccgagtagccaccggccgccgcctgaggccgtagcggtagcggccgaccccgacccgccagcaagctcgaagctcatcggtgcaggaaccaggaggcaacagccagcaacatccgtgcctggtggctggtgtgtaactgtgtggtgcggccgtgcagggagcaagtgagcgaccgagcaagcaggaagcaacaacaacagccagcagtcgtgcggccgtcagtggtcagcccgtgcctggtgccctggtgtttgaaactttgaactttgaacatgcggagcaagcagaagaagcagctgccatccaatcggtggctacagactacagtttaatgttgcatgcagttatgcacatacacatgtaccttttttttcattttttgttttactgctatctaccatgcgaaatgcgacattggttatttggtata

SEQ ID NO: 111184 - DNA, 1728 bp, Zea Mays
tcaaatcaatgctcggtgcagcaggtaatgtaacttaatcaatcgcaagcggcaaaagaactcaaactcaatccacaatccgtctcgctcgtctgggaaagaagagcaggctgttaggcaagccggctttaatacaacctctagggaagccaggaaagttggtatatactttgtaccaagtaccaaacttttgaaacagtttgaatccaataaggaagaaatgaaaaagctaggccaaaggatgagatggcatttcaagagaatagtcgatcagtatggcaggaagaggtctctttgtcaaatcctctatcatctaaagctgggtcagaaacttcctttaggagcagaagaatttgcaggccgtaggacaaagcttccattctcgaagaaactagccaagtttgaaaacacttaagagggctgggtattgaaagagtctggcaggaagaagtatagtaccaagcggcagtaagcctcgattcgaattagcagagaggtcagttttaggaggtcggtgtccagtggagttcagcgagaaactcaaagtaatacatacctatttgttgcgatgtgattgcttcgcacctttcaatatttcttttacttctagtgctatcttccatccgttccagttcatggatcttcttcttgttgtagaacgagaattggattgattcctatagtttagttctctatttgcaaattcattacttaataacgatcttataggctttgtctcaggcagatctggagcgactggattgaacagaaagtactctcacactatagaaaaaagtaaagtccactaaaagtacatgcactcttttcttacacttatagaggttcgaagaaatgagtaaaaggtagactaagtgatcaatcaagatcttgtctcaaaacctactcttagaaggctcattccagcagccttagcacaagcaagtagaccgtcacaaaagagaatgaaatcaaaaccggagaatgaaatgctttacttataatactaagacaaccaggcacttcacttcaggctttgatccgcgacttacagaactgttttgcctgacattcaatcgttttcttgtctttttttcttcccactactatatataatataacctttagattttatactccatccaaccactctctgttccatttctcattccttattcctgaaaggataggttctttattccagctgttcgttagaatcttagctcgaattcaatgttcggatgctccatccttcacgtccaatccctgtcaggaggggcagcttcctcgagtccggtctcggaagctggggcaaaataggccagtctatctgagggaacgggacctacaatcaggatctcttccgcggatctcttgccttgcttcttgactggaacctggcacttttagcgtgcatctagtctgcatatccctttctgcaaatctctattagctctgctgcagaagtggaatgtgagcttgggaatacccttccggtttccagaatcctagcttgatttcttgcgtttaaaggcaggcttgaccaaccacatcacataagccagcgcagcgagaaaactgattcttccacgggattccgcttcctacgaaacatacgttttacgaattaacggttaccagtagcgagcgatcctttcctacaaggtaaggccatggacaaaggttttttatctaccccagcgggggcagttttaggagtcttttttcaat

SEQ ID NO: 111185 - DNA, 353 bp, Zea Mays
gacaaactagcaacatagaaagtgcaataaagtagcaacaatggcagccaagatatgttccctccttatgctccttgctctttctgcaagtggttctagcgcgaccattttcttgcaatgctcataagatcctatagcttcccttcttcccccatacctctcacccacaatggattcagtatgtgaaaacccaattcttcaaccctacatgatccaacatgcaatctcaataacatcttacctttatcacccttgttcgtccaacaaccggtagccctattacagcaattatctttggtgcatttgttggcacaaagcatcagggcacaacaactacagcaacttctgctggc

SEQ ID NO: 111186 - DNA, 326 bp, Zea Mays
gggaggtggtgccggtgtggtgaggccgcagtggaaggccgcgattgatttcaaatggatccgagacaaccgggatgccgtcgccgacaacatccggacccggaactctaccgccaatctggacctcgtcttcgagctctacgatcagtacctcacactgcagaaggtctggggcttgccaatgccagagctttttgttgtagctgttcgtgctgtctgactgtgctgcgctagattcgttgatggataagcttgcgttgttgagggtcaggttctaatgcctggattttgacttggctggccgagggatatgtactagatggcag

SEQ ID NO: 111187 - DNA, 258 bp, Zea Mays
acaatcggtaaccatatcaatatgaaaatatgtcaatataacaagttcataacacaacaaagtttacaaatatcacaaagaccacaagttcacaattcacaatataacaagttgatcacaaagaccacaagttcacaatataacagtttgatcacaaagatcacaagttcacaatattataaattgataacatagatcacaagttcacaatatgataagttgatcacaaagaacacaagtacacaatataacaagttc

SEQ ID NO: 111188 - DNA, 381 bp, Zea Mays
atgccgccactcgccgagccgcgccgcccctcgccccgccgcgccgcccccggcccgtcgcgctgccccgctcgtcgcgccgccccccgcagcgccgcgcccgtcgtgccgccccaccgcgcagcggcgcccccggcccgccgcgccgccccaagtccccgccgcgccgcccaagcccccgcagcgccggccctcgcccagcagcgccggcccccgcccaccacgccgttcgacgcgcctgcagcaccgcccgcccgtgccctcgacgtgccgccgccaagcccgacgccttgccagccgacgccaccgacgcgccgtccaccacgccgcgctctgccccgtcccgtcgacctcgactcccgtcaacctcgccttcattaa

SEQ ID NO: 111189 - DNA, 1065 bp, Zea Mays
caacacgttctgtcgttctcgcttgaggcggcccgcggccttctcgaagccctccgctcgctccgtgctcgtggctcccgcacgatccccacattccttggccggctccgcgctcgtgctctcgttgggatcgttgtcagttcaggtacggtggcgatgaggtcgtccgtggcccgcctgattcgctcctcctctgcctcgccctcccgtctcagtggaaatgcattcttcggcaatgccacacccagtgatcagaggcacattgagaagccttttaaagtgaaggaggcagaacctgtgaatgtgacaaaaccttcaccacacaagctgctggttctaggaggaagtggtttcgttggatcacacgtttgcaaagaggctttggacaaaggtttagttgtctctagtcttaatagatcgggaaagccatccttaaatgaaccttgggctgacaaagttatatggaaccaaggcaacctccttgaaccagcttcattgaaggatgctatggataatgtttctgcagtggtatcttgtgtcggaggttttggatcaaattcattcatgtataagattaatgggactgcaaacatcaatgccatcagggctgcagctgagaaaggtgtaaagagatttgtatatgtgtcagctgcagactttggattagtgaattatttattgcaaggctattacgagggcaagagggcttctgaagctgaattgttgtcaaagtttacatatggaggtgctccaaaatataaaacctttgactaggttaccacttatcgggccgctattgactcctcccgtcagtgctgcctccgtggggaaggtcgctgtgagagcagcgacggatccggtgtttcctcctggcatcgttgatgtctacgggatcatgcgttacagcgagcaaaactaagctgcctcattcaccgggcagtatatacatgccgctgtacttttgttacagctgtttctttgtttgttttacatgtactggtatccttctttaactcacttgtttacgagacgataaacattcaataaatatgtattttagcgaca

SEQ ID NO: 111190 - DNA, 1299 bp, Zea Mays
caacacgttctgtcgttctcgcttgaggcggcccgcggccttctcgaagccctccgctcgctccgtgctcgtggctcccgcacgatccccacattccttggccggctccgcgctcgtgctctcgttgggatcgttgtcagttcaggtacggtggcgatgaggtcgtccgtggcccgcctgattcgctcctcctctgcctcgccctcccgtctcagtggaaatgcattcttcggcaatgccacacccagtgatcagaggcacattgagaagccttttaaagtgaaggaggcagaacctgtgaatgtgacaaaaccttcaccacacaagctgctggttctaggaggaagtggtttcgttggatcacacgtttgcaaagaggctttggacaaaggtttagttgtctctagtcttaatagatcgggaaagccatccttaaatgaaccttgggctgacaaagttatatggaaccaaggcaacctccttgaaccagcttcattgaaggatgctatggataatgtttctgcagtggtatcttgtgtcggaggttttggatcaaattcattcatgtataagattaatgggactgcaaacatcaatgccatcagggctgcagctgagaaaggtgtaaagagatttgtatatgtgtcagctgcagactttggattagtgaattatttattgcaaggctattacgagggcaagagggcttctgaagctgaattgttgtcaaagtttacatatggagtcctggactcctaattgccggcggctacagcaccctgcgtcccctgccccttctcctgcagtcctgctcgcctgctgcactgctgcagtctccaaccggcggtggctgcgaaccagtgacgagatgagcacgtcatctgaaggagtgatactgaggcctggttttattcatggaactcgtcgagtgggcagtgtaaagatacctcttggtcttgtcggttctcctatgcagatggtgctccaaaatataaaacctttgactaggttaccacttatcgggccgctattgactcctcccgtcagtgctgcctccgtggggaaggtcgctgtgagagcagcgacggatccggtgtttcctcctggcatcgttgatgtctacgggatcatgcgttacagcgagcaaaactaagctgcctcattcaccgggcagtatatacatgccgctgtacttttgttacagctgtttctttgtttgttttacatgtactggtatccttctttaactcacttgtttacgagacgataaacattcaataaatatgtattttagcgaca

SEQ ID NO: 111191 - DNA, 1157 bp, Zea Mays
caacacgttctgtcgttctcgcttgaggcggcccgcggccttctcgaagccctccgctcgctccgtgctcgtggctcccgcacgatccccacattccttggccggctccgcgctcgtgctctcgttgggatcgttgtcagttcaggtacggtggcgatgaggtcgtccgtggcccgcctgattcgctcctcctctgcctcgccctcccgtctcagtggaaatgcattcttcggcaatgccacacccagtgatcagaggcacattgagaagccttttaaagtgaaggaggcagaacctgtgaatgtgacaaaaccttcaccacacaagctgctggttctaggaggaagtggtttcgttggatcacacgtttgcaaagaggctttggacaaaggtttagttgtctctagtcttaatagatcgggaaagccatccttaaatgaaccttgggctgacaaagttatatggaaccaaggcaacctccttgaaccagcttcattgaaggatgctatggataatgtttctgcagtggtatcttgtgtcggaggttttggatcaaattcattcatgtataagattaatgggactgcaaacatcaatgccatcagggctgcagctgagaaaggtgtaaagagatttgtatatgtgtcagctgcagactttggattagtgaattatttattgcaaggctattacgagggcaagagggcttctgaagctgaattgttgtcaaagtttacatatggaggagtgatactgaggcctggttttattcatggaactcgtcgagtgggcagtgtaaagatacctcttggtcttgtcggttctcctatgcagatggtgctccaaaatataaaacctttgactaggttaccacttatcgggccgctattgactcctcccgtcagtgctgcctccgtggggaaggtcgctgtgagagcagcgacggatccggtgtttcctcctggcatcgttgatgtctacgggatcatgcgttacagcgagcaaaactaagctgcctcattcaccgggcagtatatacatgccgctgtacttttgttacagctgtttctttgtttgttttacatgtactggtatccttctttaactcacttgtttacgagacgataaacattcaataaatatgtattttagcgaca

SEQ ID NO: 111192 - DNA, 1193 bp, Zea Mays
caacacgttctgtcgttctcgcttgaggcggcccgcggccttctcgaagccctccgctcgctccgtgctcgtggctcccgcacgatccccacattccttggccggctccgcgctcgtgctctcgttgggatcgttgtcagttcaggtacggtggcgatgaggtcgtccgtggcccgcctgattcgctcctcctctgcctcgccctcccgtctcaggcgtgctgacaactcgtcgtcaatcttgctgaaaagtggaaatgcattcttcggcaatgccacacccagtgatcagaggcacattgagaagccttttaaagtgaaggaggcagaacctgtgaatgtgacaaaaccttcaccacacaagctgctggttctaggaggaagtggtttcgttggatcacacgtttgcaaagaggctttggacaaaggtttagttgtctctagtcttaatagatcgggaaagccatccttaaatgaaccttgggctgacaaagttatatggaaccaaggcaacctccttgaaccagcttcattgaaggatgctatggataatgtttctgcagtggtatcttgtgtcggaggttttggatcaaattcattcatgtataagattaatgggactgcaaacatcaatgccatcagggctgcagctgagaaaggtgtaaagagatttgtatatgtgtcagctgcagactttggattagtgaattatttattgcaaggctattacgagggcaagagggcttctgaagctgaattgttgtcaaagtttacatatggaggagtgatactgaggcctggttttattcatggaactcgtcgagtgggcagtgtaaagatacctcttggtcttgtcggttctcctatgcagatggtgctccaaaatataaaacctttgactaggttaccacttatcgggccgctattgactcctcccgtcagtgctgcctccgtggggaaggtcgctgtgagagcagcgacggatccggtgtttcctcctggcatcgttgatgtctacgggatcatgcgttacagcgagcaaaactaagctgcctcattcaccgggcagtatatacatgccgctgtacttttgttacagctgtttctttgtttgttttacatgtactggtatccttctttaactcacttgtttacgagacgataaacattcaataaatatgtattttagcgaca

SEQ ID NO: 111193 - DNA, 1225 bp, Zea Mays
acgttctgtcgttctcgcttgaggcggcccgcggccttctcgaagccctccgctcgctccgtgctcgtggctcccgcacgatccccacattccttggccggctccgcgctcgtgctctcgttgggatcgttgtcagttcagtggaaatgcattcttcggcaatgccacacccagtgatcagaggcacattgagaagccttttaaagtgaaggaggcagaacctgtgaatgtgacaaaaccttcaccacacaagctgctggttctaggaggaagtggtttcgttggatcacacgtttgcaaagaggctttggacaaaggtttagttgtctctagtcttaatagatcgggaaagccatccttaaatgaaccttgggctgacaaagttatatggaaccaaggcaacctccttgaaccagcttcattgaaggatgctatggataatgtttctgcagtggtatcttgtgtcggaggttttggatcaaattcattcatgtataagattaatgggactgcaaacatcaatgccatcagggctgcagctgagaaaggtgtaaagagatttgtatatgtgtcagctgcagactttggattagtgaattatttattgcaaggctattacgagggcaagagggcttctgaagctgaattgttgtcaaagtttacatatggagtcctggactcctaattgccggcggctacagcaccctgcgtcccctgccccttctcctgcagtcctgctcgcctgctgcactgctgcagtctccaaccggcggtggctgcgaaccagtgacgagatgagcacgtcatctgaaggagtgatactgaggcctggttttattcatggaactcgtcgagtgggcagtgtaaagatacctcttggtcttgtcggttctcctatgcagatggtgctccaaaatataaaacctttgactaggttaccacttatcgggccgctattgactcctcccgtcagtgctgcctccgtggggaaggtcgctgtgagagcagcgacggatccggtgtttcctcctggcatcgttgatgtctacgggatcatgcgttacagcgagcaaaactaagctgcctcattcaccgggcagtatatacatgccgctgtacttttgttacagctgtttctttgtttgttttacatgtactggtatccttctttaactcacttgtttacgagacgataaacattcaataaatatgtattttagcgaca

SEQ ID NO: 111194 - DNA, 1242 bp, Zea Mays
cggcggacatgttcctggaaggaaagggttaagtttccagcaagatttggcatcgcgatggccgatgggtggcttatagtgacaattaggcattaagggaatttattctacttagtgcaaatcgattggagaggaaactgccatttgataacagttccagccagggcgggtcctgatattttggaaatgcattcttcggcaatgccacacccagtgatcagaggcacattgagaagccttttaaagtgaaggaggcagaacctgtgaatgtgacaaaaccttcaccacacaagctgctggttctaggaggaagtggtttcgttggatcacacgtttgcaaagaggctttggacaaaggtttagttgtctctagtcttaatagatcgggaaagccatccttaaatgaaccttgggctgacaaagttatatggaaccaaggcaacctccttgaaccagcttcattgaaggatgctatggataatgtttctgcagtggtatcttgtgtcggaggttttggatcaaattcattcatgtataagattaatgggactgcaaacatcaatgccatcagggctgcagctgagaaaggtgtaaagagatttgtatatgtgtcagctgcagactttggattagtgaattatttattgcaaggctattacgagggcaagagggcttctgaagctgaattgttgtcaaagtttacatatggaggcgactttcacatggagggggctccgttcagccaccatgggaaggagtccggcttggaggtggtggtcgaggagggtgctggagctcacatgttatggctgtggaggtgggaggccgcccacgggagggaaggtagggccttccgggggcagcgatggcaggcggcggctgtgggggtgggagggagccgccggcggctgcagtgggaggagtgatactgaggcctggttttattcatggaactcgtcgagtgggcagtgtaaagatacctcttggtcttgtcggttctcctatgcagatggtgatacttctctttcctcacttctttgaatccatttaaatactaagtgaagtctaagttattattatgggtggtatgcatattttggttttcagctactggcagtgaggtagctgcaacaatgcacctaaaattggttgtaatagattcttttccatggctttatgtgttctaattcatgtataatctagtggcaaatcaaacttaattgaagtagttttagtgccata

SEQ ID NO: 111195 - DNA, 1255 bp, Zea Mays
cggcggacatgttcctggaaggaaagggttaagtttccagcaagatttggcatcgcgatggccgatgggtggcttatagtgacaattaggcattaagggaatttattctacttagtgcaaatcgattggagaggaaactgccatttgataacagttccagccagggcgggtcctgatattttggaaatgcattcttcggcaatgccacacccagtgatcagaggcacattgagaagccttttaaagtgaaggaggcagaacctgtgaatgtgacaaaaccttcaccacacaagctgctggttctaggaggaagtggtttcgttggatcacacgtttgcaaagaggctttggacaaaggtttagttgtctctagtcttaatagatcgggaaagccatccttaaatgaaccttgggctgacaaagttatatggaaccaaggcaacctccttgaaccagcttcattgaaggatgctatggataatgtttctgcagtggtatcttgtgtcggaggttttggatcaaattcattcatgtataagattaatgggactgcaaacatcaatgccatcagggctgcagctgagaaaggtgtaaagagatttgtatatgtgtcagctgcagactttggattagtgaattatttattgcaaggctattacgagggcaagagggcttctgaagctgaattgttgtcaaagtttacatatggaggcgactttcacatggagggggctccgttcagccaccatgggaaggagtccggcttggaggtggtggtcgaggagggtgctggagctcacatgttatggctgtggaggtgggaggccgcccacgggagggaaggagtgatactgaggcctggttttattcatggaactcgtcgagtgggcagtgtaaagatacctcttggtcttgtcggttctcctatgcagatggtgctccaaaatataaaacctttgactaggttaccacttatcgggccgctattgactcctcccgtcagtgctgcctccgtggggaaggtcgctgtgagagcagcgacggatccggtgtttcctcctggcatcgttgatgtctacgggatcatgcgttacagcgagcaaaactaagctgcctcattcaccgggcagtatatacatgccgctgtacttttgttacagctgtttctttgtttgttttacatgtactggtatccttctttaactcacttgtttacgagacgataaacattcaataaatatgtattttagcgaca

SEQ ID NO: 111196 - DNA, 604 bp, Zea Mays
cttgccttctcccacaccgtgtaatggacgcactctcctcctctccccactttcccccattcctcggatggagtaacctccgccaccgccgttatggcgttaatggtgacggccggttaccctccccctctagcaccctctctactcccttttcccctctataaaagcaagcgccgagccccatggatccgtccctcggttaccaagcttgcttcccgcgcccttagctcgctgtctcacaaaaaccaccgccggagctctctgaccgccgtcagagcagcacgccgtcggagcaggccgccgccagagggccgccagaagtcgacgtcgcgcctccatcaaattcctctgcccgaagccgttccgtgcctccctccgtttgtcgacgtgctgctgccagagaacacagagaggttgaggaagacacaaattttgtgttctacccctgaggctatgattaattctgtttaggatccactgcaacaacttctctatttttaaatatgtatttgagctcttatgaaatgatgtttgtcataccggttatgtatatatgtgttaacatgttaaaatacctttttacgcaatggttgtatttctgcaa

SEQ ID NO: 111197 - DNA, 1101 bp, Zea Mays
aaaatctccgtttcttcggagccaggctccactcattccctgtcgtcgcagctcagagcacgcgcagccgcctcgcctcgcctggagctcacgcagccgcctcgcctggagctcgcgcagccgcctcgccttgcctggagcttgcgcagccacctcgtctggatctcgtgctagggttggagccagggtcctctcgcagccgcctctatcctcgcctggagctcgcgctagggttcctctcgcagccgccgctgttgaggtgctacttgcaaaagcgtgtactgaacagctcaaaaggccctgctatatgtgcactgcgtgctcagcctgataagagagagtatgcaatagagatgaagaacagtgtggaaagcacagaaaatcttttcattagagaagcaatggctacagaggttttaattggaaaaaatgacaccattgagggtgtttgcactttcttcagcatggactttatgcaccatctgttgtacttagcaccagaacattcatgagtgtttctggggccaagctgctcggctcctggggcgtggacctccccatcaggccgctgcacacgctccacctctactggcgcgtgaagcccggccaggagcagactgtctcgacgagcgccgggttcccgaccttctccagctacggcgacccgcccgtgtacggcgcgccgtcgctggagctcccggggctcatcaagatcagctgcattagatcttagagtacactgttttacacaatttggagttgttactactatcaagctttagactttagactttggagtacactgtttttacactgtattaagctttagccttttatgctacagtgtgtaaaaaagcaagctttagacagttaggctaatctatagacagtgtaaagcttgattttttgacaatacagttcaaattcttagaacaatgcggtctgaaagtttaatacagttctgacaatagagttgagtacactgttttgaggctaatatgtcaagcttagataccagtttgtcaagcttgttttagtccaaatttgtatttacttagctgtgtaaattgtgtacaatttgaagactgttttagttggtgt

SEQ ID NO: 111198 - DNA, 1208 bp, Zea Mays
aaaatctccgtttcttcggagccaggctccactcattccctgtcgtcgcagctcagagcacgcgcagccgcctcgcctcgcctggagctcacgcagccgcctcgcctggagctcgcgcagccgcctcgccttgcctggagcttgcgcagccacctcgtctggatctcgtgctagggttggagccagggtcctctcgcagccgcctctatcctcgcctggagctcgcgctagggttcctctcgcagccgccgctgttgagccttgtaaccctgctgttggtggccctgcaacgtctcaacttgtccatgaggtagatgcccttggtggtaaaattggaaaaattactgataggtgctacttgcaaaagcgtgtactgaacagctcaaaaggccctgctatatgtgcactgcgtgctcagcctgataagagagagtatgcaatagagatgaagaacagtgtggaaagcacagaaaatcttttcattagagaagcaatggctacagaggttttaattggaaaaaatgacaccattgagggtgtttgcactttcttcagcatggactttatgcaccatctgttgtacttagcaccagaacattcatgagtgtttctggggccaagctgctcggctcctggggcgtggacctccccatcaggccgctgcacacgctccacctctactggcgcgtgaagcccggccaggagcagactgtctcgacgagcgccgggttcccgaccttctccagctacggcgacccgcccgtgtacggcgcgccgtcgctggagctcccggggctcatcaagatcagctgcattagatcttagagtacactgttttacacaatttggagttgttactactatcaagctttagactttagactttggagtacactgtttttacactgtattaagctttagccttttatgctacagtgtgtaaaaaagcaagctttagacagttaggctaatctatagacagtgtaaagcttgattttttgacaatacagttcaaattcttagaacaatgcggtctgaaagtttaatacagttctgacaatagagttgagtacactgttttgaggctaatatgtcaagcttagataccagtttgtcaagcttgttttagtccaaatttgtatttacttagctgtgtaaattgtgtacaatttgaagactgttttagttggtgtagaaattgtgtagaa

SEQ ID NO: 111199 - DNA, 459 bp, Zea Mays
atggctgagggagctcgggacacaggagcgccgcgaagaggaagctctgcgagctgggatccggcgccggggaaggaagaaagaagagcggctgtcaggaggggaggagacgcggctagggagggactccgctggtgctccactcgacgaccggagatgaggcgacttgggaagagcctgggcgtcggccaggaagataggtcagggggcacggcggcatggcgagggagccggcgagcgcaggggctccacgagctgagggggcgcggcgatgggagctcagcacggatcttggcaaggcgtggccatgggaggagcgaccggcgcagagaacttgaggaacgcgcgataggaagatggagcagggagatgaagaagggtgtcgtgctcatcaacaggaagggaaggagcaggggacgaccatgggaaagcggcaacagggaagagcgcgcggcgtga

SEQ ID NO: 111200 - DNA, 231 bp, Zea Mays
atgatatcccaccagacctcattaaaattgggcaacatatactccacgaccttggtggccaatcctactaaaatgcatccacagaaaagaaatcgttgtcacttgaatcagtgtacaatgacagatagctacaaaccactacaattaaaacccatgcccaattttagtaaacaatctagattcagtctagtcaagcataacagagtttcaaccgatcatttgaaaatgtga

SEQ ID NO: 111201 - DNA, 1187 bp, Zea Mays
tccgctgatatctctcgctcatccgctgatctctctccctcacgttttctctggtgctttcctgtagccagttctttatcctcatccactcacaccaccgcgcatggccattggccttatcttcagccacgcgatatttcttttgctcagtgttgtctctgttcttcccccacatcggcatcctacccaggctgagcttggcccctgcgccctcccatctccctcagctcatccatctccatgctcagtctgtgctcttttgtcgtcgtggtcgcctgggtcgtctcatcgccctgcgtcgtcgacctcgctctggcagtcaggctcctgtgttgtaacatggctgtcgtcgcctacctccctgtgccctgctcctacttcgtggtcgtgtcgtgtgccagggctatccgcagcttgcctgcaccaagtccgggcatgtccatcgccgttcctcgtgcagctcgctgccggctactgtcaacctcgcccatggtcgtcaatccgcccatgtccggtgcctgccctccacgccggtcatccttgccatgaacccctccatgctcggcctcaacatcagtcgcaccatcatctgcaatagagcagatgagcccctccaccaatgccctcgcttacaactccatggcctcgcctgatacaaagtcgtcgctttccctggacagcggcgttgccgggcaccatgttgctcatttcggccatgttcctcttcgggctcagcagctaagcgtcctgtctgaccctagcaccttgcaccgtcctcgccgtcaattcctcagtgacgccttggctcctgcagccgcgtccgtgacgtgctcgtcatccccagcgactcgtttcctgctgcacgctacactgagcccggtagccgtattccatcagcttattagataattaagggtgtattttttgtgtatgattgaggaggagagaaatcaccggaatgtgtggagaagaagcgtagtctaatacgacacccgccaagtgctcgacaaaatgtctaaacttggaatcgtcgctgtttctgtagatttcgggtcgagtttaattatggtgagttcattcgttatttccgtcaactaaataaatggtaggattaaatagaaaaatcgattgcgatgattctcttgtctattacttgatgtggagattaaagttgaattttaggttta

SEQ ID NO: 111202 - DNA, 124 bp, Zea Mays
tttttttaccaattttaggacttacattcgtcctgaatccatatcgggttttctcaaactagtggaactttggaaagaccacgtagtgctaccctgccttgtttcctcagtagagatgaatggg

SEQ ID NO: 111203 - DNA, 117 bp, Zea Mays
gttgtcgcctagtgcgttgatccttttgttgtcactaaaaatctcgatatacaaatatctgagatttttcggtaaggaaattaaaaatcagaaaacagaaaaatcaaaaaaaaaacc

SEQ ID NO: 111204 - DNA, 420 bp, Zea Mays
atggaggccgagcaggtgaagcagtgcgcggcaccgggggcgagcagagccggacgccatgggagagggagatccgagctaggagggtccaaggcgtggcgagaaggaagccaagtgccggccatgggagatggagccgagctagagcaagaagaagggggcgcaacgctgggagaacgcgcggtcgagcaggggcccgacgatgaacactcgtgcgacccggccagcagaggcaggaaccaggggcgcgcaggcatctgggtgcgtggccatgaacatgaagtcgcatcgcctgagctcggctggaaagggatgagggaggggatccgagctggggtcattgacacgcagagggagccgctcggtagggagttgggcgtgggcgtggccaacgagcagaggggagagggaggggcttga

SEQ ID NO: 111205 - DNA, 564 bp, Zea Mays
atggctcgagcgctgctcctgctgcgagtagctatagctcgctaccctcctctcccggcctcacccgcgctcctccagccgcagccgctgccgctgctgcgctgccacgcgccctcccagtacaaatcccagctccgcttcctatcctccctctcctcctcgtccgtgccgaccagctcagatgctcccagcgacggcaggggcggccgtgacggggaagaggatggcgcgaagagcggcggccacgtcgattacttggagatgagcgacgaggagctcatggagcagtgtgatatgggcacgttcaaggcgtccggccccggcgccagcgacgccctcgccgacgcgcacggtgcattcctggaggcgctgctcgacctaaggcgtggccacgccgcactctggctgtgcgacacggcgggcgcccagcggcacgctgagagtgaccttgtccgcctcgtgtcccccgcgcgccccggcgtcaggctcccgcaggcggcagtgcccgtggcgccagcgagcgagcgaggaatagcacttcctgttggccatagatggcgatga

SEQ ID NO: 111206 - DNA, 497 bp, Zea Mays
tctggtaggttgttaggatgctaacaaactcgccccaaaccctttactataacccagcgcgccgcacaccttgcctcgtgctccaatcccccaaccggcgcggcgccatggacaaagaaaaaaagcagtgcgccgtcgtgtgtgagggtgtgagcgtcgtctctgccgcacggtgggagtcgggttctccaacaacttgcgcgcggtgtccagctgtgaatcaccgccatacccttcgcccgctgtaatacccaaattatgatttttagacaaaaacaaccatcaattatatattatgtgggttttctattttttgttgttgtttattttatttagcattactcatcatgggtaagagaatagcatagtcaataaaccaaaatgaacttatgcatacatgttggtatattttgtgtgtgcatttaaactttcataatgactcacgaatttgaaattaaatattagaaatttcgaaattagaaaaaaatacaaaaaaa

SEQ ID NO: 111207 - DNA, 2393 bp, Zea Mays
cctttccactccccgcctcgcgagaccacacgcgacggctgcctccaccacgccgatggcgaccgctcactcacccagctgaacaactccgccgagcacgcgcaagcagcaggagcgatagagatagaggaaggcgacgaggagctcggtccgagctactagctgcggctgcggcgaccatggagttggaccggctgctgctcgaccagctggctggcgaggccctgcgggagctgctgcacgccgtccagggcaccctgttctgccgctccactgccgagcgcctgcgccggagcgtcgagccgctgttgccgctcgtgcagggcctcggcccgcacgcccagcgctccgcgggggacctcggcgagctcgcggcgcgggtcagggaggcgctcgacctggcccgccgcgccgccacgtccccgcgctggaacgtctaccgctccgcgcagctgtcgcgccggatggaggcggccgaccgcggcatcgcgcgctggctggagcgccacgcccccgcgcacgtcatcggcaacgtgcgcggtctccgcgacgagtcccacgcgcgcatcgcccgcctcgagcgccgcgttgacgagatcgccgccagcgccgcgcagccgccgcccccagccctctccgtccccgtcgcgccgcacaagggcgtgaccatgccgatggaggtgccaactcacaagggcatggctatgccgatgccgatgccggttcctgtgcaggcggtgcccgccaaagccggggtggtggccatggacatggacctcaccgagggacacgaaaacgaggggatggttggcgccggcgttaaggtggccaaggaaaaggtgaaggagatggttatgagcggcggcggcggcggctgggaggtggtcggtatctccggcatgggcggcagcggcaagaccacgctcgccatggagatcttcagggatcataaggtccgagcctacttcaatgataggatcttctttgagacgatctcacaatccgcaaacttggaggccatcaagatgaagctgtgggagcagatcagcggcaacatggtgctcggtgcatacaaccagatcccagaatggcagctcaagttaggaccaagagaccgagggcctgtccttgtgatccttgacgacgtttggtctctcccacagctcgaggagctcaccttcaggttccctgggtgcaagactctagttgtatcgaggttcaagttccccacactggtaaaacagacatacgaaatgcagttgctagacgaggcggcggccttgtccgtcttctgccgtgccgctttcgatcaggagtgtgttccgcggactgctgacaagagattggtcaggcaggtctctgcagagtgcaggggccttccactggctctgaaggttattggtgcgtcattgcgcgaccagcctcctaagatctggctcagcgccaagaaccggctgtctcgaggagaggctatttccgactcccatgagaccaagcttctagagaggatggcggcaagtgtcgagtgcttgtcggagaaggtcagagactgcttccttgatctgggatgcttcccggaggacaagaagatcccccttgatgtcttgatcaacatctggatggaggttcatgatcttgatgaaccagatgctttcgccatcttggttgagctttcgaacaagaaccttcttaccctcgttaacgatgcacagaacaaggctggagatttgtacagcagctaccatgactactcggtgacacagcatgatgtgctgagagatcttgctcttcacatgagtgggcgtgaccctctgaacaagcgtaggcggttggtgatgccgagaagagaagagacacttccaaaggactggcagaggaataaggataccccgtttgaagctcagatagtttccattcatacaggtgaaatgaagggatctgactggttccagatgaacttccccaaggcagaagtgctcatcctcaacttcgcctcaagcctgtactacctcccgccgttcatcgcgtcgatgcagaacctgaaagccctggtgctgatcaactacggcaccagcagcgcggcccttgacaacctatccgccttcaccacgctgaacggcctgaggagtctctggctggagaagatcaggctcccgccgctgccgaagaccaccatcccgctgaagaacctgcacaagatctcgctcgtcctctgcgagctgaacagcagcctgaggagcctcccgaggtcgtcgtcctccctcaagtccctcggccacgtcgtgtgcgacgaggagacggcgctgctgtggcgggaggccgagcaggtcatccctgacctccgggtgcaggtggccgaagagtgctacaacctggactggctagcggactga

SEQ ID NO: 111208 - DNA, 2981 bp, Zea Mays
cctttccactccccgcctcgcgagaccacacgcgacggctgcctccaccacgccgatggcgaccgctcactcacccagctgaacaactccgccgagcacgcgcaagcagcaggagcgatagagatagaggaaggcgacgaggagctcggtccgagctactagctgcggctgcggcgaccatggagttggaccggctgctgctcgaccagctggctggcgaggccctgcgggagctgctgcacgccgtccagggcaccctgttctgccgctccactgccgagcgcctgcgccggagcgtcgagccgctgttgccgctcgtgcagggcctcggcccgcacgcccagcgctccgcgggggacctcggcgagctcgcggcgcgggtcagggaggcgctcgacctggcccgccgcgccgccacgtccccgcgctggaacgtctaccgctccgcgcagctgtcgcgccggatggaggcggccgaccgcggcatcgcgcgctggctggagcgccacgcccccgcgcacgtcatcggcaacgtgcgcggtctccgcgacgagtcccacgcgcgcatcgcccgcctcgagcgccgcgttgacgagatcgccgccagcgccgcgcagccgccgcccccagccctctccgtccccgtcgcgccgcacaagggcgtgaccatgccgatggaggtgccaactcacaagggcatggctatgccgatgccgatgccggttcctgtgcaggcggtgcccgccaaagccggggtggtggccatggacatggacctcaccgagggacacgaaaacgaggggatggttggcgccggcgttaaggtggccaaggaaaaggtgaaggagatggttatgagcggcggcggcggcggctgggaggtggtcggtatctccggcatgggcggcagcggcaagaccacgctcgccatggagatcttcagggatcataaggtccgagcctacttcaatgataggatcttctttgagacgatctcacaatccgcaaacttggaggccatcaagatgaagctgtgggagcagatcagcggcaacatggtgctcggtgcatacaaccagatcccagaatggcagctcaagttaggaccaagagaccgagggcctgtccttgtgatccttgacgacgtttggtctctcccacagctcgaggagctcaccttcaggttccctgggtgcaagactctagttgtatcgaggttcaagttccccacactggtaaaacagacatacgaaatgcagttgctagacgaggcggcggccttgtccgtcttctgccgtgccgctttcgatcaggagtgtgttccgcggactgctgacaagagattggtcaggcaggtctctgcagagtgcaggggccttccactggctctgaaggttattggtgcgtcattgcgcgaccagcctcctaagatctggctcagcgccaagaaccggctgtctcgaggagaggctatttccgactcccatgagaccaagcttctagagaggatggcggcaagtgtcgagtgcttgtcggagaaggtcagagactgcttccttgatctgggatgcttcccggaggacaagaagatcccccttgatgtcttgatcaacatctggatggaggttcatgatcttgatgaaccagatgctttcgccatcttggttgagctttcgaacaagaaccttcttaccctcgttaacgatgcacagaacaaggctggagatttgtacagcagctaccatgactactcggtgacacagcatgatgtgctgagagatcttgctcttcacatgagtgggcgtgaccctctgaacaagcgtaggcggttggtgatgccgagaagagaagagacacttccaaaggactggcagaggaataaggataccccgtttgaagctcagatagtttccattcatacaggtacagtacagctaccattagtcatttactgaacatgattttgtagctttcttccttggggcagaatgatctgaccaactattccgaaaactccaggtgaaatgaagggatctgactggttccagatgaacttccccaaggcagaagtgctcatcctcaacttcgcctcaagcctgtactacctcccgccgttcatcgcgtcgatgcagaacctgaaagccctggtgctgatcaactacggcaccagcagcgcggcccttgacaacctatccgccttcaccacgctgaacggcctgaggagtctctggctggagaagatcaggctcccgccgctgccgaagaccaccatcccgctgaagaacctgcacaagatctcgctcgtcctctgcgagctgaacagcagcctgagagggtcgacgatggacctgtccatgacattcccgcgcctctccaacctcacgatcgaccactgcatagacctaaaggagctgccagcaagcatctgcgagatcggctccctggagaccgtctccatctccaactgccacgacctcaccgagctgccatacgagctgggcaagctgcactgcctcagcatcctccgggtgtacgcctgcccggcgctgtggcggctcccggcgtcggtgtgcagcctgaagaggctcaagtacctcgacatatcccagtgcatcaacctgacggacctcccggaggagctcggacacctgacgagcctcgagaagatcgacatgcgggagtgctcgcgcctgaggagcctcccgaggtcgtcgtcctccctcaagtccctcggccacgtcgtgtgcgacgaggagacggcgctgctgtggcgggaggccgagcaggtcatccctgacctccgggtgcaggtggccgaagagtgctacaacctggactggctagcggactgatgtcagattctggatgctaccgcttccaaactgaccatgtacatatatgatgataacgatgatgtttagatgttgcttcccctgtgtagtgcagggaagagaatcatcaatccactggccgattttgac

SEQ ID NO: 111209 - DNA, 2919 bp, Zea Mays
cctttccactccccgcctcgcgagaccacacgcgacggctgcctccaccacgccgatggcgaccgctcactcacccagctgaacaactccgccgagcacgcgcaagcagcaggagcgatagagatagaggaaggcgacgaggagctcggtccgagctactagctgcggctgcggcgaccatggagttggaccggctgctgctcgaccagctggctggcgaggccctgcgggagctgctgcacgccgtccagggcaccctgttctgccgctccactgccgagcgcctgcgccggagcgtcgagccgctgttgccgctcgtgcagggcctcggcccgcacgcccagcgctccgcgggggacctcggcgagctcgcggcgcgggtcagggaggcgctcgacctggcccgccgcgccgccacgtccccgcgctggaacgtctaccgctccgcgcagctgtcgcgccggatggaggcggccgaccgcggcatcgcgcgctggctggagcgccacgcccccgcgcacgtcatcggcaacgtgcgcggtctccgcgacgagtcccacgcgcgcatcgcccgcctcgagcgccgcgttgacgagatcgccgccagcgccgcgcagccgccgcccccagccctctccgtccccgtcgcgccgcacaagggcgtgaccatgccgatggaggtgccaactcacaagggcatggctatgccgatgccgatgccggttcctgtgcaggcggtgcccgccaaagccggggtggtggccatggacatggacctcaccgagggacacgaaaacgaggggatggttggcgccggcgttaaggtggccaaggaaaaggtgaaggagatggttatgagcggcggcggcggcggctgggaggtggtcggtatctccggcatgggcggcagcggcaagaccacgctcgccatggagatcttcagggatcataaggtccgagcctacttcaatgataggatcttctttgagacgatctcacaatccgcaaacttggaggccatcaagatgaagctgtgggagcagatcagcggcaacatggtgctcggtgcatacaaccagatcccagaatggcagctcaagttaggaccaagagaccgagggcctgtccttgtgatccttgacgacgtttggtctctcccacagctcgaggagctcaccttcaggttccctgggtgcaagactctagttgtatcgaggttcaagttccccacactggtaaaacagacatacgaaatgcagttgctagacgaggcggcggccttgtccgtcttctgccgtgccgctttcgatcaggagtgtgttccgcggactgctgacaagagattggtcaggcaggtctctgcagagtgcaggggccttccactggctctgaaggttattggtgcgtcattgcgcgaccagcctcctaagatctggctcagcgccaagaaccggctgtctcgaggagaggctatttccgactcccatgagaccaagcttctagagaggatggcggcaagtgtcgagtgcttgtcggagaaggtcagagactgcttccttgatctgggatgcttcccggaggacaagaagatcccccttgatgtcttgatcaacatctggatggaggttcatgatcttgatgaaccagatgctttcgccatcttggttgagctttcgaacaagaaccttcttaccctcgttaacgatgcacagaacaaggctggagatttgtacagcagctaccatgactactcggtgacacagcatgatgtgctgagagatcttgctcttcacatgagtgggcgtgaccctctgaacaagcgtaggcggttggtgatgccgagaagagaagagacacttccaaaggactggcagaggaataaggataccccgtttgaagctcagatagtttccattcatacaggtgaaatgaagggatctgactggttccagatgaacttccccaaggcagaagtgctcatcctcaacttcgcctcaagcctgtactacctcccgccgttcatcgcgtcgatgcagaacctgaaagccctggtgctgatcaactacggcaccagcagcgcggcccttgacaacctatccgccttcaccacgctgaacggcctgaggagtctctggctggagaagatcaggctcccgccgctgccgaagaccaccatcccgctgaagaacctgcacaagatctcgctcgtcctctgcgagctgaacagcagcctgagagggtcgacgatggacctgtccatgacattcccgcgcctctccaacctcacgatcgaccactgcatagacctaaaggagctgccagcaagcatctgcgagatcggctccctggagaccgtctccatctccaactgccacgacctcaccgagctgccatacgagctgggcaagctgcactgcctcagcatcctccgggtgtacgcctgcccggcgctgtggcggctcccggcgtcggtgtgcagcctgaagaggctcaagtacctcgacatatcccagtgcatcaacctgacggacctcccggaggagctcggacacctgacgagcctcgagaagatcgacatgcgggagtgctcgcgcctgaggagcctcccgaggtcgtcgtcctccctcaagtccctcggccacgtcgtgtgcgacgaggagacggcgctgctgtggcgggaggccgagcaggtcatccctgacctccgggtgcaggtggccgaagagtgctacaacctggactggctagcggactgatgtcagattctggatgctaccgcttccaaactgaccatgtacatatatgatgataacgatgatgtttagatgttgcttcccctgtgtagtgcagggaagagaatcatcaatccactggccgattttgacatgttcagtcagtgttcatcacgcatccactcca

SEQ ID NO: 111210 - DNA, 153 bp, Zea Mays
gcgcatgatttttcatttcttgtagctgacgcgctggacgtccacaggtcgctttttttatttttcatctgtcgtagccaccgcatgacgcagttgggcgtccacatgtcattttttgcgtcgcttgtttacttttcttcgccagtgctctgc

SEQ ID NO: 111211 - DNA, 116 bp, Zea Mays
cccaatggtaatgacagggcgtaatcttccaatatactttaaggaagaacaagagttattcagattacacaccatacctatagctattctttttaactaacaaaaatagtacgtgg

SEQ ID NO: 111212 - DNA, 177 bp, Zea Mays
atggccaagaagacgagcaacggcggccagctatggccagacccggagaagatgagggaggccggggcgagcttgagcagggagagggcgctcgggcgccatgggcgaggatctccagtcacgggcacgaagaagcggcgcttgagggaggagaccggaggggagcgaccagcgtga

SEQ ID NO: 111213 - DNA, 255 bp, Zea Mays
atgaatccccttgctattcgaaatggagggcatgtgaaagcttgttgcaccggcaagctgttgaacaatctaggaccgtcgaataacaactgccgcctggacagcagtagcaaacaccttcggatattgctccctttttgcaggcccgtttctcgcatttgcagaaacgaacaacgttccgagagtatgcaggaatcatcaaacttcctaggatcaccatcaagagcaggacggccttgcttgcttccattgtaa

SEQ ID NO: 111214 - DNA, 1065 bp, Zea Mays
accacgccatttccccgccgacactcccacgccatcgctctccctcctggcgtcttcccccttcctctaccagctctcaggatgctcttcgcttcagccatggatgagactcctacgtgcctctgctccagcgatggacgccggggcgcccttctctggcccatggccgccacggtccgcagagcagagcagcacctctgctcctccttccttcctccaatgtcaaccgacaccatggaaccaaacccgagatctccatctctaatccagcgcgcagggcatttctcagggtccgagctcgagcaggtgagctcgtccccttagcttgggctccttgtttgcttcctgcacgtacgctccctctcccatctggcttcctgcccttctcaagtccggccaccccagccttgccgtggattccatcgagcagccccacctggccgccatcctccccacaccgacgacccccctctactcctctccatgttcagcgcctaaagcgaacccctgtcgcgcctgagatccaggcagccatggagggcagccgaaccctttctccatggccaccaatcgtcctgctcctttcccctggtgtgctcgacgcctggtgcttcgacctcgacagcttcccctgcgagcgacacctctgctcggctccctctcctggcagcgagctccccttgctcggcccttcgctagtgcagcccgcagggcgcgtccctcttagaggacgagagcgaggcccaccatcgacgcctctgcctcagcggcagtacctgcagcaccctccctgtttccttcaccgcctgagctcctcccttgcatcatggttggcttcgctgctgctcgctcactcccttgctgtgcggagcagcacatcgaccgcgcgccacctgttcgacgcaatgccgagtcgggtcgtcgtgcgctcaaccacgccatgcagcagtcgtgcactcccttcagcccctgcgatgtcgtgcttgcgcactattcgacaaaatgcacgtatgagcattgtgtcgtggacgatgccatggtggtgccctacgtcctcgctactcg

SEQ ID NO: 111215 - DNA, 2076 bp, Zea Mays
caggagccgcggaaaaaaagagaaagagagagcaaaaaccctggtcccctccgcccgccgccgccaccaccgcgcctccgcatttcagatcagaagtcagagcccagaggggagggtctgtggcgccgctcccgtcccgccggagacccaagcgagaaccgccactcctcctccttccctcattttgaaatcgatttcggcggcctctcacctccgcagcccgcaccatctctccgcggctgctgcgctacttaaccgcctcgatctgctccccatttccccgtccagataaacgccagccgaaaccttagggtcccgcgcctccgcctccttcttccccgccgctgaagaggtcgacgatggcgggcaaggagaacgcagctcccgtgggggccctgggcgtggcggggccccggctcacgcgggccgcggcgaagcgcgcggcggcgatggcggcggagggtccggacgacgccaaacggaggcgggtggcgcttggggagctcccggcgctcgccaacaacgccgccctcgcaccgtctcgccccgtgaagccctcgaagcccgcgtccaggcccgcgaggcccggcgcgtcggaggcctgcgggcccgccgccgccgccgaggccgagcgctgcgcgtccttctccccgccgcgcgccgccgacgccgagtccaactccgcctcctactccccgccgcgcaccacagccgacaccgctttctccgcgccgccgcgcgccgccgacgccgagtccaactccgcctcctactccccgccgctcgccacagccgacaccgctttctccgcgccgccgcgcgccgtggcgcccgccgacctccagctctccgggtcctacgcctccgacatctacacctacctccgctccctggaggtggatccgcagcggcggtccagatccgattacatcgaggcggtgcaggcggacgtcacggcccacatgcggagcatcctcgtcgactggctcgtcgaggtcgccgaggagtacaagctcgtcgcggacacgctctacctcaccatctcttatgtcgaccgcttcctctccgtcaacgcgctcggccgtgacaagctgcagctccttggcgttgcctccatgctcattgccgcgaagttcgaggagatcagcccgccgcacccggaggacttctgctacatcacagacaacacctacaccaaagaggagctcctcaagatggagagcgacatactcaagcttctcaagttcgagttgggcaatcctacaatcaagaccttcctgagacgtttcataagatctgcccatgaagacaagaagggctccatcttgttaatggaattcttggggagctacctcgctgagctgagtctactagattatggctgcctccggttcttgccatcagtagttgctgcttcagtcatgtttgttgctaggctgaccattgatccaaataccaatccgtggaacacaaagctgcagaagatgactggctacaaagtttctgaactcaaggattgcatcgtagccatacatgacttgcagctcaacaggaaatgtccatcattaacggcaattcgagacaagtacaagcagcacaagttcaaatgcgtgtcattgatcctcgtgcctgtcgtgatccctacttcatactttgaagacttagctgagtagctgctctcggactgtaccgctgtaaggctaacaatctgagctctccttgagctcttagggacaagcagaaaataaccgtttgatgagctttcctctcatttaagtagcgtggtgaaagctatttgtttgaggttctttaggattcgcgccgctgtgtcactcttagtgagaccaggcattctcttgctgtgaatcttgtatcatatcttagtcacaccttgccttggtccgttggcaacgaatgtaatgtttgatacgttagacccttccatctgatctatctatgatgcgtggatactttactcgtgttagataccgtatcagatactgatacttcgtggatatgtatccgatacgcatcgaatatttttgtgattttaaataaataaaaaaaaacttgaat

SEQ ID NO: 111216 - DNA, 2306 bp, Zea Mays
caggagccgcggaaaaaaagagaaagagagagcaaaaaccctggtcccctccgcccgccgccgccaccaccgcgcctccgcatttcagatcagaagtcagagcccagaggggagggtctgtggcgccgctcccgtcccgccggagacccaagcgagaaccgccactcctcctccttccctcattttgaaatcgatttcggcggcctctcacctccgcagcccgcaccatctctccgcggctgctgcgctacttaaccgcctcgatctgctccccatttccccgtccagataaacgccagccgaaaccttagggtcccgcgcctccgcctccttcttccccgccgctgaagaggtcgacgatggcgggcaaggagaacgcagctcccgtgggggccctgggcgtggcggggccccggctcacgcgggccgcggcgaagcgcgcggcggcgatggcggcggagggtccggacgacgccaaacggaggcgggtggcgcttggggagctcccggcgctcgccaacaacgccgccctcgcaccgtctcgccccgtgaagccctcgaagcccgcgtccaggcccgcgaggcccggcgcgtcggaggcctgcgggcccgccgccgccgccgaggccgagcgctgcgcgtccttctccccgccgcgcgccgccgacgccgagtccaactccgcctcctactccccgccgcgcaccacagccgacaccgctttctccgcgccgccgcgcgccgccgacgccgagtccaactccgcctcctactccccgccgctcgccacagccgacaccgctttctccgcgccgccgcgcgccgtggcgcccgccgacctccagctctccgggtcctacgcctccgacatctacacctacctccgctccctggaggtactccgctccgctccccaatctttcgcatttccgcagattcgatgcatctgcgttgggtctcgtctgatccgatgcttgcttgctacggatttggtgcggcgggtgcaggtggatccgcagcggcggtccagatccgattacatcgaggcggtgcaggcggacgtcacggcccacatgcggagcatcctcgtcgactggctcgtcgaggtcgccgaggagtacaagctcgtcgcggacacgctctacctcaccatctcttatgtcgaccgcttcctctccgtcaacgcgctcggccgtgacaagctgcagctccttggcgttgcctccatgctcattgccgcgaagttcgaggagatcagcccgccgcacccggaggacttctgctacatcacagacaacacctacaccaaagaggagctcctcaagatggagagcgacatactcaagcttctcaagttcgagttgggcaatcctacaatcaagaccttcctgagacgtttcataagatctgcccatgaagacaagaagggctccatcttgttaatggaattcttggggagctacctcgctgagctgagtctactagattatggctgcctccggttcttgccatcagtagttgctgcttcagtcatgtttgttgctaggctgaccattgatccaaataccaatccgtggaacacaaagctgcagaagatgactggctacaaagtttctgaactcaaggattgcatcgtagccatacatgacttgcagctcaacaggaaatgtccatcattaacggcaattcgagacaagtacaagcagcacaagttcaaatgcgtgtcattgatcctcgtgcctgtcgtgatccctacttcatactttgaagacttagctgagtagctgctctcggactgtaccgctgtaaggctaacaatctgagctctccttgagctcttagggacaagcagaaaataaccgtttgatgagctttcctctcatttaagtagcgtggtgaaagctatttgtttgaggttctttaggattcgcgccgctgtgtcactcttagtgagaccaggcattctcttgctgtgaatcttgtatcatatcttagtcacaccttgccttggtccgttggcaacgaatgtaatgtttgatacgttagacccttccatctgatctatctatgatgcgtggatactttactcgtgttagataccgtatcagatactgatacttcgtggatatgtatccgatacgcatcgaatatttttgtgattttaaataaataaaaaaaaacttgaatactccaactagtgaattagcgttgcttgtctcagtccagatggatgatgttttgtgacagaggaaatgagaaccgagagagacctttctttattgcattctcatatataaatgaaaaga

SEQ ID NO: 111217 - DNA, 264 bp, Zea Mays
agaagccaaaaccaagcatacttggatctactttcttggcttcagcaggttgcattcttcgatcttggcaaatctccctcgcactcttggctggctgtctgccagagccttcctgcactctaccttgatcttcctgtcaaagttccgcttgatcttcttcttcctatacctggaaagcttttgcttcctttcttcggtcttgagatcactgatggtcacacaaacatttgctgctggtcgaggcgtgttggctccaaggttctg

SEQ ID NO: 111218 - DNA, 87 bp, Zea Mays
cttctttcttggaaactaatggcttccactgaaagcatgccggttaggtcagaactcgtagccttattaatacagatcagcagaggc

SEQ ID NO: 111219 - DNA, 2263 bp, Zea Mays
cctgcgcatccacttccaggcgtagcagcggcgtgtagggactccgctcgtggcggccggcggcggcggcattctgccattgccaactactcacataatcccaggcgctggcctctcgcatgcacgagcacaagctatgctcaggcacctaaccaacaacccattgctctcgcgccgatgccaccgcatgttccatcacaaccggctctgtaccaccgccacatcctcggcggccgccggtgagatcgcgccggatcccgccgcatacgagactaccgttggcgttgaatatgacctcgcgcaggagttgcgcagccacctcgtgcgcgacacctgcaggctgctcgagctccgggactcgtggagcgccaagctggaggcgcagctccggcacttcctccgcgcgctgacgccatcgcaggtccgcgccgtgctgcgcgcgcaggcgcagcgggacgcccgcgctgcgttcgagttctttcgctgggccgaccgccagtggaaataccgtcacgccccggaggtgttcgacgaaatgctggcgctcctcagccgcaccaggctccacgacccggcgcgccgcgtcgtgcgcctcatgatccggcgtggtatacgccggggcacgcggcagtttgcacacctcatgctctcgtacagccgcgccgggaagctccgctccgccatgcgcgtgctccagctcatgcagaaagatgggtgcgcgcccgacatatgtatatgcaacgtggctgtgaacgtgcttgttgtggccggacgtgttgacaaggcgctcgagtttgcggaaaggatgaggcgtgttggggtcgatccggacgtggtcacatacaattgcctaatcaagggattatgcggtgctcggcggattgttgaggcattggagatgattggctcaatgctgcaaaatgggtgcccgccagataagattagctactttacagtgatgagcttcttgtgtaaggagaaaagggtggcagaggtgtggaatttgctcgagaggatgaggaatgatgcaggtatatttcctgatcagatcacgtataacatgcttattcatggccttgcaaagcatggtcatgcagatgaggcgttgactttcttgagggagtcagaggggaaaagattccgtgttgatcaggttggctatagtgcgattgtgcattcgttttgcttgaatggtaggatgtcagaggcaaaggaaattataggcgagatgatttcaaaggggtgccgccctgatgttgtaacttatagtgcggttgtagatggattctgccggattggggaactcgatcaagcaagaaagatgatgaagcatatgtataagaatggttgcaagccaaatacagtcacacatactgcactgttaaatgggctttgcaaagttgggaaatcttcagaagcatgggaactgctaaacaagagcgaagaagagtggtggactccaagtggtatcacatacagtgttattatgcatggatttcggagggaagggaagctagtggaatcatgtgatgtggtaatgcagatgttgcagaagggtttcttccccacggctgtggagattaacttgttgattcacgcgctatgcaaggaacaaaaaccagcacgtgccaaagacttcatggagcagtgccaaagcaagggctgctttattaatgttgttaatttcacaactgtaatccatggattttctcggcagggtgatctggaatcagcactatctttactggatgacatgtatctcaccaacaggcatcctgatgttgttacatacactgttgttgttgatgctttaggaaggaaaggtaaaatgaaagaagcaacagcgcttgtagagaaaatgcttaacagaggtttgctccctacacctgtcacatacaggactgtgatacataggtattgtgaaaagggtgcggtggaagatttactcaatctgctggataagatgttaacaaaacaagggtttagtagtgcatataatcaggtcatcgaaaagctatgtgcatttggtaaacttagtgaggcttacaatctgctcagcaaggtactaagaagtgcctcaaaaagagatgctcaaacatgccacattttgatggatagttttctgaacagaggactcccacttcaatcatataatgtggcctgccgcatgttccagagaaatttaattcctgatcttaaattatgtcaaaaggttgacagtcagttggccctagtgggtgagagacatgctgctggaaagctt

SEQ ID NO: 111220 - DNA, 584 bp, Zea Mays
cccgcttcttcgccgacatgtgggtgctcttccccaaggaggaagagtacatcgagtcgttcaagaaggctgggtttaaggatgtcaagctgaaaaaggatcggaccgaagtggtaccgtggtgtctgaaggcatggcctcatcatgggttgctctgtcacaggcgtcaagagagagcgtggagactctcccttggagctcggccccaagttggaggatctcagcaagccagtgaatccgatcaccttcctcgcttccttgtaggaacaatatgtgcatcacactatgttctgtgcctatttacatgtggataaaggaccaggtcgtgccaaaaggcatgccaatctgagtgggaaggggaatgagctgcatggaagagaggatagccaacatctgaattagtcttctctatattaggcacttcttgtgtgttttgtattagtacctcttgttttcctactgctatgtactccttgtactgttgttcctgtttatgggaattgataataccaagacacggatattatccagtttcttgagcatgactgcttgcagtggaacctccgtagcagattatcggattt

SEQ ID NO: 111221 - DNA, 115 bp, Zea Mays
ttactacatgaaactttggttcacaaacttttttaaattattactcttaattaagacatacttagtacataatacaacatttatgacatccaagctcattattgtctaatacaac

SEQ ID NO: 111222 - DNA, 276 bp, Zea Mays
ggcttgggcggcgcggcatagcgcacggctgcgggcggcgcgctaaagaccgagttggccgctgccgatgcggcgcggggcggggcgaagcgggcggtgctgcgcgtgcgcgtgccgccgcggcggtgtacggtggaggaggaagggcaggacgaagaagcaggggacctcgctgtgagggcctgcatcgctggctgcagagtgttgtgggagttgagcgaccccgacactgcggagtgtggatgaggaggaagcgggggatggatcatggatgga

SEQ ID NO: 111223 - DNA, 739 bp, Zea Mays
cttcattgatattttggtacatcgctactgatacaaacagcctacccagactgtttttgtgaagtgaaaccaaaaaaggaggcacgctactgttcttccgtattcatgtcaatgcaacagctggtacaagtagtcttcttgggagctacccagtagttgagtgagaaattaataagctattctaaattaaatgtaaatatgcatttctgatcatagtatgaagttgaaaggtctttatgttcctttcctgtgtataagataaacattttttctaacccttcttccttaggtcgcttaaattgaaattgatgtctacaaagtgcttcccatttcattattagattactgatatagctatgcctggggagtggagataagtggaggtggcaccaccaattccttgatgtaccgggaatgtttggattgttgtattctgacattgtttggttcaacatattcaagttggagcatcaggtctccaacaattaaactaaaaggagtggagcttcatgttaagatgatgcatgcacctttcaagtttcggaatgttgtcctcaactgcaacttgtgcccgttgaacccattctacttacttttagatttaagttgtaggatatttaaaatatttgatctttaatacttgtttcggatgttttatgctacaattatatatggatgtagacaaagttatgtacactcatgtcatttaatgaaattgtatacacatgtttgatttgaa

SEQ ID NO: 111224 - DNA, 254 bp, Zea Mays
atccgcgagggaacatcgtccgcaatccacctccacgcgctatcattctcctcgcctcctctcgctcgggccatgtcgcgcttcttcctcggcgccaccctgaccgcgcagcgagtgagagcatgtcctcttctctgtcggatttgcccacctcttctctgtcggcgtctgtagtccccgctgcggtcaccgctcgcctcgccctctctgtccaacgcgatggtcacaccggccttctttctcgtcaaccaccc

SEQ ID NO: 111225 - DNA, 3389 bp, Zea Mays
atgttcgggtgcggctaccggacccagttcatcaacgggcgcagggagaagttcgtgaggctcgtcgaggcagacgcgccggcggattcggcgtccagccccacttccggcagcggcggcggtgccagcatggagcacgggcacgggcacgggcacggcggcgggttccacatggacagctacttctcgggcaacccggcggcggccgccgccaagttccgtgcgcggtcggttcgggtggcggcgggcgtgatgaaccggtcggagcggctgaggagcatcggcctcgtgttccaggaggacttccggaagatgtcgcagcaggtgttcgacccgcaggacgcgttcctggcgcgcatgaaccgcgccttcgtcttcgcgtgcatcgtgtccgtggccatcgacccgctcttcctctacctcctggccgtcaagtacacggacaagaacacctgcatcggcttcgaccgcaacctggccaccgtcgccaccgtggtgcgcaccgccgtggacgccttctacctggcgcggatcgcgctgcagttccggacggcgtacatcgcgccgtcgtcgcgcgtgttcgggcgcggcgagctggtcatcgactcgtccgccatcgcgcgccgctacctgcgccgattcttcgccgtcgacctgctgtccgtgctgccgctgccgcaggtctccatctggaacttcctcaaccggcccaagggcgcggacctgctgcccaccaagaacgcgctgctcttcacggtgctgtcgcagtacgtgccccgcctggtgcgcttctaccccatcacctcggagctgaagcgcaccacgggggtgttcgccgagacggccttcggcggcgccgccttctacctgctgctctacatgctggccagccacatggtgggggccttctggtacctgctggccatcgagcggctggacgactgctggcgggacaagtgcaccaacctcaacttccaccagtgccgcacctacatgtactgcggcggcggcagccagggccagtcgggcttcctcgagtggcgcaccatgatccggcaggtgctggcgcaggagtgcgcccccgtcgacggcagcggcacggggttcccctacggcatctacaccacggccatccagtcgggcgtctactccacggagaacctgacggccaagatcctcttctgcctctggtggggcctgcagaacctgagcaccatcggccagggcctggagacgacccactacaagggggagcagctcttctccatcacgctcgcgctgctgggcctcatcctcatggcgctcctcatcggcaacatgcagacgtacctgcagtccatgacgctgcgcctggaggagatgcgcctcaagcgcagggactcggagcagtggatgcaccaccgcgtcctccccgacgagctccgggagcgggtgtggcggcacaaccagtacaagtggctcgagacgcgcggcgtcgacgaggacagcctcgtgcgcagcctgcccaaggacctgcgccgcgacgtcaagcggcacctctgcctccgcctcgtccgccgcgtcccgctcttcgccaacatggacgagcgcctcctcgacgctatctgcgagcgcctcaagcccagcctctgcaccgagtccacctacatcgtgcgcgagggggaccccgtcgacgagatgctcttcatcattcgcggccgcctcgagagctccaccaccgacggcggccggatggggttctacaaccgggggctgctcaaggagggcgacttctgcggggaggagctactcacgtgggcgctcgacccaaaggccggcgccaacttcccgctgtccacgcgcaccgttagggccatctccgaggtggaggcgttcgcgctgcgcgctgacgagctcaagttcgtggcggggcagttccggcgcctgcacagcaagcagctgcagcagaccttccgcttctactcgcagcagtggcgcacctgggcctcctgcttcatacaggccgcatggaggaggtacctcaagcggaaggcggccgagcagcggcgccgggaggaggagatggaggccgactcgtccggggtttccacgagcaggttcaagaccacgctcctcgtgtcgcgcttcgccaagaacgccatgcgcggcgtgcagcgccagcgatccgtccgggccgacagcctcatcatgcttcccaggccgccggagccggatttcggctccatggactactgatctgcatccagcttggttggcaccaagagacatggtatgtatttaattctccccattatttgtgaataattcgtcagagcagaggctattatggtttactggattgatcaatacccaaaatttagttcagcactttattggatgatgatgatacataataaactgctcaggtatgtaccatctagtacacactaggaatcagatacagatattgtacaagaatgtatctatcaatggaagtccctttattatgttgtggcttcagtcaaatataatctgagctgtgaaaaaatgatattctaaattctgaaatgttgctagttacaaccggatcctgccaaagccatgcatgcactcagctgcgttggcaaatttgccagctgaaaatcttcaactgtttatggttgctgcatggctttagatctgctgtacacctgcacaactcaagctcagtattttcagcctttagatttgctgcacggctggtcggttccgcaatatctccacatgacacaagtgtttatggttgctattctgtaggactccatgtaccaggaacttaaatgcagtattgcagtctttagaagtgcttcaagaaacctataggagctgcaagaaatgcggcagttctgatcagcccagcgatcagccaatcaccaatgaacttgatcctacaagtagagctagagtatcttcttatcattgacattaacccttgtatcagcagactgatcgatcatttccttgcttgtactggaggcttcatcgctttggtcatcagattccaatagacagtatgtcacaccattttcagaatccaccctgtcaaaatcgtatcctgtcttgtcattttccaccttcatatcaggtatcccattcgccactggtggttttattgcctttatgtctgggcggctacttagacttaacgactgctctggggctaccattcttgaactattaccattgctctccactaaatctgacactcttacctgaagaggcttcataatatcaacttcttggtccccaatgtctttcagtgcttcctgagcttgtagctccattgagtccctcacaagcttactcaagaaggatacatcatcagacatgacgcccagtcctttcaaaagtattgaacctagctgcaagct

SEQ ID NO: 111226 - DNA, 1914 bp, Zea Mays
tgcacggcccgcctcaaactgagccgacactcctcatcttcctcggttcggcacttcggctcgtcctcctcgcggcgaaaccctagcccgccgccatggacgatccctcctccgcctccaacaagcacaagcacaagcgggggcgcaagcccaaggcatcgccgccctcccccgaccactcctccccctctccctcggtcgcccccgctccggctgggcgccgtggccgcaagccgcgacgtcatgaggccctcgccgacgtggacgccacgcgtcctccatctccaccccgccgcggggagccgaagccggtggcaaacggaggcgatgtggtggcagtggcagagtcaggccccgcgagctgggatgaggtggtgagggtagtgccatgcatggacgctgtggtcaaggtgttctgcgtgcacacggagcccaacatctcgctaccgtggcagcggaagcggcagtactgctccagcagcagcggatttatcatcagcggccaccatgtcctcaccaatgctcactccgtggagtaccttgccaccgtcctggccatcggcacagagtgcgacattggtgcgaccgctctccccatccctgccactgtctccattgtttatttcttactcttagttttttttcttcttattgtgatgttgggtttgtccattgtagtcgtgaaaatcggatgcatagtaatttctttattgttttcttagagaaatacaccaagatcattttttatggtatctatgaaacttctgaggctatagcatcatttgagttatggcatggtacttatcatacagttgatttttcatgttgcttatgcaatctaatttgatattattcgtttgttgtatctgtctcaacgctcttaactgtcaatgatgatgaattctgggaaggagtttcacctattgagtttggaacattaccagtccttcaggatgcagttactgttgttggctatccaattggaggagataccatatccgtgacaagtggagtggtctctaggatagaaatgcttttatatgttcatggttctatagaacttctaggattgcaggtacatttttttctgaaattatgataacttcaaataaatctttttataaagatagatgttgcaagtgaagtaaatattttgagaaatcatgacttatcggctcaccgacgtgtctaataccttgtcttgttaatagatagatgcagctattaattcaggaaattcaggtggcccagcttttaatgataggggaaaatgtgtcggtatagcttttcagtctcttaaacatgaagatgcggagaacataggttatgtgataccgactccagttattacacatttcattgaggactacaaaaatctagagaatacacaggctgcaattgagtacattcattctttatcaagggcacagcctgctcattctctcaatggtgttggtctttgtcctgctagtagatcacttagcacccatgccgccactatgtcaagcacaccacagttgaaagcacaccacgtcaagcacccaggctgccactacgtcaagcaaaacagaagacgagaagaactgatgtagccatgttcatgcttccactgttgaaatgcatattcagcatagcttgctcagctcctatctgctatttcaacgttgatttaaaagatgagctggtagttgtgggcttttgaacaatagttggagtgatatgaaacattagtgatgtagttgtgggcttttaaactgcttcaagctagagtgatatcgctgtggtgcttttgtgaccaatcatctctggagcttttgtgaatgatctagctagctatctgtaaatgatctagttgtgaatgatattataattgtgatgcttttgtgaatatataattgtggtgcttttgtgttt

SEQ ID NO: 111227 - DNA, 1446 bp, Zea Mays
tgcacggcccgcctcaaactgagccgacactcctcatcttcctcggttcggcacttcggctcgtcctcctcgcggcgaaaccctagcccgccgccatggacgatccctcctccgcctccaacaagcacaagcacaagcgggggcgcaagcccaaggcatcgccgccctcccccgaccactcctccccctctccctcggtcgcccccgctccggctgggcgccgtggccgcaagccgcgacgtcatgaggccctcgccgacgtggacgccacgcgtcctccatctccaccccgccgcggggagccgaagccggtggcaaacggaggcgatgtggtggcagtggcagagtcaggccccgcgagctgggatgaggtggtgagggtagtgccatgcatggacgctgtggtcaaggtgttctgcgtgcacacggagcccaacatctcgctaccgtggcagcggaagcggcagtactgctccagcagcagcggatttatcatcagcggccaccatgtcctcaccaatgctcactccgtggagtaccttgccaccgtcctggccatcggcacagagtgcgacattggagtttcacctattgagtttggaacattaccagtccttcaggatgcagttactgttgttggctatccaattggaggagataccatatccgtgacaagtggagtggtctctaggatagaaatgcttttatatgttcatggttctatagaacttctaggattgcagatagatgcagctattaattcaggaaattcaggtggcccagcttttaatgataggggaaaatgtgtcggtatagcttttcagtctcttaaacatgaagatgcggagaacataggttatgtgataccgactccagttattacacatttcattgaggactacaaaaatctagagaatacacaggctgcaattgagtacattcattctttatcaagggcacagcctgctcattctctcaatggtgttggtctttgtcctgctagtagatcacttagcacccatgccgccactatgtcaagcacaccacagttgaaagcacaccacgtcaagcacccaggctgccactacgtcaagcaaaacagaagacgagaagaactgatgtagccatgttcatgcttccactgttgaaatgcatattcagcatagcttgctcagctcctatctgctatttcaacgttgatttaaaagatgagctggtagttgtgggcttttgaacaatagttggagtgatatgaaacattagtgatgtagttgtgggcttttaaactgcttcaagctagagtgatatcgctgtggtgcttttgtgaccaatcatctctggagcttttgtgaatgatctagctagctatctgtaaatgatctagttgtgaatgatattataattgtgatgcttttgtgaatatataattgtggtgcttttgtgttt

SEQ ID NO: 111228 - DNA, 414 bp, Zea Mays
atggaagcctactaccagttcagcaccaccgcatcgttccagcatatcagcagcagtggcagtgcagcacgattttctgaacaagacaaagctgatcttcaggctttaagcaaagaagaaaagacaggtattgtctccatgcaaatacacaggatgatcatgcttaactatcgaccctattacgtgccagcttctccctcatctttagccagctctctctctctctcactggaaaaaagaaaagaaacaaggacgcacaaaaagaacatactcacaagaggcagcgcggggcccgtcggcacagacacagacactgccacagccaccgtaccctccgaggcgtggcatcgatcttttgccaaagagcaactgcaggtgcagaagaacaaggctaaacagtctgcaagcatgtga

SEQ ID NO: 111229 - DNA, 960 bp, Zea Mays
ctgtccagcaggaagtctggcgcctccctctgcctcctgtacagcgtgcacccctggtcctggcgtgtttctttttttttctggccggccatggatttcctcggcaccattcctttgattcgagtgggggggggggttcggcctcaagccagcatgagttggtgacctccctgctcggccatggctgcgccatgagcatctagtgcccctccccctcgacgtccctgcttggcaagtgtccagccgacgcccaactcagcctcgccgtcggccttgcccagcagcgacagtccgccccggtactcaccagtgccaagatccactgcgccctctccttccttgaagccgtggtgcttggtggcctcgccttggcgctcgacacccccaatggctgagcagacccctctgctccctcaggccagcgccctccccggctcttctccatggcgtgctcagctctcccattcgtggacagtaccaccccctccctccacttcggctgaagcatacacaactcccctgctcttcctcgccggtacggcagcaagcctgcagcagtagcctcggatcccctccgcattgagagcagccgcatcgtcgatccgtgcaaccttgacgtctccgcgtctcgcttcgccgtcgatctgcgcagtccccgtcgcaatgctgtcaatccgcgctagctatcggtgtcgtgcctcgtgctctacctatgcgacgaaatgctagccggtggacagcacatgcgactcaccgatccggccaggttgcttttgttttatttacgattcagtcgatggcgtgaatatgtgcgtgaaaatataattgtatgaatgaacgcgtgtatagaagaaaacgaagtagaaagaaacttggatgtttttatatttgataggaaaaatatgcgatgcgttgtttaaatgcgaaaactaagttataaaatgcggattttgttttgcg

SEQ ID NO: 111230 - DNA, 270 bp, Zea Mays
atgaaatcgaattcgacctataaatgggaccatggggcgggcgggcgcgtcgttaccgatctcctctggtgtggagacgctgtggcggccggtgggctttcccttgaactttcccctccccatggcggcggcgagcgaagggtgggcgaggctggtgcaggtagagagcaagttggaaggagcggagggcggaggggttctgcgtgggcggttcttgaactgcagattggggcggttgctgctcagcctgcgaagaatgaggagagttga

SEQ ID NO: 111231 - DNA, 3448 bp, Zea Mays
atgtggggcagtagcaggaggaggcatgacctctttagcattagcaactgcagatacctgctcataaccagttgtctcatccatgccattcagacccttcatctttgcgaagctcagtccactgatgagcaagcactgcttgcattcaaggccggcatctccggcgacccgagcagggtgcttgctgcatggacgcctaccaacagcagcatgaagaataacatctgccggtggaaaggtgtctcatgcggctcccgacggcaccctgggcgtgtcacggcgctggagctcatgttatccaacctgacaggtgtgatcagccacagcctgtccaacctttccttcctccacacgctcaacctctctagcaaccggctctctggcagcatcccctcggagcttggcattctgtggcgtctccaagtcatcagcttaggagagaattccctcaccggagagataccagcatctctctccaattgtgctcgtctcacacatttggagctgcagctgaatgggttgcatggtgagatcccagcgaacctgagcaactgcaaggagctcagggttttcaacatcagtgtgaataccctatccggtggtattcctccatcgtttgggtcgctgttgaaactcgagttctttgggcttcatcggagcaacctcaccggcggcattccccagtcactgggtaacctgtcatcactcctggcatttgacgccagtgagaattttaatctgggtggcaacataccagacgtgctagggagactaaccaagctggattttctcaggctagcttctgctggccttagtggaaaaatcccagtctcattgtttaacctatcatccattagggtacttgacttgggaaacaatgatctatctgctgtcctgcctgctgacattggtttcactctaccaagaattcagtccctttctttatacaactgcgggctcaaagggcgcatccccatgtcaataggcaacatgacacgactccgtctgatccagcttcacatcaacaatctacaggggattgctccgcctgaaattggtaggctgaaagatcttgaggtgctgaacttgcagtctaaccagcttgaggataagtgggacagggactggcctctgatacaatcactagggaattgcagtagactgtttgcactcagcctttcctataacaggtttcaaggcatgcttcccccttctcttgtcaaccttaccatttggatacaacaaatcttgataaatggaaacaagataagtggttcgatacccacagagataggtaaactcagcaaccttcgtgttcttgcaatcgctgataatgccttgactggcaccattccagacaccattggtggtcttcacaacatgactgggctagatgtctctggcaacaacttatctggtgagatcccatctctgcttgttgcaaaccttacccagctttctttcctggatctctcacagaacgagttggaaggaagcatacctgagagctttgagaatatgagaaatattgcaatcctggacttgtcttacaataagttcagtggcatgataccaaagcagcttgtcagtctctcttctttaaccctgttcctcaacctgtctcacaacaccttctcaggtccaataccttcacaagtaggtcgactgagcagccttggggttttagacttgtcgaacaacaggctctcaggagaggtaccgcgggcactcttccagtgccaagcaatggagtacttatttctgcagggaaaccagcttgttggtaggattccccaatcactcagctcaatgaaagggcttcaatacttggacatgtcagagaataatctgtctggttcaattccagattacttatcgacgttgcagtacttgcattatctgaacctatcctacaaccagtttgatggaccagtgccgacaagcggagtgttcaacgattcaaggaacttctttgttgcagggaacaaagtttgtggtggtgtttcagagctgcagctgccaaaatgttctggtggtaatatgttacacaaatcaagaactgtattgatcgtgtctattgccataggatctatcttggccctaatccttgccacatgcacttttgtgatgtatgctcgaaagcgactgaatcagaagcttgtgcagagtaatgagacacctcctgttccaaagttgatggaccagcaattgaaactgtcgtatgctgaactgagtaggtctactgatggcttctctacagctaacctcattggcgttggaagctttggctcagtatacaggggaacactaagcgatgaagagcaggaagtcgcagtaaaagtactgaacctcctgcagcacggcgctgagcggagtttcctggctgaatgcaaggtgctgaaaagtattcgacaccgcaatcttgtaaaggtcatcacggcctgctcgaccatcgaccacagcgggcgtgattttaaagccttggtgtacgagttcatgcctaacagagatcttgacagatggctccatccgtccaccggggaaggcggtgagaggtcctcccgcacgctgaccatggctgagagagtgagcattgcactcgacgtcgctgaggctcttgactaccttcacaaccatggccaagtgccaattatacactgtgatctgaagccgagcaatgtccttcttgaccacgacatggttgcccgtgtaggggactttgggctgtcacggtttgtccagggagctaacagcaactcgttccaacccatagccaacactactggaatcaaaggcaccattggatacattcctccagagtatggaatgggtggcggagtttcagtggaaggtgatgtctacagctatgggactctcctgctcgagatgttcacggcaaagcggccaacagatcccttgtttcagggaggccaaagcatccgcagctatgtcgcagcggcttatcccgagagagtaacagcagtcgctgacctatctctgttgcagcacgaagagagaaacctggatgaagagagcctagaagagtccctcgtgtcagttttccgggtcgcgctgcgatgcaccgaggagtcaccgagagcaaggatgctcactagagatgccatcagagagcttgctggtgtaagggatgcttatgggtagctacttggtacgtaggggtgacaacgggctctatattttacactataaaattgaaggatttacactataaaattaaaggatcggatcgggttacgatcgggtcatatttatattcatttttgaactaaaataatttaaggcttagcaatttatgaagaaacatttgaatcacgatccattaccaccacccctacttgaacgttagcaagttacagtccatagagtaatatgtaaatagcactggaaacgattttattttttgtaagtgaagtagaatgtaggaatt

SEQ ID NO: 111232 - DNA, 309 bp, Zea Mays
atgcaggagcgcggcgtccagaggggaggcaccaccgtcttggatgtcaccgtcgggatctccgtgggaggagacgttgtcactgaggggaggcgacgcagcagccgcgcgttcatgcgcggcgcgttccagggccgcacgcacgtgagcatccgccgcgtcgtgttcctgttgggcgatggcggcctcttgctcggcgtcgatggcgcaggacagagcagcggcgtgagcgacctgggcttggcgctcgcggtcctggacaacatcatcctattgtgggacaacaaggggatcagattcgatgcttga

SEQ ID NO: 111233 - DNA, 621 bp, Zea Mays
atggcgcgcacagctgaggaggaaaattggagcgcgcggcactggaggatagcgccatgggagcagccaaagggcgagcaggggcgcgcgcgtgccgtggttctagtcgcggcggaaaaaaatggagcgcgcaggcagccggacttgcgcaggggcgcgagatccacgagctgggaagaaaaaggaccagctggggagagctcagcgcagtggagcagggaggaaggagaggggtgcatgcccgggctgagagctgggcgacctgcgcagggaagaacgccatggaggggcgcggctgggggcgggtccaagcttgacgacggcagccatggggagcagggccgagatccgagcaggacgcggcagagagctggggctagaaatccgagccacggcagaggactagcgcattggagagctgagggagagggagaaggggagctcgcggcagccatcatcggcagagcaagctccgacgagggagaaagacaggcgcgacagggaataatccggacgcgacgagcttggggaatctcgagcgcgccatggagggaccgagctgggaatcgcgcgcaaacttggaggagaccgcggtccgagcgccgcgacgaacgtatttaa

SEQ ID NO: 111234 - DNA, 621 bp, Zea Mays
atggcgcgcacagctgaggaggaaaattggagcacgcgacactggaggatagcgccacgggagcagccaaagggcgagcaggggcgcgcgcgtgccgtggttctagtcgcggcggaaaaaaatggagcgcgcaggcagccggacttgcgcaggggcgcgagatccatgagctgggaagaaaaaggaccagctggggagagctcagcgcagtggagcagggaggaaggagaggggtgcacgcccgggctgagagctgggcgacctgcgcagggaagaacgccatggaggggcgcggctgggggcgggtccaagcttgacgacggcagccatggggagcagggccgagatccgagcaggacgcggcagagagctggggctggaaatccgagccacggcagaggactagcgcattggagagctgagggagagggagaaggggagctcgcggcagccatcatcggcagagcaagctccgacgagggagaaagacaggcgcggcagggaataagccggacgcgacgagcttggggaatctcgagcgcgccatggagggaccgagctgggaatcgcgcgcaaacttggaggagaccgcggtccgagcgccgcgacgaacgtatttaa

SEQ ID NO: 111235 - DNA, 2159 bp, Zea Mays
gctccccagcccagggccgcgggctacagccgttccttctccctgctcctctacccttgcttcttccacgccgtgctgctttagctcggggataaaatcccgtcgcgcgcagcctctgctcaccgtggctggtgcgctcatttccgtcgagctccttctctgccatggccgccgtcagttcctccctgcccagctcccagcaccgcgctccctcagctcgcggagcttctcctcgccccgctcggcctctgtttctccctgctcccgcacagccgcgcgctctgcttaccatcgcaagctcgccacacccctggacgcctgcttcttgtctgctcggcgcccctgcgcttgctcgcttggatctcccttgccatggccgtacgctgccgagctccaagctccaactcggatctttctccctcgtcttccttcacacgagctcgcaccagcctctgcttcctgctcgccatggcgcttggcatccagctttctgcgcaccggctccttgctccagctcccacgcgcgtccgagctcgccccggctccagcttctcccatggccggcgatactccagtcctctgcgcagcgcgcacgcttagcttgcctctcttgcgcgcagtcctctgttcctgcgtgccacagtcgcccagctttgttgccgcgcccagccgttctcagctgctcaccgtggccggctcctgcttggccaccatctcccatggcgatggccgccgagctcccttgtcgtggctgtcacgtccctgcgcccagcctttagctcaatccgtatgcacgcgagctaactggtgtgctgctgttctagttcggatctcgcccatggtgtcgatcggctattggtttcgccggttgtcgattttcctattcgctatggtcatcacgtcagccgtccctatccgaacttgcgagctcgccgactgaccgtcgtgttccttgaaatctctcgtcggtcgacctcgcgacttagttcgtccgtcgtgctggtcgctgtcccatactgtacctattagctcggatcctgcccagctcgtcgtcgtatcgtttaccgtcgagtcgtcgaacccgtcatcctctgctcaaaccccacctcaccagctcgcttcaaacacgatctcgtcgtcaagctttgcctcagccttagctcgtcggtcacgctcgccagatgtccgatcgaagattttattcggagactgttgacactctcgcaagctttaagtcggaattaatggacggtaagtggattcgttattccagtagactaaatgtgatatttattagactacctgaatcgtttacggtggtttgatcgatagtcgtacatgttgctgctcccttgcgttataatagttattacgttctaggtagtttgcttgggttattagtttcgagtaatttaatattagtacggtattcaacatgtaatcgacgaaaaacctagattcatattcgttaatcaaagtagtgaatctaagctaaatttattactagcgcgcaagttgttagccgaattgttagatggattaaataaatatgtgtgaagtgaaataaaattaaattagttcttggctgcaaagtggtataatttataaagcgggggatgaatttagcatttaaccaattagctaatgagttgtgtttaggctgattatgtttaatgtgttgttcgtgatgtttgtgatgtttgcgttaggttcgagaagcgtaattattacgcgtagtcctatatcggtaactagtattttcgtataaaatcgtacaacgcctagccgctaggtgtttaaatccgctatcgcgtaacactatttaggtttgtaatattcctgtttatatgcattcatgtgcatcgtgcatctcaattaggtacgataattgatcgcgtgatgcggaagacgagccaagtcgaccccaaacacgggctaatccacaagatggtactgatgaacgaaactgaagatggacagacggagcaagtatcagaacaaaagatgatcgtcaagtggacgtcgtctaacaaacactaacttagtgtttatcccaggcaagccccggtgcatgcaacccctttccttgtgtttttaaatacttttcgcacacttaagtctagtgaaatgagcattaggttcataggagttgcttggaa

SEQ ID NO: 111236 - DNA, 2152 bp, Zea Mays
gatccccagcccagggccgcgggctacagccgttccttctccctgctcctctacccttgcttcttccacgccgtgctgctttagctcggggataaaatcccgtcgcgcgcagcctctgctcaccgtggctggtgcgctcatttccgtcgagctccttctctgccatggccgccgtcagttcctccctgcccagctcccagcaccgcgctccctcagctcgcggagcttctcctcgccccgctcggcctctgtttctccctgctcccgcacagccgcgcgctctgcttaccatcgcaagctcgccacacccctggacgcctgcttcttgtctgctcggcgcccctgcgcttgctcgcttggatctcccttgccatggccgtacgctgccgagctccaagctccaactcggatctttctccctcgtcttccttcacacgagctcgcaccagcctctgcttcctgctcgccatggcgcttggcatccagctttctgcgcaccggctccttgctccagctcccacgcgcgtccgagctcgccccggctccagcttctcccatggccggcgatactccagtcctctgcgcagcgcgcacgcttagcttgcctctcttgcgcgcagtcctctgttcctgcgtgccacagtcgcccagctttgttgccgcgcccagccgttctcagctgctcaccgtggccggctcctgcttggccaccatctcccatggcgatggccgccgagctcccttgtcgtggctgtcgcgtccctgcgcccagcctttagctcaatccgtatgcacgcgagctaactggtgtgctgctgttctagttcggatctcgcccatggtgtcgatcggctattggtttcgccggttgtcgattttcctattcgctatggtcatcatgtcagccgtccctatccgaacttgcgagctcgccgactgaccgtcttgaaatccctcgtcggtcgacctcgcgacttagttcgtccgtcgtgctggtcgctgtcccatactgtacctattagctcggatcctgcccagctcgtcgtcgtatcgtttaccgtcgagtcgtcgaacccgtcatcctctgctcaaaccccacctcaccagctcgcttcaaacacgatctcgtcgtcaagctttgcctcagccttagctcgtcggtcacgctcgccagatgtccgatcgaagattttattcggagactgttgacactctcgcaagctttaagtcggaattaatggacggtaagtggattcgttattccagtagactaaatgtgatatttattagactacctgaatcgtttacggtggtttgatcgatagtcgtacatgttgctgctcccttgcgttataatagttattacgttctaggtagtttgcttgggttattagtttcgagtaatttaatattagtacggtattcaacatgtaatcgacgaaaaacctagattcatattcgttaatcaaagtagtgaatctaagctaaatttattactggcgcgcaagttgttagccgaattgttagatggattaaataaatatgtgtgaagtgaaataaaattaaattagttcttggctgcaaagtggtataatttataaagcgggggatgaatttagcatttaaccaattagctaatgagttgtgtttaggctgattatgtttaatgtgttgttcgtgatgtttgtgatgtttgcgttaggttcgagaagcgtaattattacgcgtagtcctatatcggtaactagtattttcgtataaaatcgtacaacgcctagccgctaggtgtttaaatccgctatcgcgtaacactatttaggtttgtaatattcctgtttatatgcattcatgtgcatcgtgcatctcaattaggtacgataattgatcgcgtgatgcggaagacgagccaagtcgaccccaagcacgggctaatccacaagatggtactgatgaacgaaactgaagatggacagacggagcaagtatcagaacaaaagatgatcatcaagtggacgtcgtctaacaaacactaacttagtgtttatcccaggcaagccccggtgcatgcaacccctttccttgtgtttttaaatacttttcgcacacttaagtctagtgaaatgagcattaggttcataggagttgcttggaa

SEQ ID NO: 111237 - DNA, 273 bp, Zea Mays
ttccagcgaactcgcttcacaggtaaagatgtgcaggagcaatcatcctttctttctttacaagatgatgaaagctgagaccaaaagacagtcaagctatactagtcagttcatcttaattagacagcaaaaggagcagaccagggccgaagccagccaaatcttcgatctggtctcgacctcacaattcgctcgctaaaagaagcgccgccctctatatgttaaactaagcaaccgttgccctaggctaggccgcagcagcagccaggaccg

SEQ ID NO: 111238 - DNA, 1185 bp, Zea Mays
gtagcttttaccaagtcttttggatcatgtggtggatatattttcgcatcaaaggagataattcaacaccttaagcatagttgtccggcccatctgtatgctacttccatgtcgccaccagcagtccaacaagttatttctgctattaaagttatccttggggaggatggctccaacagaggtgcccaaaaacttgctcgcatccgcgagaatagtaatttcttcaggtcagagctcaagaagatgggtttttgaggttcttggtgacaatgactctcctgtcatgcccataatgctctacaatccggctaagattcctgcattctctagggagtgccttagacaaaaggttgttgttgttactgttgtgtttcctgcgacacctcttcttcttgctagggcacgcatatgcatttctgcttcacatactagggagcacctgattaaagcccttgatgttatcagcagagttggtgaccttgtgggcatcaaatacttccctgcagaaacaccaaagattgctggagctgatcatgataagctggagtaggaatcaacccttagttgccccatgagtgattgaagttgttagaatcccttggagttgtcaacaaatcattatggaaacaagcacatattgagccatttcatttggatcttgtcaatacacaagagtccaggatctatcatattaagctgactactgtttgttgattgtacaactattcttccaattgtgtatagctggttgaaattcagttgttctgttgttaatccattcccaatatgtaatacaattagaggcaatataaacttcgagtagaacattactgagtttcccttgcagatcactgacaactattggtctcttgctttcatgtattttttttaccttttgacatgggattagtagatgtctctctacactttatatgaagataagaattattttttattcagtgaatgttatatgcgaccactgacaatgtttatgggtagaagtaagacagtaagagtcatatatgatcctgtcaaaaatatgattagtcactgatgactattggtctcttgctttcatgtattttttaccttttgacatgggattaatagatgtctctctacactttatatgaagataagaattattttttattcaatgaatgttatatgcgaccactgacaatg

SEQ ID NO: 111239 - DNA, 3041 bp, Zea Mays
atgcccgcgcccccggacccgccgccgctcccgccgctggacccgtcggatcccgccgcggccacaccgcccgccgccgcggccgccgatgaggaggaggacgaccgcgtcttccttgtgccactcaggtggtggaaggaggcgcagcaagggctggcgatcaacgtgcctggtctgccctacgcggccgcgcctgctggacctacctcctacggcatgagggtgctcagcatgttcctctccgaccaaacatacaccctccgccgcgccgacgagctcttgcagcagaccgcctccttcgccgccaggagctacgcgctcctcccggccgacctgttctcaaaggcacgggaatggtatattgtgcctgccaagtctgcagtcaaaaacgtgtcaccagctggagagggctcagtaaatatttaccccataatgctaagagtttcagccagcagagatacatatacactaaccgtgaagatcggcaaaaaggacaactcaactgagaactttaagagagcatgcaagatcctgactgcagactctgagccggttcacatatgggatttctctgggcgaacaacatacatagttatgactgaactgaaccggtcgccccatgactcaaaatctgcagatcaggagatgcctctacaaatacacatttatgatctgtcggaacctatggttaatggttctgatgggaaaagggatgagttagcattaacattgggtggctcaagttctagcaatggtggtagtatgaacatggatctggattcatcaagtggaagctctaagcaagttggatccggtttaacaggattagacaatttgggaaacacatgtttcatgaacagtgcagtccagtgcttggctcatacttcaaagctggttgactatttccttggtgatttccacaaagaagtaaacccacataacccactggggatgaagggggaacttgcatatgcatttggcgacttgttgagaaagctatgggctattgataggacccctgttgcacctcgccaattcaaggccagacttggacggtttgctccccaattcagtggctttaaccaacatgattcacaggagcttcttgctttcctattggatggactccatgaagacttgaaccgtgttaaatgtaaaccatattctgaagctaaggattcagatggccgtccggatgaagaggttgcagatgagtattggggcaaccatttagctcgaaatgactctatcatagttgatatctgccagggtcagtacaagtcaacattagtttgccccatctgcaagaaagtttctgtaacatttgacccgtttatgtatttgtctttgcccctgccttcaacaacaatgagaacaatgaccataacagtcttcagtactgatgggaccagtgggccatctccttacactattagtgtaccaaaatcgggagatacgaggacccttattaatgcgttaagcagtgcttgttcgttgagagatgatgagcgccttctagttgctgaggtctacaacaattcccttattcggtacttggatgaaccttctgaagttatctccttaatcagagatggagatcgtttggttgcatatcggcttcctaaagacaatgaagatgccccaattgtggtgttcagaaaccagcgtatggagtcatccctttccagttttgggcgtaagtcatggaagacttttggcactccactggtgtcaagccttcctgatacagtaactggaagtaatatttacaatcttttcctaaaggttatgactccattcagagtatcaagaggtgatgctgctgttgctgatcaaacacttggtgaaagcagtctggttgatgaaactgaagatatcaatatgagctctgatgcctcagagcacaccagcataaacaacaattctgtcgaggatgaaacagggactgaagatgtgatgcaatttttcctgactaatgagagaatcccagaccaacgcatgaagatagaaatggatctatccattacggtgaatgatccgcataagcgtctgcatgtggctgtgtgttgggaggacagtggactggaccaatacaactttagttctttgaattctcttccagaagtttacaaagcggtgctgttttctaggaggccacaggacacatgttctctatatgcatgtctggaagcttttattaaggaagaaccattaggcccagaagacatgtggtactgcccaggttgtaaagagcatcggcaagctagtaagaagttagacctctggagattacctgaaatccttattatacacctgaaaagattttcatacagtcggtataccaaaaacaagctggagacatttgtggacttcccgattcatgatcttgacctgtcgaagtatattggtcacagatgccaagacgttcctcacaattatcgactgtatgctactagcaaccactatggaagcttgggaggtggtcactatacggcttatgtttatcatgaagggaaaaagggttggtatgatttcgatgaccgtcatgtgggccccataaccgaggacagtataaagacatcggcagcttatgttcttttttaccggcggatacaggaggatagcttagatacagttacagacatagattctgatattccaacctgaggaggcggtggaggcaatttttgagcccaagtcccggacagtgtatagtttcattggtttagggggacagttgtgcggcaatgccgcaacggaagtgagaaatagaacaggtggggaagagtttgtgcggcaatgtggttcagaggggggagataatttgtcgcggttccttccgttgcaaattcctttgttttttttccgttcccttttagcacctgtaactgatagcggtaaaattttggctaatggcatgtggggaagatatttcgtcccagattctcaacacagttagggttagttttggaaccctatttttaaggaatttctatttttctaagagaaactagtttattttttcttggaaaaataggaaa

SEQ ID NO: 111240 - DNA, 271 bp, Zea Mays
cttctttggttttcttttccggttggcacatttggtgcacgggcatgtgtcggtgtttcgggtctgaccgcgcacccagggttacccctcaaggtgcttttaggagtaggacggtgttaccgactgtagctcgatggttcgtgctgggcgcacgagagaaagtagacaatggttcttccaaatatgttctaccatgggactagactcgctcctttagcagctttgccatatgcacattccacgaaatcatcagcctttctaatccattcag

SEQ ID NO: 111241 - DNA, 1492 bp, Zea Mays
caatcatggcatttcccctctctctctctctacccagcatattgctgctcccacacacacacacaaggccaccacaacaaataaaagcactgctgcttgccagtattgctttgctttgccttgcttgcccccacacgccctctctctcctctctctctctcaaaccgaaaagaaaagaggaaagtgggatagctcaatctcttcttccttcgtcattcctctcccgtaggttctctctccctccctccctccctccctccctcagcacacataaactcgagatacacatatatatcagtaggagaggatggatgtgcaaacctagcctgctgcctttgtagctgcaaattaaattgagctgtacctgttggtcttcctcctcgctcttcttggttctcgctggttgccgggagctgggatcgaaagtactgctgttgttcgcacggcgaggcggcggcggagaccggtcagaaggaatgtcttcggcccaaatcgcgccggcagatcatgtgtgctatgtgcactgcagcttctgcaacacagttctcgcgtgattgcctgcgtgagaaccaccctagctcatcatcagttcatcaccacacaattggtgagtgtcccggggaatagcatgctcaacatcgtgacagttcggtgtggacactgcgcaaatctactgtcagtgaacctgagagcactgatgcactcactcccagaacaagatcatcagctccagcaggagaacatcaaggtccatggcatcaacggcactttgcacgatgatcatcagtactgcggccatttggatcagctcggttcttcttcgtcgtcaaggttccggcggcttccagtgatgtgttcgccacagaacgagcagcacctgctgcaggagcaaacacttaacaacaatgctcgtcctccagagaagaggcagcgggttccgtcggcgtataacagattcatcaaggaagagatacgcaggatcaaagcgaacaaccccgacattaaccacagggaagccttcagcacggcagccaagaattgggcacattatccaaacatccatttcggtttagacgactccgggcgagagggcaagaagaagctcgtggatcatgaggcggcggcgtctgtcgtcgcagtcgcagcagcaccgactgctgctaaaaagatccagggtttctactgatggtagcagatagatgtgtagattgattgatacatcatcgaccgggtggaagaattgataccacaaaaactgctttatatatatgtactgtgagtaaacagttaaaattaaacttgtgagatgtaccgtacatatgaagagctagctagtagtgagtcataaagtgggaaagtgaagcatatatagtcgtaaaaacaatcacatgaattgctattaggcaccatatatatgcacttaattatattggttgaggagacctaataaatcatttgacctaccatgcatattattgcagtgcgaagcacc

SEQ ID NO: 111242 - DNA, 1433 bp, Zea Mays
caatcatggcatttcccctctctctctctctacccagcatattgctgctcccacacacacacacaaggccaccacaacaaataaaagcactgctgcttgccagtattgctttgctttgccttgcttgcccccacacgccctctctctcctctctctctctcaaaccgaaaagaaaagaggaaagtgggatagctcaatctcttcttccttcgtcattcctctcccgtaggttctctctccctccctccctccctccctccctcagcacacataaactcgagatacacatatatatcagtaggagaggatggatgtgcaaacctagcctgctgcctttgtagctgcaaattaaattgagctgtacctgttggtcttcctcctcgctcttcttggttctcgctggttgccgggagctgggatcgaaagtactgctgttgttcgcacggcgaggcggcggcggagaccggtcagaaggaatgtcttcggcccaaatcgcgccggcagatcatgtgtgctatgtgcactgcagcttctgcaacacagttctcgcggtgagtgtcccggggaatagcatgctcaacatcgtgacagttcggtgtggacactgcgcaaatctactgtcagtgaacctgagagcactgatgcactcactcccagaacaagatcatcagctccaggagaacatcaaggtccatggcatcaacggcactttgcacgatgatcatcagtactgcggccatttggatcagctcggttcttcttcgtcgtcaaggttccggcggcttccagtgatgtgttcgccacagaacgagcagcacctgctgcaggagcaaacacttaacaacaatgctcgtcctccagagaagaggcagcgggttccgtcggcgtataacagattcatcaaggaagagatacgcaggatcaaagcgaacaaccccgacattaaccacagggaagccttcagcacggcagccaagaattgggcacattatccaaacatccatttcggtttagacgactccgggcgagagggcaagaagaagctcgtggatcatgaggcggcggcgtctgtcgtcgcagtcgcagcagcaccgactgctgctaaaaagatccagggtttctactgatggtagcagatagatgtgtagattgattgatacatcatcgaccgggtggaagaattgataccacaaaaactgctttatatatatgtactgtgagtaaacagttaaaattaaacttgtgagatgtaccgtacatatgaagagctagctagtagtgagtcataaagtgggaaagtgaagcatatatagtcgtaaaaacaatcacatgaattgctattaggcaccatatatatgcacttaattatattggttgaggagacctaataaatcatttgacctaccatgcatattattgcagtgcgaagcacc

SEQ ID NO: 111243 - DNA, 1527 bp, Zea Mays
aaagcactgctgcttgccagtattgctttgctttgccttgcttgcccccacacgccctctctctcctctctctctctcaaaccgaaaagaaaagaggaaagtgggatagctcaatctcttcttccttcgtcattcctctcccgtaggttctctctccctccctccctccctccctccctcagcacacataaactcgagatacacatatatatcagtaggagaggatggatgtgcaaacctagcctgctgcctttgtagctgcaaattaaattgagctgtacctgttggtcttcctcctcgctcttcttggttctcgctggttgccgggagctgggatcgaaagtactgctgttgttcgcacggcgaggcggcggcggagaccggtcagaaggaatgtcttcggcccaaatcgcgccggcagatcatgtgtgctatgtgcactgcagcttctgcaacacagttctcgcggtgagtgtcccggggaatagcatgctcaacatcgtgacagttcggtgtggacactgcgcaaatctactgtcagtgaacctgagagcactgatgcactcactcccagaacaagatcatcagctccaggagaacatcaaggtccatggcatcaacggcactttgcacgatgatcatcagtactgcggccatttggatcagctcggttcttcttcgtcgtcaaggttccggcggcttccagtgatgtgttcgccacagaacgagcagcacctgctgcaggagcaaacacttaacaacaatgctcgtcgtaaggctcccttccacgtacacgccgacgaccatgcatatgcatgcctcaatttgcataatcttctttttttagcttaattagcatatccacatgcatgcaatcatacgccaaataatgataattaactgtactacgtcggtcgaccttgcttcgaactaaatgcgccgcgcgcagctccagagaagaggcagcgggttccgtcggcgtataacagattcatcaaggaagagatacgcaggatcaaagcgaacaaccccgacattaaccacagggaagccttcagcacggcagccaagaattgggcacattatccaaacatccatttcggtttagacgactccgggcgagagggcaagaagaagctcgtggatcatgaggcggcggcgtctgtcgtcgcagtcgcagcagcaccgactgctgctaaaaagatccagggtttctactgatggtagcagatagatgtgtagattgattgatacatcatcgaccgggtggaagaattgataccacaaaaactgctttatatatatgtactgtgagtaaacagttaaaattaaacttgtgagatgtaccgtacatatgaagagctagctagtagtgagtcataaagtgggaaagtgaagcatatatagtcgtaaaaacaatcacatgaattgctattaggcaccatatatatgcacttaattatattggttgaggagacctaataaatcatttgacctaccatgcatattattgcagtgcgaagcacc

SEQ ID NO: 111244 - DNA, 1591 bp, Zea Mays
gctttgccttgcttgcccccacacgccctctctctcctctctctctctcaaaccgaaaagaaaagaggaaagtgggatagctcaatctcttcttccttcgtcattcctctcccgtaggttctctctccctccctccctccctccctccctcagcacacataaactcgagatacacatatatatcagtaggagaggatggatgtgcaaacctagcctgctgcctttgtagctgcaaattaaattgagctgtacctgttggtcttcctcctcgctcttcttggttctcgctggttgccgggagctgggatcgaaagtactgctgttgttcgcacggcgaggcggcggcggagaccggtcagaaggaatgtcttcggcccaaatcgcgccggcagatcatgtgtgctatgtgcactgcagcttctgcaacacagttctcgcggtgagtgtcccggggaatagcatgctcaacatcgtgacagttcggtgtggacactgcgcaaatctactgtcagtgaacctgagagcactgatgcactcactcccagaacaagatcatcagctccaggagaacatcaaggtccatggcatcaacggcactttgcacgatgatcatcagtactgcggccatttggatcagctcggttcttcttcgtcgtcaaggttccggcggcttccagtgatgtgttcgccacagaacgagcagcacctgctgcaggagcaaacacttaacaacaatgctcgtcgtaaggctcccttccacgtacacgccgacgaccatgcatatgcatgcctcaatttgcataatcttctttttttagcttaattagcatatccacatgcatgcaatcatacgccaaataatgataattaactgtactacgtcggtcgaccttgcttcgaactaaatgcgccgcgcgcagctccagagaagaggcagcgggttccgtcggcgtataacagattcatcaaggaagagatacgcaggatcaaagcgaacaaccccgacattaaccacagggaagccttcagcacggcagccaagaatgtaagtaaagcctttttctagctagctggctaattgctatagtacgtacttgtcgtcgtgggcgcctgaattggttgttttacatatatatacactacgtacgaccgttgttgcatgcagtgggcacattatccaaacatccatttcggtttagacgactccgggcgagagggcaagaagaagctcgtggatcatgaggcggcggcgtctgtcgtcgcagtcgcagcagcaccgactgctgctaaaaagatccagggtttctactgatggtagcagatagatgtgtagattgattgatacatcatcgaccgggtggaagaattgataccacaaaaactgctttatatatatgtactgtgagtaaacagttaaaattaaacttgtgagatgtaccgtacatatgaagagctagctagtagtgagtcataaagtgggaaagtgaagcatatatagtcgtaaaaacaatcacatgaattgctattaggcaccatatatatgcacttaattatattggttgaggagacctaataaatcatttgacctacc

SEQ ID NO: 111245 - DNA, 935 bp, Zea Mays
tagtgacaaactgacaacaacaaaagtagggctagaaaagctactacctggtgagtgtcccggggaatagcatgctcaacatcgtgacagttcggtgtggacactgcgcaaatctactgtcagtgaacctgagagcactgatgcactcactcccagaacaagatcatcagctccagcaggagaacatcaaggtccatggcatcaacggcactttgcacgatgatcatcagtactgcggccatttggatcagctcggttcttcttcgtcgtcaaggttccggcggcttccagtgatgtgttcgccacagaacgagcagcacctgctgcaggagcaaacacttaacaacaatgctcgtcctccagagaagaggcagcgggttccgtcggcgtataacagattcatcaaggaagagatacgcaggatcaaagcgaacaaccccgacattaaccacagggaagccttcagcacggcagccaagaattgggcacattatccaaacatccatttcggtttagacgactccgggcgagagggcaagaagaagctcgtggatcatgaggcggcggcgtctgtcgtcgcagtcgcagcagcaccgactgctgctaaaaagatccagggtttctactgatggtagcagatagatgtgtagattgattgatacatcatcgaccgggtggaagaattgataccacaaaaactgctttatatatatgtactgtgagtaaacagttaaaattaaacttgtgagatgtaccgtacatatgaagagctagctagtagtgagtcataaagtgggaaagtgaagcatatatagtcgtaaaaacaatcacatgaattgctattaggcaccatatatatgcacttaattatattggttgaggagacctaataaatcatttgacctaccatgcatattattgcagtgcgaagcacc

SEQ ID NO: 111246 - DNA, 3427 bp, Zea Mays
atacgcctgatctgattcgtagaaggacggcggcggcgggcgcgggctgccggcggcgatggtggacggcggcgggcgggagatggactccccgcggttccgcgcgatcctgcgcgccaccagcgggcgccggaagcgcgcacccgaggtgaagagtttctcgcacgagctgagctcgaggggcggcggcggcggcgtgccggcgatgcgcaagatggtgcgcggcggcgggctcggcagcaccaccccggaggagttcatcggcgccatccggaccaagttcatccgcctcaaggaggaggtggacagcgagctgggcgtcttcgcgggggacctcgtcgacatgctggcgcggtcgggcgaccaccgggacgactgtcgcgtcgcgctggaggacctgctggtggtggcacagcggtgcgcggagatgagccccgaggagctgtggacccgctgcgagggcgtagtgcagggcctcgacgaccgccggcaggacctccccgcaggcctcccgaagcaggcgcacacgcgcatcctcttcatcctcacgcgcttcacccgcctcctgcagttccgcaagggcgccgccgcggggtgccgctacgccgccgacgccgacgacgacgacaggcacaacgtgctcggcctgcacaacctcagcgacctcggcctctacccgatccacgtcgacggcggggatctcggccccaagagcacctccagcctcaccgagctcaaggagcgcctcatcaggcggcgaatgttggagcacaggcagctcaccgtcgacttctccccggctaggatcttttcgccgttcggggacgggtcggccgttgacggccactccccgagcagcaagatggcgtcgtggaagaagctcccttcccccgccgagaagaacaagaccgccgccgccgccggggatgccacggccgccgccgccaagggagacgacagcccgtcgaagaagaagcccatcacccggcacggcaaggcgacggtggacgagatcgtggagcgcgtggacgcggcgagcatccacatccgcccggatgggctggcgtgcttgggcggcgacgaggccattagcctggagatcccgtcccggtacccggaggcgcagcagatcatggtggacgggaagccccggatgatctgccgcatctgcgacttcgagatccccatggcgtgcgccgagggccacttcgtggtgtgcacgctcgccgatcgctgcgacgccaaagggcacagcgcggaccagcggctactgcgcgtggccgaggtgctcgaccgcgtgctcgcgtgcttcggccccctcggcggcgggagggcgagcacgtcgtccgagtcggactccaacgccgccgaccacgaagccctgtcccacctgctgaccgtgccgtccacggagctcttctcggagggcgcgctgacgccggcgtcggggagcctgccgcagtcgccgctgctgacgccgcggacgagccacgcggagtcgcagctgaccaagcacagggcgttcgcggatctggagagctcccagcagatcgagagccttgtcgccatcgcccgtggcgtggagggcgtgaagagctccgagtacaactcgctggaggacctcagctcgtacctggaggacctgaacgccgtgatcgacacgcgcaaggtggacgccctcgtcgtggagacgttcgggcggaggatcgccaagctcctgcaggagaagttcatgcagctgtgcgtgcagatcgacgacacgggcggcgcggcggagcagcagcagctgctgctgcagcacctgcacccgatcgacgaggagggcccgactacgacggagagcggcggcgggacgacggcgagctcgcgggcgacgctgagcggcaacaggttcaaggaccgcacgtccatcgaggacttcgagatcatcaagcccatcagccgcggcgccttcggccgcgtgttcctggccaagaagagggtgaccggcgacctgttcgccatcaaggtgctccggaaggcggacatgatccggaagaacgcggtggagagcatcctggcggagcgcgacatcctcatctccgcgcgcaaccccttcgtggtccgcttcttctactccttcacgtgcagggagaacctgtacctggtcatggagtacctcaacgggggagacctctactccctgctcaggaacctcggctgcctcgacgaggacatggccaggacatacatcgccgagctcgttcttgcgctggagtacctgcactccatgaacgtgatccaccgcgacctgaagcctgacaacctgttgatctctcgcgacggccacatcaagctgaccgatttcgggctctccaaagtgggcctgatcaacagcacggacgacctgtcgggcccggacgtgagctgcgccctcgtcggcgagcaccagccggcggacgcggagcagcgggagcagaagcggcggcagcggcagaagcaggcggcggtgggcacgccggactacctggcgccggagatcctgctgggcatggcccacggcccgactgcggattggtggtcggttggcgtcatcctgttcgagctgctggtggggattcctcccttcaacgctgagcacccgcagataatattcgacaacataatgaaccgagagataccctggccacatgtgccagaggagctgagctctgaagcctacgatttgatcgacaggttgctgatggagaacccggtgcagagattgggcgcgacaggtgccggagaggtgaaggctcatccgttcttcaaggacatcaactgggacatgcttgccaggcagaaggtcgcgttcatcccttccacagacgacgagtacgacacgagctacttcgcctgccgccacgcctggagcggcgccggcgagcatggcggcgcggccggcagcgactacgacgaccggagcgaggccagcagcatgagctgcggcagcagtccgcgcagtgactacgaggaagatggcgatgagtgtggcagcatggaagaattcggagcgcccttatcggtgaaatactctttcagcaacttctcgttcaagaacatctctcagctggcatccatgaactacgacctgatgacgaagcataacaacctggatccgttgcagtcctccagatgattgcgtcatcgtgtggcaatgaagggtagccaaagcaaaatgctagtaaatgtagcttgcgctgagaccatgcatcatcgatcagaagataggaggaggatggtattggtatcccctgatgtaatctctgacaactagctagctgcagatacatagtgcattataaaccttcgattcttcatagaaagaaaagatggtgaatctctttctttctttcttgtttaagagaaatggttcacaaattggtataatggtaatctaaacttagcc

SEQ ID NO: 111247 - DNA, 1587 bp, Zea Mays
cttcgacccgcgccgcgcctcccgaaagtttcgaacaaaagtccacaaatccccttcgccgtctccggcgagccccgcccctcatcgccgccgcgccaaagagacagtgagaggggggatggatcagtccatcagaaccgcatgcgagttcctctcgtcggtgctaaaccacgctgagtcctcgtcccgcgagctcgccgacgccgtctcccaacgccccgtccacctcgagatggcgaggacctcgttcctgcagaagctggagcacagggtggaggcgtcggccgccgacttgcagcacatcgagtccatcgccctcgacaccgtctccttcgaggagctcctcggccactgcggcgaggcgctcaaagtctacgcgcgccacgccgacgccctccagtcgcacctcgcttcctttggctacgagcccccggacgcacaacaccccgagatcgatgtggatgtggaagatggagatgtcgggaaggttggggaccctggagatagatgcctcagcgtgtcgcgttcagtgctcaggtcgggtaagcggcggtttgatagccacagcgatgcgatgtatcctctttggtttgattttgttcggaaagcaagattggcattgcctcggtagaacatctcaactgattgtatcagcagatgttgcatcttcagatgccatggatccaattggaggcactagtattaggaaatgatgcacttgtaagaatgcctacaggtttgaggacctatttattctggtacgtttatgctaagcaggagctgtatataggagatgcatcgaagctgaaaccctgagacacatagttttggtcggaactgcactgtgcttttcttgactgccgattagatttgaagagtcactgaaggatcttgggttttcagatgcttgtctagccactctttcttctgaaggcgcacattatggtgagagcccaaagaagctttacaagaatgctgaaagtactgatgatggcgaaaagatcatgaatgaagctgaaattatgactcccctaaatgaaagaaatggtcaaggtaattcttttgaaggagtgataagggcatcaaaggaggattatgagcaactccctccttatatgaagagtctagcatcatgggaggagttgcaggagggaatatccaaactaaattcatacttgggtggtgacaagttgcaggggagtgttgctttgaaccaggaccgtgttgcagagataggattggggcgcaaaggaagagcctgtttgctgatgctgttgcgactcaatcagctaactatggagacagttgatggctctaccttttacaccctgtgcaagaacaacgtgtagcctgatactgctactgctacagcgtgtcatgcttaagttttcctttttcttttcgtatgtcgagtctggctagaatattgtatcatgttgatgtagcactcgatctcagctcaaaatattgtttttttctgagcagttctggtcatgtgatcttcattccaaccatgaaataaagtgtgtttgaggcaccgctcatctccctgcaattcacctgggagatgcatatagaattttcaaa

SEQ ID NO: 111248 - DNA, 1424 bp, Zea Mays
cgccgcgcctcccgaaagtttcgaacaaaagtccacaaatccccttcgccgtctccggcgagccccgcccctcatcgccgccgcgccaaagagacagtgagaggggggatggatcagtccatcagaaccgcatgcgagttcctctcgtcggtgctaaaccacgctgagtcctcgtcccgcgagctcgccgacgccgtctcccaacgccccgtccacctcgagatggcgaggacctcgttcctgcagaagctggagcacagggtggaggcgtcggccgccgacttgcagcacatcgagtccatcgccctcgacaccgtctccttcgaggagctcctcggccactgcggcgaggcgctcaaagtctacgcgcgccacgccgacgccctccagtcgcacctcgcttcctttggctacgagcccccggacgcacaacaccccgagatcgatgtggatgtggaagatggagatgtcgggaaggttggggaccctggagatagatgcctcagcgtgtcgcgttcagtgctcaggtcgggtaagcggcggtttgatagccacagcgatgcgatgtatcctctttggtttgattttgttcggaaagcaagattggcattgcctcggtagaacatctcaactgattgtatcagcagatgttgcatcttcagatgccatggatccaattggaggcactagtattaggaaatgatgcacttgtaagaatgcctacaggtttgaggacctatttattctggtacgtttatgctaagcaggagctgtatataggagatgcatcgaagctgaaaccctgagacacatagttttggtcggaactgcactgtgcttttcttgactgccgattagatttgaagagtcactgaaggatcttgggttttcagatgcttgtctagccactctttcttctgaaggcgcacattatggtgagagcccaaagaagctttacaagaatgctgaaagtactgatgatggcgaaaagatcatgaatgaagctgaaattatgactcccctaaatgaaagaaatggtcaaggtaattcttttgaaggagtgataagggcatcaaaggaggattatgagcaactccctccttatatgaagagtctagcatcatgggagggcgcaaaggaagagcctgtttgctgatgctgttgcgactcaatcagctaactatggagacagttgatggctctaccttttacaccctgtgcaagaacaacgtgtagcctgatactgctactgctacagcgtgtcatgcttaagttttcctttttcttttcgtatgtcgagtctggctagaatattgtatcatgttgatgtagcactcgatctcagctcaaaatattgtttttttctgagcagttctggtcatgtgatcttcattccaaccatgaaataaagtgtgtttgaggca

SEQ ID NO: 111249 - DNA, 1285 bp, Zea Mays
cgccgcgcctcccgaaagtttcgaacaaaagtccacaaatccccttcgccgtctccggcgagccccgcccctcatcgccgccgcgccaaagagacagtgagaggggggatggatcagtccatcagaaccgcatgcgagttcctctcgtcggtgctaaaccacgctgagtcctcgtcccgcgagctcgccgacgccgtctcccaacgccccgtccacctcgagatggcgaggacctcgttcctgcagaagctggagcacagggtggaggcgtcggccgccgacttgcagcacatcgagtccatcgccctcgacaccgtctccttcgaggagctcctcggccactgcggcgaggcgctcaaagtctacgcgcgccacgccgacgccctccagtcgcacctcgcttcctttggctacgagcccccggacgcacaacaccccgagatcgatgtggatgtggaagatggagatgtcgggaaggttggggaccctggagatagatgcctcagcgtgtcgcgttcagtgctcaggtcgggtaagcggcggtttgatagccacagcgatgcgatatttgaagagtcactgaaggatcttgggttttcagatgcttgtctagccactctttcttctgaaggcgcacattatggtgagagcccaaagaagctttacaagaatgctgaaagtactgatgatggcgaaaagatcatgaatgaagctgaaattatgactcccctaaatgaaagaaatggtcaaggtaattcttttgaaggagtgataagggcatcaaaggaggattatgagcaactccctccttatatgaagagtctagcatcatgggaggagttgcaggagggaatatccaaactaaattcatacttgggtggtgacaagttgcaggggagtgttgctttgaaccaggaccgtgttgcagagataggattggggcgcaaaggaagagcctgtttgctgatgctgttgcgactcaatcagctaactatggagacagttgatggctctaccttttacaccctgtgcaagaacaacgtgtagcctgatactgctactgctacagcgtgtcatgcttaagttttcctttttcttttcgtatgtcgagtctggctagaatattgtatcatgttgatgtagcactcgatctcagctcaaaatattgtttttttctgagcagttctggtcatgtgatcttcattccaaccatgaaataaagtgtgtttgaggcaccgctcatctccctgcaattcacctgggagatgcatatagaattttcaaa

SEQ ID NO: 111250 - DNA, 1453 bp, Zea Mays
actgtcctagtgttattactttatgtaattatctttggtgtgttgaatggatggttaaatgatgctaaaaattttgtaatggtatttagatggatatacttgacatttgtatatataatattttaatagatgtttaatttttttggtacatgtgacccaatgtgtgacccatacctacataggtatgggtacggggataaatcaataccaacgagtgtatatgggtaatttaatggagttatttttttgttatggctatgaatatgaggtagtaataccggagagccggagggaggacatggctggcggcccgcaccgaagcaaataaaaaaaaaagaaaaaaagaaagaaaaagtacccggggcccataaaataactttcccgtcaatcgcgtggacctaccgacaccaggaggcggaaggaaagaggaacccgcacagtggacggacctgtaggctcccgaaaatctccccgagtccgacgagtctccggcggccgcccccctctccctctcggatctctccctctctccgctcgccgcgcctccatcggtccactcagccatgtatagtaattacgggaatccttcggggatgcagatgcccccgcaaaactctcaacctgtccagtttgataatccattatacggtgcaagctcgggcctaatcagatctgggataggagtatatggggagaagtttttgggttctagttcagaattcatgcaaagcaacatcaatagatacttctccaacccgcagtattacttccatgtgaatgatcaatatgtccgtaacaagttgaaagttatactgttcccgttctttcacagggggcactggactcgaataagtgagccggtcggtggccgcttgtcctacaaacctccaatctatgacataaacgcaccagatctgtacatccctttcatggcatttggaagcttcatcatcctttcagggtttacattgggtttcatgggaaagtttactccagcagctataaatctgcagtttacaagggcgctcatcggctggggcttccagctcatggtcctgaaaggtctgctctactcgatgggtggtggcgaggtgccactgctcgacttggtagcgtacggcggttatttattcgccgggctatcgctcgccgtcgtcgcgaggctcgtgtgggcgtactcgtactatgtgatgatgccgtggatgagcctgtgcatgggggtgttcctggtgaggacgatgaagagggtgctcttcacggagatgagaagcagcgagaggcactcgtcgcggcagcactacttccttctcttcatggcaatcgcacagttccccctgttcttctggctcggcagcataggtgcatgatacacattaacgttgcaaaaatgatattgaagtgtttagatgtgttgtaaagaaaaaaacaattggacaatggtctcaacagctta

SEQ ID NO: 111251 - DNA, 1573 bp, Zea Mays
actgtcctagtgttattactttatgtaattatctttggtgtgttgaatggatggttaaatgatgctaaaaattttgtaatggtatttagatggatatacttgacatttgtatatataatattttaatagatgtttaatttttttggtacatgtgacccaatgtgtgacccatacctacataggtatgggtacggggataaatcaataccaacgagtgtatatgggtaatttaatggagttatttttttgttatggctatgaatatgaggtagtaataccggagagccggagggaggacatggctggcggcccgcaccgaagcaaataaaaaaaaaagaaaaaaagaaagaaaaagtacccggggcccataaaataactttcccgtcaatcgcgtggacctaccgacaccaggaggcggaaggaaagaggaacccgcacagtggacggacctgtaggctcccgaaaatctccccgagtccgacgagtctccggcggccgcccccctctccctctcggatctctccctctctccgctcgccgcgcctccatcggtccactcagccatgtatagtaattacgggaatccttcggggatgcagatgcccccgcaaaactctcaacctgtccagtttgataatccattatacggtgcaagctcgggcctaatcagatctgggataggagtatatggggagaagtttttgggttctagttcagaattcatgcaaagcaacatcaatagatacttctccaacccgcagtattacttccatgtgaatgatcaatatgtccgtaacaagttgaaagttatactgttcccgttctttcacagggggcactggactcgaataagtgagccggtcggtggccgcttgtcctacaaacctccaatctatgacataaacgcaccagatctgtacatccctttcatggcatttggaagcttcatcatcctttcagggtttacattgggtttcatgggaaagtttactccagcagctataaatctgcagtttacaagggcgctcatcggctggggcttccagctcatggtcctgaaaggtctgctctactcgatgggtggtggcgaggtgccactgctcgacttggtagcgtacggcggttatttattcgccgggctatcgctcgccgtcgtcgcgaggctcgtgtgggcgtactcgtactatgtgatgatgccgtggatgagcctgtgcatgggggtgttcctggtgaggacgatgaagagggtgctcttcacggagatgagaagcagcgagaggcactcgtcgcggcagcactacttccttctcttcatggcaatcgcacagttccccctgttcttctggctcggcagcataggtgcatgatacagttttgtgtacttttcgcagcattaacgttgcaaaaatgatattgaagtgtttagatgtgttgtaaagaaaaaaacaattggacaatggtctcaacagcttagaggttggcagctctgcttgtgaagttgtatgtgatccacaatcatgttatgctattgacttttttggttggtacatcttttctgccatgtgtctaggct

SEQ ID NO: 111252 - DNA, 1830 bp, Zea Mays
agccgctagggctgcattcatccacctcgtgcttatcgcctaccccaactccgactcctgctcgtctcgtcgctcgccgctcgccgcctcgtccagctctctccgcccctccggactagcctagcccctcccgctcaccgcgtcgtctccagaatctggcctacgaccgttgacggctggtgccccctccggcgatcggtggtcatggtccgtccttgctcaccccgttcggatccgctatgcgcgagcctccccttccctaatcacgcgcccccctgccccagcgatccgcagctgccgccccctgtcccaccgatccgcggctgccgcctcctccttcccctaatcacgccccccggtcccgttgatccatagttgtcgcctcccccaacccctaatcacgcgcgtctcgctcccgccgatccgcggatcggctctgctccaaccctcctccgtccctgagatgcaagcgagcaccacgggggatttctcccttgaggtgttgcctgagaggtgctgctgaccgagtagcatcattgaagagttactgtcgagcacttggattatgtgatcgatgtgcagagaagtggttccaagggcacaagtgtgccaacacggtgcaacttcacaccattgaggaagtctaggatttgctcaccttggatgaagctacagtggaagtcattgaaccaacagaggaactgatgatggttgtcgtatccctgtctaatgcggcatggtccggatctgacacaatatcaaccatgagattacagggtcagattcagcaacataatctcttggttcttattgattcagggtcttcacatactttcctcaatgacagtcgtcgaccactattgtttggagtccaagaattgacaacactaattacagtttaggttgctaatggccaagttattacctgctcacaccaccttccagcagctcaatggaccatgtaagtttatcaattttcagcatctctcaagtttttgactctaccatcgtttgatttggtggttggtatggaatggttgcagcggtatagcccgatgagagtggattggacaaacatgtggatggttatttcttaccaggaaaatactatctaccttcagggtatcaggtcttccttactagtgggaatggtggtggaattattgttactatctgaaacatcattatccacatctaactctagcatagcagctgttgcagtggattccagagtgcaagctgtactcgacagttatcctagcattttcatcgatccagtgggactcctaccaacccgcccgtgtgatcattcaatttcattgatccccggtgcccagctgttccacataaggccataccgttaccctccaaccctcaaagatgaaattgaaactcaagttaaggaaatgctatcccagggggtgatacgaaagagcagcagcccctttgcatctccaattctcttgtcaaaaagaaagaccactcatggcgattctgtgtagattaccgttatttgaatgccacgacggtgaagagtaaataccctatgctgatattcgatcagttctttgtgctcaggcactaggcatgtagaggtattttttgttgttattttctctttatgtggatgtggttacaaggctgttgacaaaatattactactccatcgtcctccctctcacccataagatatttgatatattactttgtccagtcgatgcagcttacaaggctgttgacaaaataatccaggtttgttggcacacttttaatctttcttgtacgggtacactacttctaacaatggaatatgaatgttgttttttgcgc

SEQ ID NO: 111253 - DNA, 1809 bp, Zea Mays
agccgctagggctgcattcatccacctcgtgcttatcgcctaccccaactccgactcctgctcgtctcgtcgctcgccgctcgccgcctcgtccagctctctccgcccctccggactagcctagcccctcccgctcaccgcgtcgtctccagaatctggcctacgaccgttgacggctggtgccccctccggcgatcggtggtcatggtccgtccttgctcaccccgttcggatccgctatgcgcgagcctccccttccctaatcacgcgcccccctgccccagcgatccgcagctgccgccccctgtcccaccgatccgcggctgccgcctcctccttcccctaatcacgccccccggtcccgttgatccatagttgtcgcctcccccaacccctaatcacgcgcgtctcgctcccgccgatccgcggatcggctctgctccaaccctcctccgtccctgagatgcaagcgagcaccacgggggatttctcccttgaggtgttgcctgagaggtgctgctgaccgagtagcatcattgaagagttactgtcgagcacttggattatgtgatcgatgtgcagagaagtggttccaagggcacaagtgtgccaacacggtgcaacttcacaccattgaggaagtctaggatttgctcaccttggatgaagctacagtggaagtcattgaaccaacagaggaactgatgatggttgtcgtatccctgtctaatgcggcatggtccggatctgacacaatatcaaccatgagattacagggtcagattcagcaacataatctcttggttcttattgattcagggtcttcacatactttcctcaatgacagtcgtcgaccactattgtttggagtccaagaattgacaacactaattacagtttaggttgctaatggccaagttattacctgctcacaccaccttccagcagctcaatggaccatcggtatagcccgatgagagtggattggacaaacatgtggatggttatttcttaccaggaaaatactatctaccttcagggtatcaggtcttccttactagtgggaatggtggtggaattattgttactatctgaaacatcattatccacatctaactctagcatagcagctgttgcagtggattccagagtgcaagctgtactcgacagttatcctagcattttcatcgatccagtgggactcctaccaacccgcccgtgtgatcattcaatttcattgatccccggtgcccagctgttccacataaggccataccgttaccctccaaccctcaaagatgaaattgaaactcaagttaaggaaatgctatcccagggggtgatacgaaagagcagcagcccctttgcatctccaattctcttgtcaaaaagaaagaccactcatggcgattctgtgtagattaccgttatttgaatgccacgacggtgaagagtaaataccctatgctgatattcgatcagttctttgtgctcaggcactaggcatgtagaggtattttttgttgttattttctctttatgtggatgtggttacaaggctgttgacaaaatattactactccatcgtcctccctctcacccataagatatttgatatattactttgtccagtcgatgcagcttacaaggctgttgacaaaataatccaggtttgttggcacacttttaatctttcttgtacgggtacactacttctaacaatggaatatgaatgttgttttttgcgcaaaagttgcctggcttttagcatcgtttgatgggtgaggacacacatcgcctccaaatact

SEQ ID NO: 111254 - DNA, 506 bp, Zea Mays
tttgagcatatctctgcgccacaacccactgatgtagcacaatctgctggcagtgaagctgcagatgccattgcgagtgtgtcagacagtgttattcctatcttcaggcagcaagcagagcagttgctaagctcttccagtctgtctgcagctgacttgcttgccaaagcacttgcgaaggcagttggttacacggacataaagaaaagatcattgttatcttccttggaggattacagtacactacatcttcaaactggcagaccgatgtggtcacctgggtaagtgactggtaatttgtgcttctggttcatgagtgttctgattaaatggaaatccttctctgcctataggtttgctataacattccggtgatcgtgtttcttcttcgtcggggtcatatttgttcccattggtgttatcttcagtttgacgtcggcaacgtggtcatggtgaccggcgggaggaacaccgggcgtgtaggagtgatcaagaactgggagaag

SEQ ID NO: 111255 - DNA, 486 bp, Zea Mays
tccccgtccccatccctgtgatgcccgcggctaggggatccacaaccttcaccgtgccgccgccgaaccacaccttcgctcgtggtgcctctgcccccgctctcgtccgccgccacgggcgccgcatcatccctgaccctccctcgcccatccactccggtcatcccgccaccccctgcgtcgcacacaccccgaatctgctctcctgtcccttcccctccagcgattccgcctcccacccgtgctgcacacacctagccgtcacttctgtccatcccacctccccccgtggttgtgtgctgcccagcccatctccgctccttgacaagaccaatggcggctgctgcgtcctccgctctgcacgctgttggcgccgtcgcctccgccaagcccagatccatcgcccccgcggtggtgaggaggagaagcgtgctaatggatccccagcatgtcgcacgatacccatccccagcccacgcccccacc

SEQ ID NO: 111256 - DNA, 1109 bp, Zea Mays
ggggttgttgttcagttcagtttgtcttcatgcatgggagtgcttggttcgattgttcttagccataggtgctatagattcgtctatggccaagacagaaatttttgttttcatgatgttttcatggaagaagatggcgagaagctctccgcccttctcatggttaactattttgattaagtgattaatcaatttagtaacacatatttaatgttttagcttgttggtttagacatggcccctcagtaattttgtaatttttttatctttatccaaaaactaagttggtatgtagtgacaggtaaggaatacggtggtggtttggacctcagttattggccagatgaagggcgaaggccattatcagatcctcgtccacctttgggctactgctaacaggaggacgagtgtcgtacacctctccaatttcccccttcaatacgtcatacggtgagcaagggcatactgatgaggttagcctcattatctaagcttttttcctcaactatctacctgagcatgcaatgagaatgacaataaactaaatgtttgcttactcgtcattcctttgaaatttatcatgttaacctttttcattttactagggaagggatgacattgatttttctcgttcgagcatcaggttttgtgtgttggttatggtgtggtcgttggtgagactgcagcgtcctcggtaatcacctctctaacaagttagattatgtgttgaaatttctattatctttgctgaattgtactgttgtgaaagggggcgtagtacgataggttggggattgaaagaacataacataggagaagggcctatataatataatttttatgtataaattatgcaaaaacaaattacctcttttgggtttcaatcatttgacaacccttggaccctgacattgtattagtttgcttaccttgactctgtgatgagttttggaacatttggaggaggttcacatggacctaacaacctgttaagtttgcttcagcccagtaaactatattcagaatatttggatggtaaactatttcaaccgctattgttatacatataaaggatttcattagaaattatcatttatatttagtggtgc

SEQ ID NO: 111257 - DNA, 1889 bp, Zea Mays
atggaatggaagacagtgtacctcaaccaagtccatgtccatcctgatcgcaagctgcaaggcttcatgccgggggagaatgttgtggccttcatccatgacgagcctgacgaagggagcggcgatggcgttgttcatgcgcgggcccgcgctggcatcgtcctcctccttgcctcgcttcctattggtcttcaaaaccgaaacgggacggaacgggtcaccacaaagcccacggtcacgaggcagcgcggcagggaaggcggggtgaacggaggcagcagcgaagaggggtgcctacctgagtaccaggcggagcagcgaagtgccggaaaggcggggccagcggggagcgtatgggagtgggagcgggggcggcgagggccagtgggggaggaggatggggacggtggcggcggagatattgacaagttctataagtctgctattgtcttacgtggtggggagaacaaagaagtgcgatttaaggggaagactgaactaaaagatttgatggtgaaggcagatgggattaccagattaatggagcggggttacagggtgaagtgcatggccatgccctcaggtaatgaaggagaagatttaggaacaccactctctcggttgttaggacttatacaagatgtgtgcattgtcgaaagtggaccacacctggactcgaagcatgcgtatgttattgtcaggcatgtgaagtttgcaacaaagaaaggtgggaagaaagctagccaggccatggaagatgcaggaaaaggtaccagcagtgctgtcccagagtcacccattgatggcagcaataccgaagacatggcagttggacatggtctcgggaaacctgatgatcgtaccatctcagatcgtgttaaggaaacagccacccgtctctccagagactcccctgcccaaaaggaggggcacgatagagaatttaaaagggagttcaattggccaaaatccaacccaggggctgggggaaacagaaataatcctggccagaggggaccacgagatgtgcaacctggcatggaaaagcgagtgcaagatcagggtcctgttgaaaccaacagatacgccgctcggaggcagccaataagaggagacagcagccaaggaataccccctcaaggtgatagaaggaatgaaaatggaggtcgttatgagaaccagagacctcttgaacagcagcataaccggccgttaccgaggttcaaccaaggtggattatcacaacaagatccaaggaacgaaaggagaagttcttttccactaaataacaaccaaaggcaaccagcaggtggcggtgatcctaatcgagcaagcaagagttttgggatcttcagtagtactcagaaatctggatcatctgagcagaggaagttggatggtaatcctggtaataccgactcgcctaaaaggtttgggatttttagttctgggaaatgaggatggacaaagggctctacagaagaggactctgatatttttactttggcacgatggaccaaatcctacttgaaaggttcaacaaacctgcatacatggatgagtttttttggcggtgttttttgtaaggattcatggacgatttggcgtttgtttagcctcaacagatgtcttgttctgatgatggaaaagggatcccgtgatagcaacattctgagaaatattttctattgaggggctcttgttggcagggtaaattgctgccgttgtcaagttggaagtattatctggatttgaaatacagtacccctattattttgcgtagacaactgtcatgataatcatctgtacaaacaagcagaacccagtgatatattttttaaaataattatcctttgcttaggcttcaagaaaagcgcttaagcaaccaa

SEQ ID NO: 111258 - DNA, 101 bp, Zea Mays
ggcgtatatgcgggatgaccccggggctaatgcacagggcatttactatattaatcagctgaacataaccgcgcaaccgtgctatccacgtcactactata

SEQ ID NO: 111259 - DNA, 906 bp, Zea Mays
gctcagtcggaactcgcgacgaccgggagcatgcatgcagatgcaaatcttctcgcgatcaacgatgctctctctcctccgtctccgtagcagcgtcgctgcgactccctccactgcccaatacgccgcctcggcacatctccccgctgttttgtggcgttcgttgccaccagcgctggctcgacgagcatctccatgtccgctcacggtgcctcccgatccacccacccgtcgtgttgtcagatttcgaattggatctcgcagcagcatggccaccaccaccaccagtggaatcaaaggcgacgacgacgaaacgtcgtcgttggctaaagcatgcaatgatgaacaagatgggaggacggccgctgtgcatggcgacaaacataccaggaagaagacaggccatgatatttttcttcgatgtggcgatggccctcccggtgagcgcaccgacgacgaagaactcaggcgcctggaagaagaagaagaacgccgggaaaaagaagaagaagatgatgatgatcagcacgcggattaccaatataactaccctgacgaagatgtacggcatttggctatatttccatatagcacgcaccgtgatggttctatatacaggaatgccttttcatggagaaaaatgcatcgcattgagaaccgcaatgaaactcggattgaggcaatgacgttatcagatcccaaagattgcatgcactgcaagggcaaaaaaaatttgggaagcattttgaaaacatgttgcaaattttctccttaaagttggctaagattgatgtggatggtggccccatagagttgtatggatatatggctacgcgggatgttctcgagccattgcttaactatgtcgtcaatgttagcaggaatgatcctctcatcatcgagcag

SEQ ID NO: 111260 - DNA, 588 bp, Zea Mays
atgactggccctaagcgaggcattgagttgtgtggcagtattataattgaatttgacatgaggatcaagatgggcggagaagagaaagacgatccacaactgattgatggtgcatcagtggtactagacgacagatgcatgcctaatagcgcttatgcattcacaagacgcatctacggggatagtggagcggttgacataactgtatcacgtcttgactttgcagttgaggcgacgatagaagtacacatatctgaagtagaaggcagtttcagtttgtgtgtgggctgttttaccagtgggttatgtgaagaaatccagctctttaagggcgtcattattgagccgagtgccttaaggagacatgttgttgctgcagtaatagatacttggatggatgtgaagttgaaggtaggctcagggcattcttacagcagcgacaatccggaacattggtgtagcttcaaaacgaccaaccatggatggacctgtcaacagataaaggttgagtttgcatccatattggtgaagctgctcatgagcgtcttcccgcacatgagtatatactagttaagtgcctctaaagct

SEQ ID NO: 111261 - DNA, 478 bp, Zea Mays
actctctctcaggtgcgagcaaggagcacgagcgcgagcccagccatacgacctcggcaggacacctcacagcatcgtatccagcaactccagggttattccttatctattcatcgttcattgatttttatatatcttctctttgcattatcggaacattagggcgaaatattacagactcagctatgatgatgagaggaggcaacgtgaggagcttggagaagaggatggcggaaatgttcgcgtacatgcagaggctttaggccgcacagggtcatgctccaccacctccgttgttccctgcagctgaccctacagagttccctactcccggtcaatcggcggcgtcgaacaaccctcatgcttcgtccagcccttcgccgaaccagtcgagatgcccacctcgttgatgatctgttttgtgatgatccatacttacctttatgagtgttggtgatgttagttaaattttatcttg

SEQ ID NO: 111262 - DNA, 757 bp, Zea Mays
agccgcagccgccgccgccgcctctctctcccttccctcttctctctgccctcacctctctcccccttccatcacctcgctagtaacaggtcaccgtgtgtgtgcgcgccatggggattcatctgccgccgcctgccctcgccttctgcctctcggcgcccactcggttctagtggccgcttcgaggaggcgctcgcgcgcatcgaggagctccaggagcgcgacactggcgccgacgatagcagcacagcctcgtcgttcttgagcgacggagaggcggcgtcgcggccagcaggcgagcagcagtcgcactccgcagatttcttgagcgacggagaggcggcgtccggtggcattcagagacgtgcgtgacggtcggaggtcgtcgagcgcgtctagatagcatccaagacaaatagcgttgttcgcgatctgaggcagctggtaggcagtctgggcttgggcgcacgcgagccagagagggagggctgggagcacgtcatctccaagagcagcgacgacgtctcctacaaggcctggtgcgacaagcccacggtagttgccaattgcgtacatgcattgcaacagatctgggctctagaagctgctaacttggtagcagaaagattgaggcattgcatagcaaaccactggatcaaagagtttagtgaatggccacagtgcatgttcttgagttgcaatcaaagttccttccatataataataacaaaatatttgacataatgaatctgttgga

SEQ ID NO: 111263 - DNA, 1747 bp, Zea Mays
agccgcagccgccgccgccgcctctctctcccttccctcttctctctgccctcacctctctcccccttccatcacctcgctagtaacaggtcaccgtgtgtgtgcgcgccatggggattcatctgccgccgcctgccctcgccttctgcctctcggcgcccactcggttctagtggccgcttcgaggaggcgctcgcgcgcatcgaggagctccaggagcgcgacactggcgccgacgatagcagcacagcctcgtcgttcttgagcgacggagaggcggcgtcgcggccagcaggcgagcagcagtcgcactccgcagatttcttgagcgacggagaggcggcgtccggtggcattcagagacgtgcgtgacggtcggaggtcgtcgagcgcgtgtaagcttgttgaccattttcagcatgtgtaaattggcggttagatttcgttcaagaagtaagtgctacatttcttgtgtccttaaatcaattaataccactgctgcttgttcactggacatgttttagctagatagcatccaagacaaatagcgttgttcgcgatctgaggcagctggtaggcagtctgggcttgggcgcacgcgagccagagagggagggctgggagcacgtcatctccaagagcagcgacgacgtctcctacaaggcctggtgcgacaagcccacggtagttgccaattgcgtacatgcattgcaacagatctgggctctagaagctgctaacttggtagcagaaagattgaggcattgcatagcaaaccactggatcaaagagtttagtgaatggccacagtgcatgttcttgagttgcaatcaaagttccttccatataataataacaaaatatttgacataatgaatctgttggaggatagacttcaacatgcaaatggagtcgttgttttggcaacaattaaagtttttctccattcccatgactgttgttcatcaacaggtacgcatgttactcctagagaggtggtctctggatcatgctgcattattgctattacttctcaaaagcatttctttcttgttttagaatatgagatttagtatatgagcaccttctgttgatgcataaaaacaaaatcttatttagattaagatcccataacggactagcacatgacatcacaacaacaacacacttggtccatagataatgttttatttggaggttaatttacttgaattttttttaattccatggactctttactctggtgggtactggcagtcctaaatagtcattggcccttttatgtgtaaaataacagcttcctggtgttgatcccaatgatccatctgttaaaggtctctgtattgtgatgcaatgaaattcatgttgcctctagactatagcattgttctgcttcaccgtaccttgactaaataagaataaatatattatatgtcaccaaatcttcacatgaactgctatcctgtattatctggtggaaatatgaaggtttctttatttctcttcttaaacagcaagagaagaaggaagacaagtcagacaaaacagaagacgagaagaactgatgtagccatgttcatgcttccactgttgaaatgcatattcaacatagcttgctcagctcctatctgttgtttcaacgttgatttaaaagaagagctggtagttgtgggctttcgaacaatagctggaatgatctagctagctatatgtaaatgatctagttgtgaatgatattataactgtg

SEQ ID NO: 111264 - DNA, 109 bp, Zea Mays
gtagtgtggaagcactttggacttatagtcatttcgcttttcgaatgaaaatcgagtcttttttaggtaaaagaaaattgaaaaagatactagtagtcattgaagaagg

SEQ ID NO: 111265 - DNA, 2739 bp, Zea Mays
caatccggcccagatcgacatctatcattaacacttggactagtagtagataggagtagctgcatctgcatctgcagactgaggagaagggggccctgccgccttaaaaccagtcaaacttgcacacactgacaccgaggaaccaacgaaccccgcgtcgcccttcgctcccaacccccggcgccatgccgcccgcctcccccctcctcttcgtcttcctcgccgccgccatcgtcgcctgcgccaccgcagcgacgtcgacgtcgacgtcgtcccaggcggacgcgctccaggccttcagggccgccctcaccgtcccgcccgaggccgctcccttcttcgccacgtggagcgccaccgcggcatccccctgcggcttcacgggcgtcaactgcaccggcggcaacgtcacggcgctctccctgccggcactcaagctgtccgccgcgacggtcccgttcgccgccctctgcgccgccctgccttccctcgccgcgctgtccctgccggagaactccctcgcggcgctgaagctgagcagcctgaacatgtccgacaaccacctcaccgggcccgttccggaggcgcttgcgatctcggcctacggcgagagcttcgacgggaaccccgggctgtgtgccaccaacggcgctgtcttcctccgccgctgcggtcggagctccgggagccggtcggcgaacgcggagcgcctggccgtgacgtgcatcctcgccgtcacggcggtgctgctggcgggggcgggcgtggccatgtgcctgcagaagcggcggcggcggcgcgcggaggcctccgcggggaagctgttcgccaagaagggctcgtgggacctcaagtcgttccggatcctggcgttcgacgagcgggagatcatcgagggcgtccgcgacgagaacctggtcggcagcggcgggtctgggaacgtgtaccgcgtgaagctcggcaacggcgcggtggtggccgtgaagcacgtcacgcggggggtggcgacgagcacggcgccgtccgccgccatgctgcggccggcggcgtcggtgcggtgccgcgagttcgactcggaggtggggacgctgagcgccatccggcacgtgaacgtggtgaagctgctgtgcagcatcaccagcgcggacggcgcggcgagcctgctggtgtacgagcacctccccaacggcagcctgtacgagcggctgcacggggcggcggggcggaagctgggcgcgctcgggtgggtggagcggcacgacgtggcggtgggcgcggcgaggggcctcgagtacctccaccacggctgcgaccgccccatcctccaccgcgacgtcaagtccagcaacatcctcctggacgagtcgttcaagccccggctcgccgacttcgggctcgccaagatcctcagctcggcaggcggcggcggcggccactcgtccgccggcgtcgtggccggcacgctggggtacatggcgccggagtacgcgtacacgtgcaaggtgacggagaagagcgacgtgtacagcttcggcgtggtgctgctggagctggtgacggggcggccggcggtggtggagagccgggacctggtggactgggtgtcgcggcggctggagagccgggagaaggtgatgtccctggtggacccgggcatcgtggaagggtgggccagggaggaggcagtccgcgtgctgcgcgtcgccgtgctgtgcaccagccgcacgccgtcgatgcggccgtccatgcgctccgtcgtgcagatgctggaggacgcggccgccgcgcgccaggacgacgacgggaaggtcctggaggtgaaggtggtctgagaccgaatggcggcgccttaggctttggccgtgcccggcgggcgccggcggtgacaggaggacggaaaggtcaccacggccagtggcagtgtcgcacgtgtaacagtaagattagtagattgttattttgcctgaataaccggccaagaaatcttcttcaccttctacagaaaggcatttttgtaagcacatgtcagtcaatggaggagtaggttgtttggcgtctatttccacggcagacagacccaacattctcttggactcctcctgaatcacgttcctgacaggaatgagcagcaaggaagtttcggaattggcttcaggcatcccggccggcgtgtggttgcgtaaagaataataacgcagtcgtcgtcgctgtcgcggccggggactgcgttcaccggcccgggaattcctgccggaacgaggccgtggtttaatacaaggcagagacaggcaggcatatgctcaataaaccaccaccgcccaagaggccaagacccaacgggtgtacagttgcaggaggtgtgcccgccggaagacccggggggattggccttatctgtctgcctgcctgcctttcggactccagcagagcaccaatgataaagccatcatcgtcagttcatcacacacactgacacacccacaaagacttcaggtgaactaggaacttttactttattcttagattcgatgtagaggttggcgttcaattcactttcaatactctgcatttttttctcaagcagactaaaacggaatgtatatttccaggcaaaaaaaaaacactgaatgtatccatgaaaataatgagtaagcgtggttgggacattgatatactttctatggaactacatatgcatctgtacctttttataataattaaaaagactataaatccacc

SEQ ID NO: 111266 - DNA, 3930 bp, Zea Mays
gacatctatcattaacacttggactagtagtagataggagtagctgcatctgcatctgcagactgaggagaagggggccctgccgccttaaaaccagtcaaacttgcacacactgacaccgaggaaccaacgaaccccgcgtcgcccttcgctcccaacccccggcgccatgccgcccgcctcccccctcctcttcgtcttcctcgccgccgccatcgtcgcctgcgccaccgcagcgacgtcgacgtcgacgtcgtcccaggcggacgcgctccaggccttcagggccgccctcaccgtcccgcccgaggccgctcccttcttcgccacgtggagcgccaccgcggcatccccctgcggcttcacgggcgtcaactgcaccggcggcaacgtcacggcgctctccctgccggcactcaagctgtccgccgcgacggtcccgttcgccgccctctgcgccgccctgccttccctcgccgcgctgtccctgccggagaactccctcgcgggcgccatcgacggcgtcgtcaagtgcaccgcgctccaggagctcaacctcgcgttcaacggcttcacgggcgccgtgccggacctctcgccgctggccgggctgcgcagtctcaacgtctcgtccaactgcttcgacggcgcgttcccgtggcgctcgctcgcatacacgccgggcctcaccctgctcgcgctcggcgacaacccgttcctcgcgcccaccgccgcgttcccgcccgaggtcacgaagctcaccaacctcaccgtgctctacatgtccgccgccaagatcggaggcgccatcccgccggagatcggcgacctggtcaacctcgtcgaccttgagctctccgacaacgacctcaccggcgagatcccgccggagatcgccaggctcaccagcctcacccagctcgagctctacaacaactccctccggggcgcgctccccgccggattcggcaggctcaccaagctgcagtacttggacgcgtcccagaaccacctcaccggcagcctcgccgagctccgctccctcacgcgcctcgtgtcgctgcagctcttcttcaacggcttcaccggcgaggtgcccccggagttcggcgacttccgggacctcgtcaacctgtccctctacagcaacaacctcaccggcgagctgccgcggagcctcggcagctgggcgcggttcaacttcatcgacgtgtccaccaacttgctctcggggcccatcccgccggacatgtgcaagcagggcaccatgctgaagctgctcatgctcgagaacaacttctccggcgggatcccggagacgtacgccagctgcaagacgctggtgaggttccgtgtcagcaacaacagcctctccggcgaggtgcccgaggggctgtgggctctccccaacgtcaacgtgctcgaccttgccgggaaccagttcagcggcagcatcggcgacggaattgggaacgccgccgcgatgaccaacctcctccttgctgggaaccagttcagcggcgcggtaccgccgtcgatcggcgacgcggcgagcctcgagagcgtggacctgtcgcggaaccagctctccggcgagataccggagagcatcgggagtctgtcccgtctcggcagcctcaacattgaggggaacgcgatcggcgggccaatcccggcgagcctgggctcctgctcggcgttgagcacggtcaatttcgctgggaacaggctcgacggcgcgatccccgcggagctgggcaacctgcagcggctcaactccctcgacgtttcccggaacgacctctccggcgccgtgccggcgagcctcgcggcgctgaagctgagcagcctgaacatgtccgacaaccacctcaccgggcccgttccggaggcgcttgcgatctcggcctacggcgagagcttcgacgggaaccccgggctgtgtgccaccaacggcgctgtcttcctccgccgctgcggtcggagctccgggagccggtcggcgaacgcggagcgcctggccgtgacgtgcatcctcgccgtcacggcggtgctgctggcgggggcgggcgtggccatgtgcctgcagaagcggcggcggcggcgcgcggaggcctccgcggggaagctgttcgccaagaagggctcgtgggacctcaagtcgttccggatcctggcgttcgacgagcgggagatcatcgagggcgtccgcgacgagaacctggtcggcagcggcgggtctgggaacgtgtaccgcgtgaagctcggcaacggcgcggtggtggccgtgaagcacgtcacgcggggggtggcgacgagcacggcgccgtccgccgccatgctgcggccggcggcgtcggtgcggtgccgcgagttcgactcggaggtggggacgctgagcgccatccggcacgtgaacgtggtgaagctgctgtgcagcatcaccagcgcggacggcgcggcgagcctgctggtgtacgagcacctccccaacggcagcctgtacgagcggctgcacggggcggcggggcggaagctgggcgcgctcgggtgggtggagcggcacgacgtggcggtgggcgcggcgaggggcctcgagtacctccaccacggctgcgaccgccccatcctccaccgcgacgtcaagtccagcaacatcctcctggacgagtcgttcaagccccggctcgccgacttcgggctcgccaagatcctcagctcggcaggcggcggcggcggccactcgtccgccggcgtcgtggccggcacgctggggtacatggcgccggagtacgcgtacacgtgcaaggtgacggagaagagcgacgtgtacagcttcggcgtggtgctgctggagctggtgacggggcggccggcggtggtggagagccgggacctggtggactgggtgtcgcggcggctggagagccgggagaaggtgatgtccctggtggacccgggcatcgtggaagggtgggccagggaggaggcagtccgcgtgctgcgcgtcgccgtgctgtgcaccagccgcacgccgtcgatgcggccgtccatgcgctccgtcgtgcagatgctggaggacgcggccgccgcgcgccaggacgacgacgggaaggtcctggaggtgaaggtggtctgagaccgaatggcggcgccttaggctttggccgtgcccggcgggcgccggcggtgacaggaggacggaaaggtcaccacggccagtggcagtgtcgcacgtgtaacagtaagattagtagattgttattttgcctgaataaccggccaagaaatcttcttcaccttctacagaaaggcatttttgtaagcacatgtcagtcaatggaggagtaggttgtttggcgtctatttccacggcagacagacccaacattctcttggactcctcctgaatcacgttcctgacaggaatgagcagcaaggaagtttcggaattggcttcaggcatcccggccggcgtgtggttgcgtaaagaataataacgcagtcgtcgtcgctgtcgcggccggggactgcgttcaccggcccgggaattcctgccggaacgaggccgtggtttaatacaaggcagagacaggcaggcatatgctcaataaaccaccaccgcccaagaggccaagacccaacgggtgtacagttgcaggaggtgtgcccgccggaagacccggggggattggccttatctgtctgcctgcctgcctttcggactccagcagagcaccaatgataaagccatcatcgtcagttcatcacacacactgacacacccacaaagacttcaggtgaactaggaacttttactttattcttagattcgatgtagaggttggcgttcaattcactttcaatactctgcatttttttctcaagcagactaaaacggaatgtatatttccaggcaaaaaaaaaaca

SEQ ID NO: 111267 - DNA, 1979 bp, Zea Mays
gccgccttaaaaccagtcaaacttgcacacactgacaccgaggaaccaacgaaccccgcgtcgcccttcgctcccaacccccggcgccatgccgcccgcctcccccctcctcttcgtcttcctcgccgccgccatcgtcgcctgcgccaccgcagcgacgtcgacgtcgacgtcgtcccaggcggacgcgctccaggccttcagggccgccctcaccgtcccgcccgaggccgctcccttcttcgccacgtggagcgccaccgcggcatccccctgcggcttcacgggcgtcaactgcaccggcggcaacgtcacggcgctctccctgccggcactcaagctgtccgccgcgacggtcccgttcgccgccctctgcgccgccctgccttccctcgccgcgctgtccctgccggagaactccctcgcggcgctgaagctgagcagcctgaacatgtccgacaaccacctcaccgggcccgttccggaggcgcttgcgatctcggcctacggcgagagcttcgacgggaaccccgggctgtgtgccaccaacggcgctgtcttcctccgccgctgcggtcggagctccgggagccggtcggcgaacgcggagcgcctggccgtgacgtgcatcctcgccgtcacggcggtgctgctggcgggggcgggcgtggccatgtgcctgcagaagcggcggcggcggcgcgcggaggcctccgcggggaagctgttcgccaagaagggctcgtgggacctcaagtcgttccggatcctggcgttcgacgagcgggagatcatcgagggcgtccgcgacgagaacctggtcggcagcggcgggtctgggaacgtgtaccgcgtgaagctcggcaacggcgcggtggtggccgtgaagcacgtcacgcggggggtggcgacgagcacggcgccgtccgccgccatgctgcggccggcggcgtcggtgcggtgccgcgagttcgactcggaggtggggacgctgagcgccatccggcacgtgaacgtggtgaagctgctgtgcagcatcaccagcgcggacggcgcggcgagcctgctggtgtacgagcacctccccaacggcagcctgtacgagcggctgcacggggcggcggggcggaagctgggcgcgctcgggtgggtggagcggcacgacgtggcggtgggcgcggcgaggggcctcgagtacctccaccacggctgcgaccgccccatcctccaccgcgacgtcaagtccagcaacatcctcctggacgagtcgttcaagccccggctcgccgacttcgggctcgccaagatcctcagctcggcaggcggcggcggcggccactcgtccgccggcgtcgtggccggcacgctggggtacatggcgccggagtacgcgtacacgtgcaaggtgacggagaagagcgacgtgtacagcttcggcgtggtgctgctggagctggtgacggggcggccggcggtggtggagagccgggacctggtggactgggtgtcgcggcggctggagagccgggagaaggtgatgtccctggtggacccgggcatcgtggaagggtgggccagggaggaggcagtccgcgtgctgcgcgtcgccgtgctgtgcaccagccgcacgccgtcgatgcggccgtccatgcgctccgtcgtgcagatgctggaggacgcggccgccgcgcgccaggacgacgacgggaaggtcctggaggtgaaggtggtctgagaccgaatggcggcgccttaggctttggccgtgcccggcgggcgccggcggtgacaggaggacggaaaggtcaccacggccagtggcagtgtcgcacgtgtaacagtaagattagtagattgttattttgcctgaataaccggccaagaaatcttcttcaccttctacagaaaggcatttttgtaagcacatgtcagtcaatggaggagtaggttgtttggcgtctatttccacggcagacaga

SEQ ID NO: 111268 - DNA, 97 bp, Zea Mays
attttctatttcggtttttggttcaaattacaatttcaactatgttttaaatttgcaaacttaagttcaaatgcacatatcagaaacacaacataag

SEQ ID NO: 111269 - DNA, 3518 bp, Zea Mays
agattcccgctccacttatttactccctcccttcctgatagctcctcctcaccattccaattccatttgcaacaaaaggtttctttcaacagcagcttgcacacacgtacgagcgagcacaagaaaagcatcctcacacatactggtcagctggtgctatggtgtccaccactctctgcagttcacctccacccttgctctgcttcgttctcatcatcatcatcttcttcgcgtccggcgatggcggcgcggcggcggcggcattggagctggacacgcaggctgcctatctcgccaatatgaaggagcagttcgcggggcctggcatgtcgaggtggtgggacttcatgtcgccggcgccggactactgcagcttccacggcatcgcctgcgaccggtccggcaacgtcacgggcatcgacgtcacgtcgtggcgcctcgtcggccggctcccgcctggcgtctgcgcggcgctccccgcgctccgggagcttcggatggcgtacaacgatgtccgcggcgggtttccgctgggcgtgctcaactgcacctccctggaggtgctcaacctcagctactccggcgtgtcgggtgccgtgccccccaacctgtcccggctgcgcgcgcttcgggtgctcgacctctccaacaacctcttcaccggcgcgttcccgacgtccatcgccaacgtcacgagcctggaggtggtgaacctcaacgagaaccccggcttcgacgtgtggcggccgcccgagtcgctgttcgtgccgctgcggcgcatccgcgtgctcatcctctccaccacgtccatgcgcggcggcatccccgcgtggttcggcaacatgacgtcgctcaccgacctcgagctcagcggcaacttcctcaccggccgcatcccggagtcgctggcgcgcctcccgcgcctgcagttcctcgagctctattacaacgagctggagggcggcgtccccgccgagctcggcaacctcacgcagctcaccgacatggacctctccgagaaccgcctcaccggcggcatcccggactcgctgtgcgcgctgcgcaacctgcgcgtgctccagatctacaccaaccgtctcacgggccccatcccggccgtgctcggcaactccacgcagctgcgcatcctctccgtgtaccgcaaccagctcaccggcgagatccccgccgacctcggccggtactcggacctcaacgtgatcgaggtgtcggagaaccagctgacggggccgctgccgccgtacgcctgcgccaacggccagctccagtacatcctggtgctgagcaacctcctgacggggcccatcctgccggcgtacgccgagtgcacgccgctgctccggttccgcgtgagcaacaaccacctggagggcgacgtgccgccgggcatcttcggcctcccgcacgcctccatcgtcgacctcagctacaaccacttcaccgggcccgtggcggccacggtggcgggcgccacgaacctgacctcgctgttcgcgtccaacaaccggatgtccggacagctccctccggagatcgccgccgcgtcggggctggtgaagatcgacctgagcgacaacctcatcgccggacccatcccggagtccgtgggcctgctgtcgaagctgaaccagctgtccctgcagggaaacaggctgaacggatccatcccggagacgctcgccgggctcaaggcgctgaacgtgctgaacctgtcggacaacgcgctgtccggcgagatcccggagtcgctgtgcaagctgctgcccaactcgctggacttctccaacaacaacctgtcggggccggtgcccctgcagctgatcaaggagggcctgctggagagcgtggcggggaacccggggctgtgcgtggcgttccggctgaacctgacggacccggcgctgccgctctgcccgcggccgagcctgcggcgggggctggccaggaacgtgtgggtggtgggcgtctgcgctctggtgtgcgccgtggcgatgctagcgttggcgcggcggtgggtgctgcgggcgcggcggtgcgcggagcaggagggggcgctggcgttgtcgccggcgtccagcgcgtcgtacgacgtgaggagcttccacaagctgagcttcgagcagcacgagatcctggaggcgctgatcgacaagaatatcgtggggcacgggggctctgggaccgtgtacaagatcgagcttagcagcggcgagctggtggcggtgaagaagctgtggttgtcgtcgtcgaaacggctgctgcgtgggccgagcagcaagcaggtggactgggcggcggcggcggcgatgaccaacacaaccaacacgagagacagcacaacaagcgacggcggcggcggcgggtggctcggcgaccgcgagctccgcacggaggtggagacgctgggcagcatccggcacaagaacatcgtgaagctctactgctgctactccggcgcagactgcaacctgctggtgtacgagtacatgcccaacggcaacctgtgggaggcgctccacggctgctacctgctgctggactggccgacgcggcaccgtgtggcgctcggcgtcgcgcaggggctcgcctacctccaccacgacctcctcttccccatcgtgcaccgcgacatcaagtcctccaacatcctcctcgacgccgacttcgagcccaaggtagcagacttcggcatcgccaaggtgctccaggcgcgcggcggcggtggcgttgaccgagaccgagacgcctccaccaccaccatcgccggcacctacggctacctggcgccagagtacgcctactcgtccaaggcgacgaccaagtgcgacgtgtacagctttggcgtggtgctgatggagctggccacggggaggaagcccatcgagccggagttcggggacacgagggacatcgtgcactgggtctccggcaaggtggccgccggcgccggagccgaggcggacgcgctggacaagcgcctcgcgtggagtccatacaaggaggagatggtgcaggcgctgcgcgtcgccgtgcgctgcacctgcagcatgccgggactccgccccaccatggccgatgtcgtgcagatgctcgccgaggccgggccacccgccggccggacgacaaaggacgacagctccggcgagcccaaagtactcgtagcagatcatcatcatgcttctccgccgccgccgccgccttagaattgaactgaattattcaagcaacagcgtgccatgcccatgcaatgcaagtcgccgagttattaagtataggaagaggtcgtccaactgtcgaggcaaaccaacatgcatacatgagccgctctaagcaaccgattataaaatatatttatagtagtatagatatactaattgatgtgccgatgatttacacgagtgattcgatcatataaagtctagtttgagaattccatttttccgagttttctattttttcaagcgagaataaaccaatttcttttttaaaaatagaaa

SEQ ID NO: 111270 - DNA, 948 bp, Zea Mays
ccggccccacaagctgtacctgatatgtctactccagcatcccagcaggatacgcagttgacagacacacaggtacatgaattactgttaaggcaacaacatattcgtgtactattagaaagttgccccgatgaagctgacattgatccactggttcatacaaatataacgaaacagaccaaaacacctacaaccccagtgggtaaacatggtgacgttggcaagaacacgccgaccaacacaaacgtcactcctcaagcaacaccacatacagaatcttgacaaccgatatttgatgtgacgctgcaaataaagtctcccggcagcgtccaacaggcggcagaaatagatctccccgacagtggtccatgttttgatcagactccatctgaacatgtttctgttgaaaccgatccagctacaaacactcctcaggttgatcaggtttcacttgattcggagatgcaaactgtgttagctctacgcgaatatttgtgtggtatgcaatctgacaccaacaggaccataatagattatggtgaatattgttcgacatcttctgatatatatgaatcttttgccgatgggaagtgtctccataatgggttcatgcagtgcttcatccaatgtgtagatgatgatgccaaaaatcagcagcattccatgagttcgaacatattaattcttgatgttaatgttgggtcactactcaactttgaggaacaagaacgacacagtcggaaccctcaaccttttgatgaatctgtactgcacacacttctagacaatgcattgcccgagacagatgaaatggataaatgcaaagcgatcatggttcccatgggcaacactagtgagatacggtctcttgcgctgcattatatcacattccatccgaagaacaaagctttatcgctgctagaagacatccaaagattcaaggtctaa

SEQ ID NO: 111271 - DNA, 669 bp, Zea Mays
atggcgtccaggatgaagtgggtctggacggatggctttgcaacagacgtcatggtgaagcagttcaaacgccggctaatacaacccactaggaatatggccataataggcccattacccacagattacattctgattacagctggttacccagcagtagaggcagccacctgcgctaggccggtggtggcgtcccgcaccaggacggcgccggggacgtcatctattggtgtgtccatggttcatacaaaaaggagaaacaggctacttcatgataggatgagagaccttgtgtttgttaaatttaactccaagctaaggggaaagaaggagagaatagacaaagatcctttagagagggaagtagatgatgttgttggtgatgatgacaatgaattcattactggtattgtacctcttccgaatgatgttgttgaaccagcgcaagatggaagatcacagggagaacaaacatcacaagcacaagttcaagtacaagcaaaaagaaagaggtctatgaagcctagaaagaagttaagaagcctccagtctctgatgcgtgatgttcaagttcaagtgcagcagtcctcatcagattcagaagatggtgacattgcaatggaatcctctgaatctgataagtctccacatgcctttgattctgattga

SEQ ID NO: 111272 - DNA, 1674 bp, Zea Mays
ccttttgattccacggcctcggtcgactcaccaattcccatacgtattctcgtctgaaacaaaaggaaagagcgaaagaaaaaaaaatcttcccttaatttcagctgatcggcatggcgcagggagcagcaacagccgtagacggcagcggcagcggcagcaccgcccgtccgccggcggcgctgcccggcctgaagctcctccgtcgtctcctcctcgtggcggtggtgggcacgggtttcctggcagtcgtggtactgctctcctcctcatggcgatactcgtcatccatgctccctcgggtccccgcgccggacgtccggctgcccgcgccggcgggcggcgggaaggtgccgctggagcggtgggcgcgggggtccgcgtccgcgtggcacaacctgaccgacgaggagctgctgtgggcggcgtcgtggcggcccggcgtccggcgctacccgtaccgccggacgcccaaggtggccttcatgttcctcacccgcggcccgctgccgctggcgccgctctgggacaggttcttcaccggcgccggggacgcgcgcctcttctccgtgtacgtgcacgccaccccggggtaccgccccggcttcccgccggcgtccgccttctaccgccgcctcgtgcccagccaggtggctcggtggggcgaggcgagcatgtgcgacgcggagcggcggctgctggcgaacgcgctgctggacccggcgaacgagcgcttcgtgctgctctccgagtcgtgcgtgccgctctacggcttcccggcggtgtacagctacctgacgcggtcgcgggagagcttcgtgggcgcgttcgacgacccaggcccgcacggccggggccggtaccgcgccgggctgggccccgaggtgaccgccgggcaattccgcaagggcgcgcagtggttcgagctggaccgcgacctcgccgtcggcgtcgtcgccgacggccgctactaccccaagttccgggaccactgccggccgccgtgctacgtggacgagcactacctgcccacggtgctgtccatcgaggcccccgcgcggatcgccaaccggagcgtcacgtgggtggactggtccccgcgggcggcgcgcaccccggccacgttcggggggaggaggacgtgcacgaggcgttcctcagacgggctcacggcgcccgggaaggaccagggcaactgcacctacaacggccagccggcggaggtgtgcttcctgttcgccaggaagttcgcgcccagcacgctgcgcccgctgctcagcctcgcacccaagttgctcggatacggctgacactgctctgctctgctctcaacctgaaatctgaatcttctccagtgattgataattgattggtataaatatgtactctagactggacgatcgtcatccatcatcgatgtatagatgtagcgaaacatcatttttgggctcaactggtgttaacaccgatagcagcaaagaggagaagagacacgggaaactggacagccggaagaacgaacgaatgttattcagtaaactgttgtcccacaaacgaacggaacacaactatttagactacctctagcaagcttactcattttattttatcttctattttaaattttactatgttaacagcgtagtttactgtataaaattgtgttttgtgttt

SEQ ID NO: 111273 - DNA, 123 bp, Zea Mays
atgctatttggtttgtgaactcaggtactcaacttatgtatgaacttattttatatttgaacttctatgtcaagtctgaaaagacgtttcaacattcgtttaaacgtttaaatattaaaaagg

SEQ ID NO: 111274 - DNA, 133 bp, Zea Mays
tctcattcccatgttctgccatcattatatgttctctcattctcattctttgttctgtctttctcattcccccctccctgcaaagcccattcccattctcattcccccgtacagcccatgtctagctaaaatt

SEQ ID NO: 111275 - DNA, 297 bp, Zea Mays
atgaggacgcgcgaggccatgggaggatgggcatcgggctctgctgttgtggggaggagaagctgcaatggaggggcacgtccatggcagggaataagggagctcggccatgtgggagctcggatggcgtctatggtgagggcgcggtcaccagggggctccatggacgagcaggagcagagggaggaagatggccggaaaggagctcggagccgatgccccgacggctgtgaaggcacgagcaggggcgcacgccagccatgggaagctcctgtgccgaagggaggaggggcgtag

SEQ ID NO: 111276 - DNA, 3429 bp, Zea Mays
gttaccgttgtggactcccactcccctgtctgtctgtcgcggtgtcgcctgacaccttcttcttcctcactcccccctcaacctcatccccatcccgccctcgcacttcccacccaccccaatccatccatccatccacccgtctgaaaaccaaacccacattcaccagcgagcaagcttcccctgccctcctccggccgcctcattctcgtttccatataaatctgtaactgcaaggacaacccaccacaggacacacgaggtgaaaggagatccgtgaggaggcgcctcccccatggctgagaaggagggcaacctcgaggccgtcctcaaggaggccgtcgacctggagaacatccccctcgaggaagtgttcgagaatctgagatgcagccgcgagggtctctccaccgagcaggcgcagcagcgcctcgaaatctttggcccaaacaagctcgaggagaaggaggagagcaaattcctcaagtttctgggtttcatgtggaacccactgtcctgggtcatggaggctgcagcaatcatggccattgctcttgccaatggaggggggaagccaccagattggcaggactttgtcggtatcataactctgcttgtcatcaactcaacaatcagttttatcgaggaaaacaatgctggtaatgctgcagcagccctcatggctcgcctcgcacctaaagccaaggttcttcgtgatggccgatggaccgaggaagacgcagccattcttgtaccaggagacattgttagtattaaactcggagatattatacctgcagatgcacgcctccttgagggggatcctttgaagatcgatcagtctgctctgaccggagagtcactgccggtcactaaaggtcccggtgatggtgtctattctggttcgacggtcaagcaaggtgaaatcgaagctgttgtgattgccacaggtgtccacactttcttcggaaaggctgctcaccttgttgactccacaaaccaagttggccatttccagaaggtcctgacggctatcgggaacttctgtatttgctcaattgctgtggggatgtttgttgagatcattgtcatgtatcctatccagcacagggcttaccgccctgggatcgacaacctcctcgtccttctcattggaggcatccccatagccatgccgaccgtcttatctgtaactatggctattgggtcccatcgtttgtctcaacagggggctatcacaaaaagaatgactgcaatcgaggagatggctggcatggatgttctttgcagcgataaaacaggaaccttgaccctgaataagcttactgtggataggaaccttgttgaggtttttgaaaggggcactactcaggaccaagtgattctcatggctgccagagcgtctcgcacagaaaaccaagatgctattgatactgctatagttgggatgctagctgatcctaaagaggcacgcgctggaatccaagaagttcacttcctgccattcaatcctactgacaaaagaacagcactgacatacattgatggtgatgggaaaatgtatcgtgttagtaagggtgcacctgagcagattctccacttggctcacaataagtcagatatagagaggagagtacatgctatgattgataaatttgcagagcgtggacttagatcacttgctgtagcatatcaggaagtgcctgaggggaggaaagaaagtcctggtggtccatggcacttcgttggtctcatgccactttttgaccctccaagacatgacagtgctgaaacaattagaagggcactcaaccttggtgttaatgttaagatgatcacaggggatcagttggcaatcggaaaggaaacaggacgtcgtctaggaatgggtacaaatatgtacccctcttctgctttattaggacagaacaaggatgagtctattgctgctttaccagttgatgatctcattgagaaagccgatggttttgctggtgtattccctgaacataagtatgagatcgtgaaacgtctacaagcacggaagcatatctgtggaatgactggggatggagtaaatgatgctccagccctgaagaaagcggatatcggtattgctgttgccgatgcaactgatgcagccaggagtgcttcagatattgtcctcacagaacctggacttagtgtgatcattagtgctgtgcttactagtcgtgcaattttccagcgtatgaagaattacacgatctatgctgtctctatcaccattcgtattgtgcttggatttatgctccttgccctcatttggaaatttgatttccccccattcatggtcctaatcattgcaattctaaatgatggtaccataatgactatatccaaggatcgtgtaaagccatccccattacctgacagctggaagttggctgaaattttcacaactggagttgtccttggtggatatcaggcaatgatgactgtcatcttcttttgggctgcatacaagacaaactttttcccaaaaatatttcatgtggaaagccttgagaagacagctcaagatgatttccaaaagcttgcatctgctgtttacctgcaagttagcaccatcagccaggccctcatcttcgtgacaaggtcccggagctggtcatttgtcgagcgcccagggtttctattggtctttgctttcttggttgcgcagctgattgccacactgattgctgtgtacgccgactgggcgttcacttcgatcaaaggcattgggtggggctgggctggcattgtgtggctgtacaacatcatcttctacttccctctcgatatcatcaagttcctcatcagatatgctcttagtgggaaagcgtgggatcttgtcattgagcagaggattgcgttcacaaggaaaaaggactttggtagggaggagagggagctgaagtgggcacatgcacagaggaccctccatgggctacaggcacctgatgccaagatgttcccagagaaggctgggtacaatgagctgaaccagatggctgaagaggcgaagaggagggccgagattgcaaggctgcgggagcttcacacactcaaggggcatgtggagtctgttgtgaagctgaagggactcgacatcgagaccatccagcagtcctacacagtgtaactttgcctgcccttcccagaggaagtttcttgttctttttacccaccggcgtgtgaatttgatggtggctggcttctctttgttttatttatttatttaaccgagctgcaagcaccgacaagtagctgaaatgagacagacagacccctcgctgtaatccctgatttcttctgtcctctcctcacatggtatgccaaccagtttatgaactttgctcggctatataaataagtgcttgaagaggggagcagggttttgggcca

SEQ ID NO: 111277 - DNA, 2771 bp, Zea Mays
gcgggagaaggtgttgagctagcacccttccttcctcgatatccttccctttcggccgatgcaaatgcccttctgtccgagcctgaacctgtgggaccggagcccggctcatgcgcctgagaaccacatcgccatcgatggcacggtggtcgtgtcttgccactttggcctgtcgttgccggggaagactaccacgcttcgcctcttcagcagcacgcagatggatccaaacacgggcaaggggaagctgagcgcggaggcgccgctgaggggcggcaagaagacgaagcagcaggggaggaagacgagcacgatggcgtaccaggtgaccttcttcgtggacgccgagttcggcacgccgggcgccgtcgtcgtcaagaacgggctgaggaacgaccagttcttcctccgccacgtgcagctgaacctgcccgaggacggccggagcgtccacttcgagtgcaactcctgggtctacccctacaagaagaccaacgccgaccgcgtcttcttcatcaacacgagctacctgcccgacaggacgccccaggctctgcgcctgctgcgagacgaggagctgcggagcctccggggcaacggccgcggcgagcgcaaggactgggagcgcgtctacgactacgacctgtacaacgacctgggcgacccggacaaggaggaccgcgcccgcccggcgctcggcggcaccgccacgcacccgtacccgcgccgctgccgcaccggccgccctctcttcaagacagacggcgtgacggagacgcggaagcacctcatcaacctcgacttctacatcccgccggacgagcgcttcagcccgaccaagctggcggaggtgctggcgctggcggtgcaggccgtgacgcacttcgtggtgccagagtccaacgcgctgttccacggcaacgtcaacagcttccgctcgtttgatcagctcaaggacgacctgtacggcaggagaccgccggtcgccgtggatgggcaggtgatggacaagctcaagacgtcggtgccgtcgcacaagacctacaagcaggtgtccaagatggtcaaggagacgcccgtcaagttccccatccctcaagtcatcgagcatgatcaggaggcgtggcgtagcgacgaggagttcgctagggagatgctggcggggctcaacccggtggtgatcagtagactagaggtgttcccgccggtgagcagaggagggaagaagagctccattacggaagcgcacatcgagagccagctccaaggacgaactgtgcaaaaggcactagatgacaagaggctgtatcttcttgaccaccatgactacctgatgccatacctgcggcgcatcaacacgcaacaaggggtgtgcgtctacgcgtcgcgcacgctgctcttcctcagggacgacggcgccctcaagcctcttgccatagagctcagcctgcccggtgacggcgccgaggtcagcagcagggtcatcctccctgcgaccccagggacgaccgatggacacctgtggtggcttgctaaggctcatgtctccgtcaatgattcaggctaccatcagctcatcagccactggctgttcacgcacgcgacggtggagccgttcatcatcgccaccaagaggcagatgagcgccatgcacccgatccacaagctgctggagccgcacttcaaggacaacatgcagatcaacacgctggccaggagcatcctgctgagcgcgggcggcatcctggagaggaccatgtacccggggaagtacgccatggagatgtcctcggccatctactccgagtggaggttcacggagcagtccctgcccaacgagctcgtcaagaggggcatggcgtccaagatgggcggcggcgccatcgccctgcacgtggaggactacccgtacgcggtggacggcatggacgtgtggcgcgccatcgagggctgggtcaggacctactgcgcccacttctaccactccgacgccgcggtggccgccgacgcggagctgcaggcgtggtgggacgacgtccgccgcgtcggccacggcgaccgccagcgcgacccggcgtgctggctggacctcgactccgtggccaacctcgccgagtcgctgtccacgctcatctggatcgcctccgcgctgcacgccgccgtcaacttcggccagtacggctacgccgggtacatgcccaaccgccccacccggtgccgccgcttcgtgccgctgccggactccccggagatggcgcagctggaggccgacccggacaggttcttcctcgacacggtgcccgaccgcttcaccgccacgctcgggctcacgctcatcgaggtgctctccaaccacacctccgacgagctctacctgggccagcgcgccaccgcggcgtggaccgacgatggggaggtgctgcagctgctcgacaggttccgggaggagctccgccgggtggagaagcggattacggagaggaacagggacccgcgactcaagaaccggaagggacccgccaaggtgccgtacacgctgctgttcccggacgtcggcggcaaggagaaggggatcaccggcaaagggatacccaacagcgtctccatatgacaattgacaagctcgctccttttttttttattgttttgttgcagaggatctgattatggttgtcggtttaatttcgttgtgagcatcattgtgttaatatgttttattgcgatgattggtttggaatttaaataaaaagaaaaagaaaaaatatgaaaaa

SEQ ID NO: 111278 - DNA, 1436 bp, Zea Mays
tatatttataggcgtacagaaaagcatattccaaagaatattctaaatatataaaataaattagaggaatattccaatatttcttaatgcatccatatgcatatgcgtattaggctgttcacgcacgcgacggtggagccgttcatcatcgccaccaagaggcagatgagcgccatgcacccgatccacaagctgctggagccgcacttcaaggacaacatgcagatcaacacgctggccaggagcatcctgctgagcgcgggcggcatcctggagaggaccatgtacccggggaagtacgccatggagatgtcctcggccatctactccgagtggaggttcacggagcagtccctgcccaacgagctcgtcaagaggggcatggcgtccaagatgggcggcggcgccatcgccctgcacgtggaggactacccgtacgcggtggacggcatggacgtgtggcgcgccatcgagggctgggtcaggacctactgcgcccacttctaccactccgacgccgcggtggccgccgacgcggagctgcaggcgtggtgggacgacgtccgccgcgtcggccacggcgaccgccagcgcgacccggcgtgctggctggacctcgactccgtggccaacctcgccgagtcgctgtccacgctcatctggatcgcctccgcgctgcacgccgccgtcaacttcggccagtacggctacgccgggtacatgcccaaccgccccacccggtgccgccgcttcgtgccgctgccggactccccggagatggcgcagctggaggccgacccggacaggttcttcctcgacacggtgcccgaccgcttcaccgccacgctcgggctcacgctcatcgaggtgctctccaaccacacctccgacgagctctacctgggccagcgcgccaccgcggcgtggaccgacgatggggaggtgctgcagctgctcgacaggttccgggaggagctccgccgggtggagaagcggattacggagaggaacagggacccgcgactcaagaaccggaagggacccgccaaggtgccgtacacgctgctgttcccggacgtcggcggcaaggagaaggggatcaccggcaaagggatacccaacagcgtctccatatgacaattgacaagctcgctccttttttttttattgttttgttgcagaggatctgattatggttgtcggtttaatttcgttgtgagcatcattgtgttaatatgttttattgcgatgattggtttggaatttaaatctgttgaaagggtctaataacatttttcttttctttttttaaagaaaatccattacatgaatatgtcactctttaccagaagcgctcgttcgaatgacttcaaataaagggatttgacctgtttgtaccaaatcaaattaatgaactgctaagaactgtctaccgg

SEQ ID NO: 111279 - DNA, 2239 bp, Zea Mays
atatttaattatttattgctgcgaacatatgggatgccagagtcgcagcaaaccacggttcggcgcctcggcggcgtccaattccccttcccgtcgccgatgccgatgccgatgccacgggcgcggacgcggtggtcggcgctagccgccagcgcgctcatccaatgctgcgcggggagctcctactgcttcggcgtctactctcagacgctcaaggcctcgcagcgctacgaccagttcgcgctcgacgccgtcgccttcttcaaggacgtcggcgccaacgccggggtcctctcgggcttcctcgtcgcttgggcgccggggggccgcaggcgcccctggattgtcctcctcgccggctccctgctctgcgccgcgggctacctccccatgtggctagccgtcgcgggggtcgcgcccgcgccgctcccgctcgtctgcctctacatgctgctcgccgcgcaggcgcagaccttcttcaacaccgccgatgttgtctccgccgtcgagaacttccccgaccgacgaggcactgtcatcggcatcatgaagggttttctaggcctaagtggggcaatacttgtccaaatttaccgcactcttggcattgatcccagctctttcatactgatgctggcagttttacccacggccgtcaccttggcgctcatgtattttgtggatgtccacaatccacatgaacggtatgagaagaaattcctagacgctttctccctcattgctgttactgttgctggatacttgatgattctcataatctatggtcaagttttcccaataagctcagctgtgcagagcgtttgtttcgtggtactcctgctactagtgatgtctccaatagctgtggctgcaaaggcccagacgccagaatcaatagctcatcaaggatcaatctcagaacaaagggctggactgctccgcgaagaggtcacagaggattctgaaaatgctagctcaagcactactgcgcttgggggatctaaccaagacctgtcttcaggcaaagaaaacctgaacgtattacaggccatgtgcaagctcaacttctggttgctcttcctggcaatggcttgcggaatgggatcaggtctggccacggtgaacaatatcagccagatcggcggctcccttggctacacgaccaaggagaccagcacactcgtgtctctatggagcatatggaacttttcagggcggtttggtgcaggcttcatatccgaccatttccttcgcctgcgaggagttggcaggccattctttataagcatcacgctgctggtcatgagcgtcggccatgccatcatctcctccggtctccctgcgtcgctctacattgggtcggtgctcatcggcatgtgctatgggtgtcagtgggccctgatgccaagcataacatctgagatctttgggctgagccatttcggcaccatattcaacatggtggctgttgcaagccctgttgggtcctacatcctctcggtgcgcatcgtgggctacatatacgatattgaatcgccaccggacgagcactcttgtgtaggtaagcaatgctttgcactctctttcatgatcatggccggtgtctgtatgtttgggtccgctgtggcatttgtgttgtttatcagaacaaggacgttctataggcgtgtcgtatatgcaaggttacaatcttttctagacaagtaacaagtctttatgtaagatggctatataacttggaataatgtttgtacatgtatattatgtcagtgtttctataatttcgaggtataaagattattacatggatggagcatgatattcaactcatggcctgaacaaatatatacctttttatatactgtttttagcttatatatatggacatcgagattaagatgaagtgtcacagttgtttcctgccttactgtgttattggagagagtgatacattatacatgtgctcctctggaccactcgtctcctagtgcatataagacactgcattattcagccatctttctctatcacttcactaataaacaagctcattatgtacttgtcaccttccttggatggacccatcttcattgctcatctttctgttcgtcttctgctctgttttcttcttttttcctttttttttttgccgctgccgctgcctcgtttttctctttggcctcctttgcctgcgctgccgctttcgcatgggcatctgcttcttccttagcctcagcca

SEQ ID NO: 111280 - DNA, 2243 bp, Zea Mays
atatttaattatttattgctgcgaacatatgggatgccagagtcgcagcaaaccacggttcggcgcctcggcggcgtccaattccccttcccgtcgccgatgccgatgccgatgccacgggcgcggacgcggtggtcggcgctagccgccagcgcgctcatccaatgctgcgcggggagctcctactgcttcggcgtctactctcagacgctcaaggcctcgcagcgctacgaccagttcgcgctcgacgccgtcgccttcttcaaggacgtcggcgccaacgccggggtcctctcgggcttcctcgtcgcttgggcgccggggggccgcaggcgcccctggattgtcctcctcgccggctccctgctctgcgccgcgggctacctccccatgtggctagccgtcgcgggggtcgcgcccgcgccgctcccgctcgtctgcctctacatgctgctcgccgcgcaggcgcagaccttcttcaacaccgccgatgttgtctccgccgtcgagaacttccccgaccgacgaggcactgtcatcggcatcatgaaggcagggttttctaggcctaagtggggcaatacttgtccaaatttaccgcactcttggcattgatcccagctctttcatactgatgctggcagttttacccacggccgtcaccttggcgctcatgtattttgtggatgtccacaatccacatgaacggtatgagaagaaattcctagacgctttctccctcattgctgttactgttgctggatacttgatgattctcataatctatggtcaagttttcccaataagctcagctgtgcagagcgtttgtttcgtggtactcctgctactagtgatgtctccaatagctgtggctgcaaaggcccagacgccagaatcaatagctcatcaaggatcaatctcagaacaaagggctggactgctccgcgaagaggtcacagaggattctgaaaatgctagctcaagcactactgcgcttgggggatctaaccaagacctgtcttcaggcaaagaaaacctgaacgtattacaggccatgtgcaagctcaacttctggttgctcttcctggcaatggcttgcggaatgggatcaggtctggccacggtgaacaatatcagccagatcggcggctcccttggctacacgaccaaggagaccagcacactcgtgtctctatggagcatatggaacttttcagggcggtttggtgcaggcttcatatccgaccatttccttcgcctgcgaggagttggcaggccattctttataagcatcacgctgctggtcatgagcgtcggccatgccatcatctcctccggtctccctgcgtcgctctacattgggtcggtgctcatcggcatgtgctatgggtgtcagtgggccctgatgccaagcataacatctgagatctttgggctgagccatttcggcaccatattcaacatggtggctgttgcaagccctgttgggtcctacatcctctcggtgcgcatcgtgggctacatatacgatattgaatcgccaccggacgagcactcttgtgtaggtaagcaatgctttgcactctctttcatgatcatggccggtgtctgtatgtttgggtccgctgtggcatttgtgttgtttatcagaacaaggacgttctataggcgtgtcgtatatgcaaggttacaatcttttctagacaagtaacaagtctttatgtaagatggctatataacttggaataatgtttgtacatgtatattatgtcagtgtttctataatttcgaggtataaagattattacatggatggagcatgatattcaactcatggcctgaacaaatatatacctttttatatactgtttttagcttatatatatggacatcgagattaagatgaagtgtcacagttgtttcctgccttactgtgttattggagagagtgatacattatacatgtgctcctctggaccactcgtctcctagtgcatataagacactgcattattcagccatctttctctatcacttcactaataaacaagctcattatgtacttgtcaccttccttggatggacccatcttcattgctcatctttctgttcgtcttctgctctgttttcttcttttttcctttttttttttgccgctgccgctgcctcgtttttctctttggcctcctttgcctgcgctgccgctttcgcatgggcatctgcttcttccttagcctcagcca

SEQ ID NO: 111281 - DNA, 230 bp, Zea Mays
ctcacgtacggttcctttgagaagggtgtgataccaccacctatcaggcccgacgagcggtccacggagctgcatccctactcacccggtctatgcacatcgctctttccaggaggttggccacctatcctagatcttcccatttccaagaagatcccttgttcgatctggtttagtatcaaggttcttcttttctgtttctagcaatatatatatggctggaatcctct

SEQ ID NO: 111282 - DNA, 2462 bp, Zea Mays
tcgtctcgtgcatatccagttccgatcccactctaccttctacgcagtgtggacgccagaccccgtcactgtcagtcgtcctcttccactctagtattaccggtagatcgacaaagatttcagcctccgttttcgacgccatcagagcaggctccacagatgaagatgctgcggcggctcatgctgagcctgagcttcatcctcctcctcccttcctatctcgcctacccactatgcaccgatgcaagggcgccggtgctgctcaacaccacgctcaagttttgcgcctcccccagcaggaacagcagaggctgctgcgacgccaccgctgatgccgcgctcagcaagcagttcgacgccatggccatctccgacgctgcctgcgctgccgtcgtcaagtcaatcctctgcgctaaatgcagtccatattccgcggacctgttcggcgcggggccaaagatccggacggttccttccctctgcaactccacgtcgtcggcaaactctgctgagtccaaggaaaccaccaccaccaccactcaggactactgcaaactcgtctgggatacttgcaaggacgtgagcatcgccagctctcccttccaacccccgctgcaaggcaccgcgccgcctcctacttcaccgtcgaagctcaccgacgcgtggcagtcccagagcgacttctgcggctccttcggcggccggtcgtctgtatgcctcagcggcgacacggtctcgttcaacgccgccggaccttcaccctccccaagaccagaaccaagaggggtatgcctggagaggatcgacaacgggtcctaccttagcctggctcctcaccccgacggctccagcaggatcttcctcggcagccaagccgggaagatatggctggccaccgtccccgagcaagggtccgggggcgcgctgcagttcgagggcgcaggcccatttgtcgacctgaccgaccaggtgcacttcgactcggcgttggggctcatgggcatggcgttccacccgggtttcgcgaccaacggccgcttcttcgcctcgtacaactgtgaccggaccaagtcgcccagctgcaccgggaggtgctcctgcaactccgacgtgggctgcgacccttccaagcttggcaccgacagcggcgcccagccgtgccagtaccaggtcgtggtgtcagagtactcagccagaggctccgccgcggcgaatgtttctcaggcaacttctgccgccgatccatctgaggtgaggagaatcttcgcgatggggctgccttacacgtccgggcatggaggccaggtactgttcggccctgccgatgggtacctctacctcatgctgggcgacggagggaagggggaccctttcaacttcgcccagaacaagaagtcgctcctgggcaagatcgtgaggcttgatgtcgacagcacgccttcttcatcaggaggagatctcggcaacacgagtctgtggggcaattactccatcccgaaggacaacccttacgccgatgacagcgagctagagccagagatctgggcgctgggccttagaaacccgtggaggtgcagctttgactccgagaggccctcctacttctactgtggagatgttgggcaggacgcgtacgaggaggtggatctcatctccaaaggcgggaactatggatggcgtgcgctggagggtccgctcgtctatcacccgcagtgggcgcctggaggaaacacctcgctcagctccattgacgccattcctcccatcatgggatacagccattcagatgtcaacaagaatatcgggtcggcgtcgatcatgggaggttacgtgtacagagggtccgctgatccctgcctgtatggaaggtatttgtatgctgacctgtacgcctcggccatgtggaccggcgcggaggctccagagagcagtggcaactacacctccgctctgatccccttcagctgctccaaggagtctccgataccatgcgacgccgctgctgggagccctctcccgtcgcttggctacgtatactcgttcggcgaggacaacagcaaggacatgtatgtgttggccagcaaaggcgtctaccgagttgtgaggcccagcctctgcagctatacttgcccggcagagagacaggagacatcgccgcctgctgctccttcatccaacaaggcgtccatggcggagatgggaatgggaatgcttttggtgtctgtcattgtggtttgggttttggtaacataggatcatgctgtgatgagacatgtcatatgcaacgaccagtcctgaggaagaataagagtgccagtcagtcagtgagattagaatagaagtgataggcagtcagttaggctgtctccaataaattgtgtatatgatcatgtaaaatattattttatattatagactgtattgttcacagaacgaagtttgaaatacttctgagatgggtc

SEQ ID NO: 111283 - DNA, 164 bp, Zea Mays
cttttcatagcaaaacaagttggaattggatgcaatgctttgaccagcctgcaatacgtccatcactttgttgtctgcaaacaactccttgagaatataaccagcaataaaatcagtttgatggtatctacaaagtagaaaagaaaaatagacctaaacttcag

SEQ ID NO: 111284 - DNA, 2529 bp, Zea Mays
atggactgctccatgacgagcagcatcctgtcggccaactacaacacgatcctgttcgagttcggcgtcatcctgctgagcagcaaggtcctgtatgcgctgctccgcaaagtttaccagccgcgcgtcttctccgacctgctgctcggcatcatccttgcccagttccgtgtgctctccctcaccaacgccatcaacctcgtcttcggcaagatcggcggcttcgtcttcgcgccctacctctttgcgctcggggtcgagatggaccccaccacgctcctcgacgcccccaccggcgactccgtcgtcgcttacgccggaatcctctccacctgcgtgctcgtcacgctcttccacatgccgctcatgcaggccacctccggcgtcgtccacgagcggtccctccgctccttcctcggcctggccgccgtgctcgccaacaccgcctcgcccgtcctcacccgcctaaccaccgatctcaagatcgccaagaccgccgtgggccgcctcgccgtgggcgccggcctcgcctccgacatgctcaccaccatgctcatcgcagtcggcagcatgatctggcgcgacaccggcgtggacggacgcgagtccgacgactcccccatcgtgcagccggtgctcacggccgcggtcctcgtcgtcgtcatcgtgtccgccttcgtgtccagggccatggccgagtgggtgggtgcgcgaaacccggagggccgccgcatgcgaggcttcgacctctccctcgtggcgctcgccgccgccgcgctctgctggctcagctccgcgctgcgcctgaacgtcaacatggcggcgttcctggtggggctggcgttccccagcgagggcagggtgtcgaggctgctggtgagcaagaccaacttcgtgctcagctccttcgtgctgccgctctacgtcgcccacgtctgcctctcgctgcgccagaccacggacgacatcgaggtggcggggctcacgcgggacgaaggtttccgggcctacgtcatggagctgcctttcccgtggtggaaggtcttcttcgtcactgtcatgggaacgctcgggaagctcacggggtgcgcggcggcagggctcctccgaggcctggggtggctggaggcgctggcgctggggatgctgctcaacgtcaagggctacttccacctctactgcgcgcaggcggcgttcgacgccggcatcattacggacaagtctttcatggccattatcttcatggtggccctcaacgtggcggtgacacccatggtcggggtgggcatcgcgtcgtgggcgcggcggagtgtgcagtggcggctcatggggctgcagcaccacgacccgtccacggagctgcgcctcgtggtggggttgcacggcccgcaggacgtgccgacgctggcctacctgatggaggcgctgcgctggggcggcggcgccgggggaggcggcgagctcgccgtgtacgccgtggacatggtgcagatgacggaccagacggcggcggccatcgtgaagggcggcggcttcgacggcgttaccgtggtggacgaagaggtgtcggagatgcgtaagctcatcggcgaggcgctggacgcgtaccaggcggagtgcggcggcggcgccaaggtgaaggtgcggcggctgctggctctgtcgtcgttcccggacatgcacagcgacatctgcatctgcgcggaggacgcgatggcagcgctggtgctgctcccgttccacaaggcgcagcgggcggatggcaccatggaaccgggccactacggcttccgggtcgtcaaccagaaggtgctgcagctggcgccgtgctcggtgggcgtggtggtggaccgaggcctcgggaagcacgccgccgccgtcagcagcggctcccagacacagacggcggcggccgttgtggtggtgttcatcggaggcgcggacgaccgcgaggccctgacgctggcgtccctgatgtacaagcacccgggcgtgcgtctgacggcgctgcgcgtggtgcagaacgcgacggcgcaggcgcgcgctaaggcacggacgagcctgttcgagagcaagggcagccggcgcggcggcggcggcggcggcggcggcagtggcatcggcatcggcgccccggcgtcgtcggcgctggggcaggaggaggcgcagatgcaggtggacgacaagttcttcgcggagttctaccggaagcacgtggccgggagcaggcagcagggcgccacggccatcgggtacctggagaagcacgtggcggacggggccgagctggtggcggtgctccggggcatgcaggcggactaccggctcttcatcgtggggcgcggcagggaccgcagctccgtgctgacggaggggctggatgagtgggccgagtgcctggagctcggccccgtcggcgacatcctcgcctcctccgacttctccaccaccgcctccgtcctcatcgtgcagcagtacgacgccaagaagcactacaaggtcatcgacgaggagttcatgcccttgtag

SEQ ID NO: 111285 - DNA, 986 bp, Zea Mays
tctaatttgatggcccctgcattaatgtttcaatttgctattaggcgcgcacacacgttagcttttacctttcactaaccaattagcctaagaatttgtactgtgtgtagcagtgtacaacttttgtactgttggactcgtatttgataatgcttttggtattatttgctggtcaggagccacgcaatttgagagggactaacggccagtgtgtggccttagaaattgcatgggttaaaccaccctacattttgaagcgccaagtcatttttaaagtgaaactattacattattgtgcattcaaggattacacaaaataaaatatatgtacaataaattgttttgtgtgtttcttagtggtcctacatatatagcattttatgaccatatgtcacttctataaagaaaaaaaataagacaagcttaatattaattctttgactagctatatattaccgtttttacattacatgcatgtggcagggaggagattcagcgcatcaaagctgcgaagccagatatccctcacagggaggccttcagcatggctgccaagaattgggcaaagtgtgacccgcgctgctcgacggctgcctctaccgaaacttctaacagcgctcctgctgagcctagagttgtgcccactccccagttaactgagccacgctttgacctggaggatagggccaaggggcaagtcattgagagcttcgacatcttcaagcatattgagcgcagcatctagaggtcgttcgatgccgctgttgtagcccagtatcgatcgagtaccatcagctatatgtataacctatcccgtatcgccgtcgtcgcctcgcaatcatgcatccccatcctgtacttttacccccgtacgtgttactgttgctgttattctcgttatggttggattgtacgcaccatttaattatgaacagctgctacctatatatataatatttgccttcttttttgttcctaatatatgc

SEQ ID NO: 111286 - DNA, 96 bp, Zea Mays
gtccaacactatttttaatactccccattctaaaatagtattcgctttagctctcaatttttatgtctatatccaaatagatgatgataaatctaa

SEQ ID NO: 111287 - DNA, 477 bp, Zea Mays
atgtcgacgaactgcttcctgttgtgtataaaccaacagtgggggaagattgctagaagtatgggtcaatcttcagacgactacaaggtttatacatccacctcaaggagaaggcatgggaattccttgggaaagcttgcactatatactgctattgaaggtgtacaaacatccactgttgaattcacctccttttttggtcctaggattaaggtagaaattggttatcctgattatgtgcttaaagagggtgaaggaggcacaattgtgtttggcatgtcatccctcctcatattttcacctcaagaacttgactatctaatatgtggccaacaagaaatttgggagttggaggagctaagaaatgatattgttgacctaaaagagatgtacagagatcaggtggatcttcttgttacccaggatccagaccgagtcacaattgagaggtctactaggatcttgtttcatacttga

SEQ ID NO: 111288 - DNA, 3178 bp, Zea Mays
gagataatataactccacctccatccactctaggtctctagctctactcctctccccgagtcctctcctctccggggtattgaattcgaaccaaaaaatcaaaacaactcagcgattcgattcgcggcgagtcaagcgggatgccgccgcgcacggctccggcggcgacctcaaccccgccgcggaaggtgcccctccggaagctgctgcgtgcggcgtcggtcgcctgcggggtgcagttcggctgggcgctgcagctgtcgttgctgaccccgtacgtgcaggagctgggcatcccgcacgcctttgccagtctcgtctggctgtgcggtccgctgtccggcctcctcgtccagcccctcgtcggccacctctccgaccgcatcggccccgccgcttcgccgctcgggcgccgcaggcccttcatcgccgccggcgccgcgtgcatcgccgcagccgtgctcaccgtcggcttctccgctgacctcggccgactcttcggcgacgacgtcaccccgggctcaacgcgcctcggcgccatctgcgtctaccttgtaggattctggctgctcgacgtgggcaacaacggcacgcaggggccctgcagggcgttcctcgccgacctcacagagaatgacccaaggaggactcggatcgctaatgcatacttttcactcttcatggccctgggaaacatacttggatatgccaccggagcatacagtggatggtattcgatatttcctttcactgttacagagtcctgcggcatcagttgtgccaaccttaagtctgcctttcttcttgacattattgttctggtcatcacaacgtacactactgtaacatccgtgcaagaacctcaaacttttggaagtgatgaagcacaaaatccaggtgctgaacaggaagctttcctctgggaactttttgggtcattaagatacttcaccctaccaatttggatggtcttaattgtcactgcccttacttggatggcatggtttccttttaccctctttgatactgattggatgggccgagaaatctatcgaggaagcccagacaacccaggagagacccaaaggtaccatgatggtgtgagaatgggttcttttggtctaatgctcaactctgtcgtccttggattcacctctgttgtgctagaaaagttatgtaggaagtggggagctggacttgtatggggtgtctccaatattctaatgactttgtgcttcttggcaatgcttgtaataacatatgttgcaaagaacatggattatccatccagtggtgcacctccgactggcattgtcgttgcttctttggtggtttttacaattttaggggcacccctggcgatcacatacagtataccatatgcaatggctgctagtcgtgttgaaaatctcggtcttggccaaggcctagcaatgggtattctcaatttagctattgtcataccacaggttattgtgtcacttggcagtggcccatgggatcagctgtttggcggtggaaatgcacccgcttttgcggtggcagccggtgcatctttcatcggtgggctggtggctattctggggcttcctcgggcacgcattgcatcctcgtcctccaggaggagaggcgggacacaccgataagtctgctcatttaccattacaggcatcatcaagtctggaaactctttgtgggttggagaagagcacgctgggagctcttgaatgctgtgtgctctttggtggtttgccccgttgagctattttttgcgttgtctccaaatcttttgttgttcaattcaactcgaatgtatgtacgcacgtatgcatgtatgtatttgtatgtatgtggatcatttgtagagagcttaagcaatgaataaaagttacaggagttacgttcaatgagcttaatcactattctgggtgtggcttcttatatatatgtgtgcacttatataaactccgaaaatgctatgattgtggctggggatggatgcccccattgcccagtgcccaccatctatgaatctatgatgtccagtccagctgcagttggagcggcacgccgggcgtggggtggaggacctgcgcctcgggaagcgcctccgatagcagggcctggaaggactgcgtcgtcccctgtttggtgagcacggttgccaggagtccgccggcgtccacgtcgccgttgctcatgggtaccacgtacctggctcgcagcagcctggccaggtccaccgcgtcctcctggccggagacgagggtgaagttggccgggaggagctgcttcaccaccggcgtgatgacgatgtccgcccgcagctgcttctcctccaggaaggacctgtcgtacacgcagtgcggctcgtagtagaggaggccggggccgctctcctcacctgtggccatgaggatgtagccgttctcggggcgctgccacgggggccccaggacggggcctgcggtggccagcacccggacctgctggttgacggcggtggactggccgggctcgatgtaggtgacacggcggaagggcgtgggcagggattcgagcactggctgcgcgttgggggtggtcaccaccggcaggtcaggcgccctggccgacagctgcgtcagcgtccggacgtggcagtgatcgtccaggctctgcgtgatgagcagcacgtccggcctcgcctccggcgccagcagcaggtcgtccaccccgagggccttcaccttgggattcttcttggcgccgtcgaacagccagggcgcgccgaagtcgaggttgccgacaaggactgggtccaccaggatgcgcacgggggcttggccttgctgctgcacctcccacacccagctgttgatctccaggtacgtcagcttcagcgtcacctgctgctgcctgctctcgcggatggcggtgctggaggattgcggttgctggggccgtcgggacgaggatgatcttgggtgatctggacgccgtctcaaaatcagatgatctgatgagggacgacgacggcaaggagaagcagcagcgggtgggcggaagaccagctgcaggcggacggtcgtggccatcggtggtgcggtgcgccgggaactggagagtgggggtgggtttaggagcagaggtgtgtggtggacaggacagtggactccactctgctccgtcaattccc

SEQ ID NO: 111289 - DNA, 179 bp, Zea Mays
gccatcgtgctgctagttttatttgcaggttttggaaacatccccgtacagggaggtgctgccgaatttttttgttgatagacttgagttatttttttgcaaatgtcttacatgttatattaaactatagtcggttatatatgttagaggatggatgactgtgagtggatgtacacagg

SEQ ID NO: 111290 - DNA, 1725 bp, Zea Mays
aatctaaaatatttcgttcatgacactggccattggatcgtcttacaaagtctaaggaagcagcgcgggcgtgaagcggaaaggacggttcagatggcactggcaaaagcttccttggtggatgatctgcaaaacaaaaaccaagagttgatgaaacagattgagatatgccaggaagagaacaaaatcttggatagaatgcaccgccagaaagttgctgaggttgaaaagctcacgcagactgtcagagagctagaagaatctgttcttgctggtggtgcagccgcaaatgctgtcagagactaccagcggaaagttcaggagatgaatgaggaaatgaaaactcttgatcgtgagctagctcgtgcaaaggtttcagcaaatagggttgcagtagtggtggcaaatgagtggaaagatggcgatgataaagtaatgcctgttaaacgatggctcgaggagcgaaggattctgcaaggagaaatgcagcaactccgggacaaacttgctattgcagaaagggctgcaagatcagaagctcaactgaaagagaagttccagctacgacttaaggtactcgaggaaggattgagaatgtctacatcgagaaccaatgtcagtggcacacgccgccagtctattggtggtgctgatggtttgtctaaggccaacggcttcctgtcaaaacgcccatcattccagatgagatcaccagtgtctaccacaacgactctagtgaaccatgcaaaaggagcgtccaagtcgtttgacggaggctgtagatcacttgaacgctataagggccatgtaaacgggaatggtatgaacgtatctaccgattccagtgaagataaagattcaaacaactcagatgagaagtgtaacgagtttgcatctgctgagtcggaggactcggtgtcaggtgttctatatgatatgttgcaaaaggaggtcatttctctaaggaaggcgtgccacgaaaaggatcagagcctgaaagacaaggacgacgcagttgagatgttggcaaagaaagtagatactttgacaaaagctatggagtcagatgccaagaaatcgaggcgcgagctagctgctatggagaaggagctggcagctgtgcgcttggagaaagagcaggataacagggcaagacgttttggtagttcaagcggttctgccagcagttcgcagctcccacctggcaggtaggagtagttcgctaccttgagttgaagagtctgtagtatgtgattgaccagatttgcgtgcatctttactcaggactttacctaggagcggctcggcgcgcaacatgtgaaggcatgtaggaattgaccgaatatggctttgatgatccttacttggattaggactggtgactgggaaggaacctctcattgtcctggagaagatggcatcagcggaagagcctcttctgcctacatctcgtggtcgcagggatgaactactttgtgtctaacatctccggctagtgttttcttttcttttgttttgacgacgtgtcattcggtggtgattgctgttgtttcttttcttttggcagtttgatgatctttgttggtgctgtataggtttggtgaggcgttgctcctttttcttctttggtttgtttgttcgacatatccgtcggtctggttgtttacgatgtaaaatgtacgcactgaagagttgcttatggtttgcctgatattcccccctgtt

SEQ ID NO: 111291 - DNA, 1795 bp, Zea Mays
aatctaaaatatttcgttcatgacactggccattggatcgtcttacaaagtctaaggaagcagcgcgggcgtgaagcggaaaggacggttcagatggcactggcaaaagcttccttggtggatgatctgcaaaacaaaaaccaagagttgatgaaacagattgagatatgccaggaagagaacaaaatcttggatagaatgcaccgccagaaagttgctgaggttgaaaagctcacgcagactgtcagagagctagaagaatctgttcttgctggtggtgcagccgcaaatgctgtcagagactaccagcggaaagttcaggagatgaatgaggaaatgaaaactcttgatcgtgagctagctcgtgcaaaggtttcagcaaatagggttgcagtagtggtggcaaatgagtggaaagatggcgatgataaagtaatgcctgttaaacgatggctcgaggagcgaaggattctgcaaggagaaatgcagcaactccgggacaaacttgctattgcagaaagggctgcaagatcagaagctcaactgaaagagaagttccagctacgacttaaggtactcgaggaaggattgagaatgtctacatcgagaaccaatgtcagtggcacacgccgccagtctattggtggtgctgatggtttgtctaaggccaacggcttcctgtcaaaacgcccatcattccagatgagatcaccagtgtctaccacaacgactctagtgaaccatgcaaaaggagcgtccaagtcgtttgacggaggctgtagatcacttgaacgctataagggccatgtaaacgggaatggtatgaacgtatctaccgattccagtgaagataaagattcaaacaactcagatgagaagtgtaacgagtttgcatctgctgagtcggaggactcggtgtcaggtgttctatatgatatgttgcaaaaggaggtcatttctctaaggaaggcgtgccacgaaaaggatcagagcctgaaagacaaggacgacgcagttgagatgttggcaaagaaagtagatactttgacaaaagctatggagtcagatgccaagaaatcgaggcgcgagctagctgctatggagaaggagctggcagctgtgcgcttggagaaagagcaggataacagggcaagacgttttggtagttcaagcggttctgccagcagttcgcagctcccacctggcaggactttacctaggagcggctcggcgcgcaacatgtgaaggcatgtaggaattgaccgaatatggctttgatgatccttacttggattaggactggtgactgggaaggaacctctcattgtcctggagaagatggcatcagcggaagagcctcttctgcctacatctcgtggtcgcagggatgaactactttgtgtctaacatctccggctagtgttttcttttcttttgttttgacgacgtgtcattcggtggtgattgctgttgtttcttttcttttggcagtttgatgatctttgttggtgctgtataggtttggtgaggcgttgctcctttttcttctttggtttgtttgttcgacatatccgtcggtctggttgtttacgatgtaaaatgtacgcactgaagagttgcttatggtttgcctgatattcccccctgtttctgtcagtgttgggcaagttgatgataaccagcatgatgaatgactcagctggctgttgtaaccatgtgccgaatgatgaagaaaccgctttgcatatgtctgatgatcaccagatgaatggagttagggcaagttcgaccgctt

SEQ ID NO: 111292 - DNA, 2572 bp, Zea Mays
gcagggcgcatctatccgcatctccgcccccccccacggtggcatcgcctcgcctcgcgtcggatcaatccatcccctcgccctcgccttctgctcttcctcatcgggggcaggcggagccgcagagggaggagccgccggcgctaggaatccccaatccgtatcgctcccccaacgattttgagtatattgctgctgcttctcaagcctattcttattgtagatcgaatcgatcaattcgctgcatcgactgatagtagatagggttcatacgcccattccattgattcgacgatgttccgccgcgactgtgtgggatcgccgccgccatgacccccggctacctccctccaccttcgtatcccgacgtcttgaccaaaccccaaacctgactccgaccccggttccccgctggaagagtataatagccaaaacacaagcggcccgtgcgcaccaaccaccaccggagcaacaggatggccgatagcggcggaatcagcgccgacaacgccgcggccgctaacgacgacgacgacaccaacacggcgcctttccccgacacggtccaggtcggaggatctcccgagtacaaggtcgagaggaagcttggcaaaggtggcttcggccatgtctttcttggccgacgtctgactgccgcccacgccgcacgctccgcggcgtccgctgcccaagaggttgccatcaagtttgagcacactagcagcaagggctgtacctacggccctccagctgaatggcaaatctacaccgctcttggaggcacacacggcgtgcccaaggtgcattataaaggtcgtcagggtgactactatgtcatgattatggatatgctggggcctagtttgtgggattcatggaattcattaggccaatccatgccatcggaaatggtggcttgcattgccatggagtccatttccatcttggaaagcatgcattctaaaggatatgtgcatggagacgtcaaacctgagaactttcttctggggcagccttcaacgcctcatgaaaagaaactttatcttgtggatcttggattagcaacaaagtggagagatactgctaatgggcagcatgttagttatgatcaacgtcctgatgcctttagaggaacagtcagatatgctagtgtccatgcacatttaggaagaaccgctagcaggagagatgatttggagtcacttgcctataggtgataataaatcatttttggtgtgcaagagaaagatgagtacctcacctgaggccctctgcggcatatgtcctcaacctttcaaggagtttcttgaggccgttgtcaacatgaagtttgatgaagagccaaactattccaagttgatttcattgtttgacagtttaattggaccaatcccttccattagaccaatcaatactgatggagcccaaaaggtagggcagaagcgtgccaggttgcttaatgatgacgacgaccatgtaaaaaagaagattcggctgggtgctcctgcaacacagtggatttcagtatacaattcaaggcaacctatgaagcagaggtaccactataatgtggctgatgcaaggttagcgcaacatgtggagaaaggaaatgaggatggtttgttgataagttcaatatcatcatgcgcaaatctttgggcaatcattatggatgcaggaactggcttctcagctcaagtttatgagctatcttcacactttcttcataaggagtggatcatggaacaatgggataaaagtttctacatcagttctgttgctggctccaacaatggaagttctattgtagtgatgtcaaaaggcacaccatatacacagcaatcttataaagtcagtgattcctttccatttaagtggataaacaagaaatggaaagaaggttttcatgtgactgcaatggcaacatcaggcaatcgatgggctatagtcatgtcccgcagtgctggattttctgagcaggttgtggagttggacttcttgtacccgagcgagggcatccatagacgctgggacaatggcttccgtattactgcaatggctgccacgatggatcagtctgcgctgatcctaagcaagccaaggcgtcgcccaagagacgagacacaagagactctgcggactacacagtttcccagtcaacatgtcaaggacaagtgggccaagaatctctaccttgctgggatatgctatgggcgaaccgtggcctaacatcgtccgttgctgacctagctgttgtttgatgtatattttgagttttttatcagctgctaccagcatgagccacaaggcatttgccttgtcgtaacccatggaaattggaaaggggatgaattccgatgtatgtgcccgaacttgattctagggttggtctcgtaagttaatcgggaaaggcgggtgcagacactactgatgagccgtaacgtacccgtcagatcccccagatacaataaaacgagtctgtaatgtggcttttgcatcgtattttctgcatcgtgttaaggagaattctgtttttttattcagtgaattgtgaagagtggaaaatatagag

SEQ ID NO: 111293 - DNA, 2651 bp, Zea Mays
gcagggcgcatctatccgcatctccgcccccccccacggtggcatcgcctcgcctcgcgtcggatcaatccatcccctcgccctcgccttctgctcttcctcatcgggggcaggcggagccgcagagggaggagccgccggcgctaggaatccccaatccgtatcgctcccccaacgattttgagtatattgctgctgcttctcaagcctattcttattgtagatcgaatcgatcaattcgctgcatcgactgatagtagatagggttcatacgcccattccattgattcgacgatgttccgccgcgactgtgtgggatcgccgccgccatgacccccggctacctccctccaccttcgtatcccgacgtcttgaccaaaccccaaacctgactccgaccccggttccccgctggaagagtataatagccaaaacacaagcggcccgtgcgcaccaaccaccaccggagcaacaggatggccgatagcggcggaatcagcgccgacaacgccgcggccgctaacgacgacgacgacaccaacacggcgcctttccccgacacggtccaggtcggaggatctcccgagtacaaggtcgagaggaagcttggcaaaggtggcttcggccatgtctttcttggccgacgtctgactgccgcccacgccgcacgctccgcggcgtccgctgcccaagaggttgccatcaagtttgagcacactagcagcaagggctgtacctacggccctccagctgaatggcaaatctacaccgctcttggaggcacacacggcgtgcccaaggtgcattataaaggtcgtcagggtgactactatgtcatgattatggatatgctggggcctagtttgtgggattcatggaattcattaggccaatccatgccatcggaaatggtggcttgcattgccatggagtccatttccatcttggaaagcatgcattctaaaggatatgtgcatggagacgtcaaacctgagaactttcttctggggcagccttcaacgcctcatgaaaagaaactttatcttgtggatcttggattagcaacaaagtggagagatactgctaatgggcagcatgttagttatgatcaacgtcctgatgcctttagaggaacagtcagatatgctagtgtccatgcacatttaggaagaaccgctagcaggagagatgatttggagtcacttgcctatacactagtattccttcaccggggcaggttgccatggcagggatatcagggtgataataaatcatttttggtgtgcaagagaaagatgagtacctcacctgaggccctctgcggcatatgtcctcaacctttcaaggagtttcttgaggccgttgtcaacatgaagtttgatgaagagccaaactattccaagttgatttcattgtttgacagtttaattggaccaatcccttccattagaccaatcaatactgatggagcccaaaaggtagggcagaagcgtgccaggttgcttaatgatgacgacgaccatgtaaaaaagaagattcggctgggtgctcctgcaacacagtggatttcagtatacaattcaaggcaacctatgaagcagaggtaccactataatgtggctgatgcaaggttagcgcaacatgtggagaaaggaaatgaggatggtttgttgataagttcaatatcatcatgcgcaaatctttgggcaatcattatggatgcaggaactggcttctcagctcaagtttatgagctatcttcacactttcttcataaggagtggatcatggaacaatgggataaaagtttctacatcagttctgttgctggctccaacaatggaagttctattgtagtgatgtcaaaaggcacaccatatacacagcaatcttataaagtcagtgattcctttccatttaagtggataaacaagaaatggaaagaaggttttcatgtgactgcaatggcaacatcaggcaatcgatgggctatagtcatgtcccgcagtgctggattttctgagcaggttgtggagttggacttcttgtacccgagcgagggcatccatagacgctgggacaatggcttccgtattactgcaatggctgccacgatggatcagtctgcgctgatcctaagcaagccaaggcgtcgcccaagagacgagacacaagagactctgcggactacacagtttcccagtcaacatgtcaaggacaagtgggccaagaatctctaccttgctgggatatgctatgggcgaaccgtggcctaacatcgtccgttgctgacctagctgttgtttgatgtatattttgagttttttatcagctgctaccagcatgagccacaaggcatttgccttgtcgtaacccatggaaattggaaaggggatgaattccgatgtatgtgcccgaacttgattctagggttggtctcgtaagttaatcgggaaaggcgggtgcagacactactgatgagccgtaacgtacccgtcagatcccccagatacaataaaacgagtctgtaatgtggcttttgcatcgtattttctgcatcgtgttaaggagaattctgtttttttattcagtgaattgtgaagagtggaaaatatagagcaacaaatagtaagttaaatagtatttcagct

SEQ ID NO: 111294 - DNA, 2317 bp, Zea Mays
gcgcatctatccgcatctccgcccccccccacggtggcatcgcctcgcctcgcgtcggatcaatccatcccctcgccctcgccttctgctcttcctcatcgggggcaggcggagccgcagagggaggagccgccggcgctaggaatccccaatccccaccaccggagcaacaggatggccgatagcggcggaatcagcgccgacaacgccgcggccgctaacgacgacgacgacaccaacacggcgcctttccccgacacggtccaggtcggaggatctcccgagtacaaggtcgagaggaagcttggcaaaggtggcttcggccatgtctttcttggccgacgtctgactgccgcccacgccgcacgctccgcggcgtccgctgcccaagaggttgccatcaagtttgagcacactagcagcaagggctgtacctacggccctccagctgaatggcaaatctacaccgctcttggaggcacacacggcgtgcccaaggtgcattataaaggtcgtcagggtgactactatgtcatgattatggatatgctggggcctagtttgtgggattcatggaattcattaggccaatccatgccatcggaaatggtggcttgcattgccatggagtccatttccatcttggaaagcatgcattctaaaggatatgtgcatggagacgtcaaacctgagaactttcttctggggcagccttcaacgcctcatgaaaagaaactttatcttgtggatcttggattagcaacaaagtggagagatactgctaatgggcagcatgttagttatgatcaacgtcctgatgcctttagaggaacagtcagatatgctagtgtccatgcacatttaggaagaaccgctagcaggagagatgatttggagtcacttgcctatacactagtattccttcaccggggcaggttgccatggcagggatatcagggtgataataaatcatttttggtgtgcaagagaaagatgagtacctcacctgaggccctctgcggcatatgtcctcaacctttcaaggagtttcttgaggccgttgtcaacatgaagtttgatgaagagccaaactattccaagttgatttcattgtttgacagtttaattggaccaatcccttccattagaccaatcaatactgatggagcccaaaaggtagggcagaagcgtgccaggttgcttaatgatgacgacgaccatgtaaaaaagaagattcggctgggtgctcctgcaacacagtggatttcagtatacaattcaaggcaacctatgaagcagaggtaccactataatgtggctgatgcaaggttagcgcaacatgtggagaaaggaaatgaggatggtttgttgataagttcaatatcatcatgcgcaaatctttgggcaatcattatggatgcaggaactggcttctcagctcaagtttatgagctatcttcacactttcttcataaggagtggatcatggaacaatgggataaaagtttctacatcagttctgttgctggctccaacaatggaagttctattgtagtgatgtcaaaaggcacaccatatacacagcaatcttataaagtcagtgattcctttccatttaagtggataaacaagaaatggaaagaaggttttcatgtgactgcaatggcaacatcaggcaatcgatgggctatagtcatgtcccgcagtgctggattttctgagcaggttgtggagttggacttcttgtacccgagcgagggcatccatagacgctgggacaatggcttccgtattactgcaatggctgccacgatggatcagtctgcgctgatcctaagcaagccaaggcgtcgcccaagagacgagacacaagagactctgcggactacacagtttcccagtcaacatgtcaaggacaagtgggccaagaatctctaccttgctgggatatgctatgggcgaaccgtggcctaacatcgtccgttgctgacctagctgttgtttgatgtatattttgagttttttatcagctgctaccagcatgagccacaaggcatttgccttgtcgtaacccatggaaattggaaaggggatgaattccgatgtatgtgcccgaacttgattctagggttggtctcgtaagttaatcgggaaaggcgggtgcagacactactgatgagccgtaacgtacccgtcagatcccccagatacaataaaacgagtctgtaatgtggcttttgcatcgtattttctgcatcgtgttaaggagaattctgtttttttattcagtgaattgtgaagagtggaaaatatagag

SEQ ID NO: 111295 - DNA, 1540 bp, Zea Mays
ttatgacattagttctatgtccaaacttctctcttgccttcataatctagaggaacagtcagatatgctagtgtccatgcacatttaggaagaaccgctagcaggagagatgatttggagtcacttgcctatacactagtattccttcaccggggcaggttgccatggcagggatatcagggtgataataaatcatttttggtgtgcaagagaaagatgagtacctcacctgaggccctctgcggcatatgtcctcaacctttcaaggagtttcttgaggccgttgtcaacatgaagtttgatgaagagccaaactattccaagttgatttcattgtttgacagtttaattggaccaatcccttccattagaccaatcaatactgatggagcccaaaaggtagggcagaagcgtgccaggttgcttaatgatgacgacgaccatgtaaaaaagaagattcggctgggtgctcctgcaacacagtggatttcagtatacaattcaaggcaacctatgaagcagaggtaccactataatgtggctgatgcaaggttagcgcaacatgtggagaaaggaaatgaggatggtttgttgataagttcaatatcatcatgcgcaaatctttgggcaatcattatggatgcaggaactggcttctcagctcaagtttatgagctatcttcacactttcttcataaggagtggatcatggaacaatgggataaaagtttctacatcagttctgttgctggctccaacaatggaagttctattgtagtgatgtcaaaaggcacaccatatacacagcaatcttataaagtcagtgattcctttccatttaagtggataaacaagaaatggaaagaaggttttcatgtgactgcaatggcaacatcaggcaatcgatgggctatagtcatgtcccgcagtgctggattttctgagcaggttgtggagttggacttcttgtacccgagcgagggcatccatagacgctgggacaatggcttccgtattactgcaatggctgccacgatggatcagtctgcgctgatcctaagcaagccaaggcgtcgcccaagagacgagacacaagagactctgcggactacacagtttcccagtcaacatgtcaaggacaagtgggccaagaatctctaccttgctgggatatgctatgggcgaaccgtggcctaacatcgtccgttgctgacctagctgttgtttgatgtatattttgagttttttatcagctgctaccagcatgagccacaaggcatttgccttgtcgtaacccatggaaattggaaaggggatgaattccgatgtatgtgcccgaacttgattctagggttggtctcgtaagttaatcgggaaaggcgggtgcagacactactgatgagccgtaacgtacccgtcagatcccccagatacaataaaacgagtctgtaatgtggcttttgcatcgtattttctgcatcgtgttaaggagaattctgtttttttattcagtgaattgtgaagagtggaaaatatagag

SEQ ID NO: 111296 - DNA, 2140 bp, Zea Mays
ttatgacattagttctatgtccaaacttctctcttgccttcataatctagaggaacagtcagatatgctagtgtccatgcacatttaggaagaaccgctagcaggagagatgatttggagtcacttgcctatacactagtattccttcaccggggcaggttgccatggcagggatatcagggtgataataaatcatttttggtgtgcaagagaaagatgagtacctcacctgaggccctctgcggcatatgtcctcaacctttcaaggagtttcttgaggccgttgtcaacatgaagtttgatgaagagccaaactattccaagttgatttcattgtttgacagtttaattggaccaatcccttccattagaccaatcaatactgatggagcccaaaaggtagggcagaagcgtgccaggttgcttaatgatgacgacgaccatgtaaaaaagaagattcggctgggtgctcctgcaacacagtggatttcagtatacaattcaaggcaacctatgaagcagaggttaatgttatttctcaagttaatttcttcctgtagactgtatatcctgtttcgagtatccatccagagttatattatcgtagtgtgttctgtatcgttctttcttttaaaagtaaattcccatttttttgctatttggtataaaaatctgattcattcactgaaaggaaccaagttaacgacatggcaatactgcttgtagatcataatttctactgggttaacccaaatttaaaaggaaaaacttttttaatcccttgagaaccaaagataatccataatgcttatgcagttttttaggttcatcaatgcaccgatattctttttgtgtatttcgtcaccgcaaaaggataattgacttctgcccttgataggtaccactataatgtggctgatgcaaggttagcgcaacatgtggagaaaggaaatgaggatggtttgttgataagttcaatatcatcatgcgcaaatctttgggcaatcattatggatgcaggaactggcttctcagctcaagtttatgagctatcttcacactttcttcataaggagtggatcatggaacaatgggataaaagtttctacatcagttctgttgctggctccaacaatggaagttctattgtagtgatgtcaaaaggcacaccatatacacagcaatcttataaagtcagtgattcctttccatttaagtggataaacaagaaatggaaagaaggttttcatgtgactgcaatggcaacatcaggcaatcgatgggctatagtcatgtcccgcagtgctggattttctgagcaggttgtggagttggacttcttgtacccgagcgagggcatccatagacgctgggacaatggcttccgtattactgcaatggctgccacgatggatcagtctgcgctgatcctaagcaagccaaggcgtcgcccaagagacgagacacaagagactctgcggactacacagtttcccagtcaacatgtcaaggacaagtgggccaagaatctctaccttgctgggatatgctatgggcgaaccgtggcctaacatcgtccgttgctgacctagctgttgtttgatgtatattttgagttttttatcagctgctaccagcatgagccacaaggcatttgccttgtcgtaacccatggaaattggaaaggggatgaattccgatgtatgtgcccgaacttgattctagggttggtctcgtaagttaatcgggaaaggcgggtgcagacactactgatgagccgtaacgtacccgtcagatcccccagatacaataaaacgagtctgtaatgtggcttttgcatcgtattttctgcatcgtgttaaggagaattctgtttttttattcagtgaattgtgaagagtggaaaatatagagcaacaaatagtaagttaaatagtatttcagctacctgcagagcatcatctagctggaccatttccttctcttccagcagcccagtcttgtggaggtttggaatgcaatcgctcaagtatgtcagcacagaatatgtgacttgtgtctttagcgctcgtagcacctgaaattttggtttgagtaattactctatccaatttgatgtgatgtgatgtattatgagtct

SEQ ID NO: 111297 - DNA, 1417 bp, Zea Mays
gcttgttgcaacggacaccacgtgtattcttcactccttgctctgctcgccacctctctcttttcttagccattcaccgcattacatggcggcgcctgtcctcctcactatccctaccatggacgaagaaggcgcccccccgcccgccccagcctccccttcccgcaccccaccgcagcaggagccgaagcccgcggtcctacgctggcgcccacccgtccgcgtgacctcggagtttgacagcgaacgacggctcttctcccaccgcctctcctgccgcgtcctcgacggcctcgccaagctccgcctccgcattagccatggtgctgggggaggagggattctctggggcccgactgatgtggggctcctggcgcggaacttctccgtcgtcgtcgaccctgcaacccgaggcgccgtgctgcgcggcgccgccgacctcgccggctcgctgcgactgcgcgcctcgcacaacaccaaaatgttaatgtgtctgttttctcaggagcaacaaggagaagtggcaattactgcaaatttgagggattcaccatgcaagattgaactgtcatctctggttcctcctaatggaccgccaagagcaacttttttctttccaaatggtgaagtctcaattaaagagaagattttggatgagcgtgacagaattttgtcagtaaatggcctagtgaagtcacgtgttctgcatggagtttgcacagctgtgtacaatgataatgtaatgagcattaaataccgctacaaggatgatgaggtatcgtttatccccagcatctcattaccatccaattctctgtcatttgcattcaagcgccaattaacgcctttggacaagttgagctattggtacaattttgacacaaactactggggcgccatctacaaacacaaggctcacaagcatctcaagtggaaagctggctatgagtcagacaacaggcttggatgggcatcgctttgggttggagatgctggcggcagtacaaaggaggcgcctttgaaagccaaaattcacctcacgcttaaagtcccccaggacaatatacagaattcagttgtagtgttccatgttaagaaaagatgggatttttagtttctatttgtgagctcagatggtgttacgtcatgcgcacataagcaagcgtgtacagatggagagccaataagagatggatgcaaatttgtgatgtggtctgcaaaattgtttcatgcaaatgttagggagaaatcatgtaatgttagtcctcttttataggttccgtttggttcaaggtcttgttaagggaatgctaaagagctcaaccaaacaaaagtattggtaactactagaggtgtaatccgatcgaatacagacgaatatcactgaaattaaatttgttattcggatccagattcg

SEQ ID NO: 111298 - DNA, 1393 bp, Zea Mays
gcttgttgcaacggacaccacgtgtattcttcactccttgctctgctcgccacctctctcttttcttagccattcaccgcattacatggcggcgcctgtcctcctcactatccctaccatggacgaagaaggcgcccccccgcccgccccagcctccccttcccgcaccccaccgcagcaggagccgaagcccgcggtcctacgctggcgcccacccgtccgcgtgacctcggagtttgacagcgaacgacggctcttctcccaccgcctctcctgccgcgtcctcgacggcctcgccaagctccgcctccgcattagccatggtgctgggggaggagggattctctggggcccgactgatgtggggctcctggcgcggaacttctccgtcgtcgtcgaccctgcaacccgaggcgccgtgctgcgcggcgccgccgacctcgccggctcgctgcgactgcgcgcctcgcacaacaccaaagagcaacaaggagaagtggcaattactgcaaatttgagggattcaccatgcaagattgaactgtcatctctggttcctcctaatggaccgccaagagcaacttttttctttccaaatggtgaagtctcaattaaagagaagattttggatgagcgtgacagaattttgtcagtaaatggcctagtgaagtcacgtgttctgcatggagtttgcacagctgtgtacaatgataatgtaatgagcattaaataccgctacaaggatgatgaggtatcgtttatccccagcatctcattaccatccaattctctgtcatttgcattcaagcgccaattaacgcctttggacaagttgagctattggtacaattttgacacaaactactggggcgccatctacaaacacaaggctcacaagcatctcaagtggaaagctggctatgagtcagacaacaggcttggatgggcatcgctttgggttggagatgctggcggcagtacaaaggaggcgcctttgaaagccaaaattcacctcacgcttaaagtcccccaggacaatatacagaattcagttgtagtgttccatgttaagaaaagatgggatttttagtttctatttgtgagctcagatggtgttacgtcatgcgcacataagcaagcgtgtacagatggagagccaataagagatggatgcaaatttgtgatgtggtctgcaaaattgtttcatgcaaatgttagggagaaatcatgtaatgttagtcctcttttataggttccgtttggttcaaggtcttgttaagggaatgctaaagagctcaaccaaacaaaagtattggtaactactagaggtgtaatccgatcgaatacagacgaatatcactgaaattaaatttgttattcggatccagattcg

SEQ ID NO: 111299 - DNA, 1369 bp, Zea Mays
acgtgtattcttcactccttgctctgctcgccacctctctcttttcttagccattcaccgcattacatggcggcgcctgtcctcctcactatccctaccatggacgaagaaggcgcccccccgcccgccccagcctccccttcccgcaccccaccgcagcaggagccgaagcccgcggtcctacgctggcgcccacccgtccgcgtgacctcggagtttgacagcgaacgacggctcttctcccaccgcctctcctgccgcgtcctcgacggcctcgccaagctccgcctccgcattagccatggtgctgggggaggagggattctctggggcccgactgatgtggggctcctggcgcggaacttctccgtcgtcgtcgaccctgcaacccgaggcgccgtgctgcgcggcgccgccgacctcgccggctcgctgcgactgcgcgcctcgcacaacaccaaaaactgccagactggagagcaatcatattatattcatgtcggctgttcagcactctgtttatctatgtcttgcaactatgaatatgacaaatctattgtttcttgcattcaattggataggtgctttcaattcaagtaccacagtgtaaaggagcaacaaggagaagtggcaattactgcaaatttgagggattcaccatgcaagattgaactgtcatctctggttcctcctaatggaccgccaagagcaacttttttctttccaaatggtgaagtctcaattaaagagaagattttggatgagcgtgacagaattttgtcagtaaatggcctagtgaagtcacgtgttctgcatggagtttgcacagctgtgtacaatgataatgtaatgagcattaaataccgctacaaggatgatgaggtatcgtttatccccagcatctcattaccatccaattctctgtcatttgcattcaagcgccaattaacgcctttggacaagttgagctattggtacaattttgacacaaactactggggcgccatctacaaacacaaggctcacaagcatctcaagtggaaagctggctatgagtcagacaacaggcttggatgggcatcgctttgggttggagatgctggcggcagtacaaaggaggcgcctttgaaagccaaaattcacctcacgcttaaagtcccccaggacaatatacagaattcagttgtagtgttccatgttaagaaaagatgggatttttagtttctatttgtgagctcagatggtgttacgtcatgcgcacataagcaagcgtgtacagatggagagccaataagagatggatgcaaatttgtgatgtggtctgcaaaattgtttcatgcaaatgttagggagaaatcatgtaatgtta

SEQ ID NO: 111300 - DNA, 431 bp, Zea Mays
tttccttgcgcgcacctatcggggaggaatcggcgggttgttgtgatccgctcggtcggtctttcccaagccggtgttgggatgaaactaacccccgcacctatcgcgagctcatccggtcggcgcaactgccgtcaccgggatctgcggctcagcctccgggctataagactccaagcctcgcgcgcatcacactgccccttcccaggtttagctacatcctatcctaaacttgtcgaccgctctcaccattcgaaccgagacctgggcgtggtgagggatttccattgccgccgtcactccaccctgacgcgccacccggtacatccaccaggacgtcgcggagtcgttggtgggcgccgttggtgtggaagaggactgcggtgcgggcaattgctcgtcggacttcgtcgagcgacaccaccgcgtgg

SEQ ID NO: 111301 - DNA, 123 bp, Zea Mays
ccatatccaaagccgatgttccttggcttggtccaattattttacactctgatccaactgcccggatagcgaatggatttttgtttagtttcagattaatttaatacgatctgaactatcacg

SEQ ID NO: 111302 - DNA, 300 bp, Zea Mays
atgtcgacgatgagtcctggtgaactcgatgtcgatgatgccagagtggcggagcttgtcgttgaggccgggcttggccagcctgctgaacaccgtggcactgaggtcgaagtggtatttggacaccgggtagtagttcatgtcgtggtgatcaccgtctctgttgtcatcggggccggcgtcgttgggctggccgtactaggtggcttgggcccactgctaggggccccagcacacggcgacggcgtccacggcgttgagctgggcctcgcgacagtggcctccggtgatcagggctag

SEQ ID NO: 111303 - DNA, 277 bp, Zea Mays
ctttaatccctttctcatttcttcaatgattaattggaattccaattaatcattttgactggttgtttttacataaataataagtaaaaaggcagtaagaactagaatgaacaatgttgtagcaataaatgcgagaataggggcctgttatctctatcaagatgattctaattcgtcagatattatttattctagtatctggaacacgaaatacatagagtggataaaaaaaggaactatgattcatactcactatttagacctcgcaactagatta

SEQ ID NO: 111304 - DNA, 1930 bp, Zea Mays
caagagacgtttggtcatcacttgaagttctgagcactagctggaggcatggctttgcagtgccttgtagactggaagggacagccagttaacccaaaaaggcatggtggggtcaaagccaccatgttcatctacttcctggttgtgatgacaaacattggaaacatcccgatgctgttgaacgtggtgagctacttgcatgggaagatgcacatggacatcgccgacgcctccaccaccgccaccaacttcttcggcgcagtctgtgtcttcaccttcctcggcgccttcgtctccgactcctacatcacgcgcttctacactatcctcatattcgccccgatcgagattttgggttacatgctgcttgcatgccaagcccacctgccgtcgctgcacccggcaccgtgcgacgtgaccaacagcagccccagcgagtgcaccacggtgagcggccggaacctgagcctgctgaccctgggcctgtacctgatcccggtcggcgagggcgccgtgcgggtgtgcgcggcggcgctgggcggcgaccagttcgaccgcgaggacccgcgggagctccgcggcgcggccagcttcttcaactggtacaccttctgcatctcgctgggcggattcgcggggctgctcttcgtcgtgtgggtgcaggacaacgaaggctgggacctcgccttcgcgctctccgccctcgtcgcgctcctcggcactctcgtcctcgtcgccggcatgccattctaccggcaccagaagcccacagggagccctctcacaagaattcttcaggtttttgtggcagctttcaggaagaggaatctttcagtgcctgaggattttgttgggacgcacgagatgaccaccggggaaacaggcaccatcgttgaagtgctggagaggacttcaggtttcaagttcctcgacaaggcggccgtgaacgacggcgacgcgcggcggtggtcgctgtgcacggtgacgcaggtggaggaggccaagatcatcctccggatgcttcccgtcttcgtgagctccgtcctgggctacctcccgatcccgctgctcctgacgttcacggtgcagcagggcgggaccatggacacccggctcggcgccaccaacgtgccgccggcgagcctcttcgtcgtccccatcgtgttccagatgctcatcctggtggtctacgaccgcgccgtcgtgccgtggctgcgccgcgccacagggtacgcgggcggcgtcacgcacctgcagcggatcggcgtcgggttcgcgtccaacgtcgtggcgctcgccgtggctgccgcagtcgagggccgccgcagggccgagggcggcgccgccgccgccgagatgtccgtgttctggctcacgccgcagttcttcctgctgggcgtgatggacgtcacctccttcgtcggcctgctcgagttcttctacagcgaggcctccgccggcatgaagtccatcgggggcgccgtctgcttctgcatcctcggcatcgcgtcgtggctcgggagcttcctcatccgggtggtcaaccgcgccaccgcgcaccacggcaccagcaggggcacagggtggctggaaggcgccaatctcagcgccggccgcctcgatttgttctactggcttcttgcgatctttgaactcgtcgccgtgcttctctacctgctgtgtgcgtggagatacacctataggcaacatccgaggatgcaggtgcagtccacggtggaggatcacaccgcagccatcaagcaagatgcagcactttgacgatggcatcgttaattgttagtagttcacgtcatccatacatgtgtcaccaaataagtaaggggtgtttatttgagattataatctacgtagattatataattcaacaaactttaaattaagttagtttaaagtttattgtattatataa

SEQ ID NO: 111305 - DNA, 1824 bp, Zea Mays
atggagattaaatctttagaatccttatcaaatggtgctggaactgctgaaagatctaggatgagcctaagatttccaagcgagttagcgatgaatctcatggatcgcaacgtgaaccctgaggaatcgaaggtcccaacagcaaaagacagagacccaagtcttaaaactgctccatcagagaggaaggacggagaggagcagcagcggagccaaagggtttggcggcttcgtcaagaaccacggattcaggtcgaatggatcttttaggatgatgtaaaatacaattttgccaaggagcatgagggcccacaattttgacggttctgaacttgataacaagacaaattcacttcatgatcagttctcgacacagttgtcattgtcatcattgtctaattccagtgatggcgaggagattgcaacttcttcatgtcctgacaaggggtgccctttggccatccttcatttatgcctaaagagttttaagcaggatgctactgaggaggatgcagctaaatggaagcttgacgggacctttgttctttcagacacagaatggggtgattcttcatatgctagttctctcagcgaacagtcatctacaatcagtgcccccagtacgccattcactcagcctgaggatcttgacagaacagatatctggatttcatctttagatcttgatgccgaggattgtgccttgctgccagagccagacaaggaacaatttccagatatactcggttttgatttccccagcccttctttcagcgcaatcagaagcctccagtttggttcttccagctttagtgctggaatgtttttgagcaaagaagccaacgactctgatgagccaatattctggccatttgagggcacctcctacaacagtcctgaatttgacagatttctgactctgtcgcctcgtagaaacacaatggatcccgggtacgctcaagtccgtcactcgaatccattcttgcggaggctccgtaacagcacactatcttcagtaaagaagtgcattgaactgcaccaaaggaccagaaattcagacgcaaaaggaagcgtggcgtcctcctgccaagagaagattcagaagacggctgcagttgcctccaggttaacaaaagcatctgcaccctccagttacagtcatcaccagatgccgagcatctgtcagaaaagaaggccgcctcacttgaaactcggtggtccaagaaagattacctctccacagttgcaggcagatcgatctagtaataagaagattgaagcagcaggcgtccaaaaagtagcggataagaagagtcggatcgaagagttgattggattggatgagtttgacggcaacgaaggcattggctcgggttcgtcagattaccagtttagtctatggatatctccaagatagttggtctgtgcaaccatcctgcagtaagcaacttaccatgttatctgtgaggtcagaagctaggattttgtaaaccagatagttggcctgtgtaatcgactcaacaaatccttgaaagctggcactgccgtagcaggagtgtacactacaaaatccttttggcagctgcgctggttccagaactgatggcgtacggggcgtgaagaaaagaacacccatattactataaagaaaaatatacagaaaacctgatggttccttattttcctacgtggctctttgactattgctacagtttagcatggggaaattatccttgctacgatcctgtactctcgacaatttttatttttgaattttatacagtaaggaaattttgaaataaatgtctttcatttctttgtcaa

SEQ ID NO: 111306 - DNA, 930 bp, Zea Mays
atgacttcggcaccttctgcattcctgaagccaaaatgcgctctctgggactgcctcaggcctgctgttggatcagaaagatggcatgattattgcagcatgtatcatgctgatttggctgtgcaagaagagggccctccgggcacaatgcctgtgatccgtccaagaggtattgatctgaaagatggccccctgtttactgctcttagtgcaaaaaatataaggaaaaaaatgttgggatccctgtctgtgaaggagctgccactgcaaagtctccgtggaatgcacctgccattctgcaccattgcagaacttttcgatctttacatctttgaaggtgagtctatcagagaatggttgttttttgacaaaccaaggagggcatttgttagtggaaatcggaagcagcggtccttgctagattacggcggccgtggttggcatgaatctaggaagcaggcgatgaaggactttgggggtctgaagaggtcctattacatggatccacaaccatccaacagctacgaatggcacctctacgaatatgagatcaatgagtgtgatgcttttgccttatatcggcttgagttcaagtcttcagatgcaaagaagactgtgaaatccaaattagtctgtaatccaatgaatgaaattcagcagcaaatggttagactcagtgcaaacagtcctgtagacaacaaacggactgcccggggcaggccacatgctaacccgacagatgtcgatactaacatctattcagttccaaacaccacagctcaagccaatgttccaaatgcttttcagccagggtcagaagtggaccagatgacatatttgaatggtagtgttgtttatgggcctcatctgtcgtatggttactcgactgaaagaagttacttttattggaactcagctgatgggacatga

SEQ ID NO: 111307 - DNA, 1518 bp, Zea Mays
ctctattagctctcggggtcccctgttgtcctcctccccacgccatttccctgcctttgagcctttctctcccggctcacagacctgctgcaaccgatcttcttcctcccccatccgagctccatctaggacaacaacttctcccttacgccagcagcagggatctcctccctctcccatccatgggcgcgcaccccctccctgcgagctctctgcttggctcccctgctcccatggtgtccaacgccttcctctgtcctagacgcagggcgccagtgcggcctcgccgaactccccatggcgtcgagcttctccgtcgcgcccctgtgacgtgcccagcacgtccgccatccatccctgtgcaggcgcccctttcccccagcgggattcctcctcttctccccaaggcgcctggtcttctccccacctccgcccaggcagcaggagctcgactccatgcttgcccctagccgaactctcctacagaagctccccacaacgccttcttcttcaaccgcaacaagcagcagacgccctcctcctctctggtcggcctcccatggcgctgctgcccccttggtgtacttgctgcagttccaagccagtcgccggtgctccctgcttcaaccctgcacgactctcactcccaggctctcatcctcgccaccagcctgtgcaagggcctggccgtcggccttgcctagcagcgagaacctgcccccgacactcgccagtgcacgctagccgtgccgtcatcgatttccttactgcagcggggttcccccaatgtcgcgcgccacctgttcgacgatatgcacagtagctgcatgtctcagtttatcgcagcatcgagctccttcaccggcgcctgtccatggcagcagtcccgacgtgacgctgtggcccttagtgaggcaccttgctgtcctagccgctggatcgagctttgtcccaacccgcagcttgctatcgtcgagcattgggcttgccatcgatgccgtgtttgtcgcgcacagcaaaaaccacagcgccacgacttgttccagctaagcgagaggagccgcgtcgtcgatccgtgcagccccgacgtctccacgtctcgcttcgccgtcaatctgcatggcgcctgcgcggcgtcgtcgaaacccgtgcccttgtcatcacgcctcgcgcatcgctcgtcggcaaagagcccaagctgatggcatgcatgcgcaactccaatcggattttggccaggttgttcactttagaaaaattgtgattatgttttatttacgattcagtcgatggcgtaaatatatgtgtgaaaatataattgtgtgaatgaaagtgtgtagggaaggaaatgaagtggaaaagaactcgagaatttttattttgataggaaaatatgcgatgcgttatttgatgcgaaaaactaagttacaaaatgtggattatgttttgggaaatgcatcgatatgtgtttatgtgaaaagtgtaattgttttatgcaatgtgatgggattcgtgatt

SEQ ID NO: 111308 - DNA, 393 bp, Zea Mays
atgctctgtttctgtgttatggaaactaatctatactgcatttcagattctgaagaattccagccagttgtgcctgttgtgaaagccgagccacttaaaaatcagtgggctgatgaagatgttgaagaagatgatgtaaaagaatcatgggaagaagaggaggaggaggctcctgactgccaaaagtttgacaagattaacgcaaagcttggcattcggaaggaggatcttcctaagatcgagcaagaacttgaattggagattgccaaaagtgagctgactgaacttaagaaggaatgtgttgaagcaatggagactcaactaaagagggaggagttccaagatgaggagatgcctgatgtcaggaaacaggacatccgaaacttcctgtag

SEQ ID NO: 111309 - DNA, 716 bp, Zea Mays
atggcttcctccttccttgctacaatgatcctggtcaacactctcatgtggtcagcctctagtgaaaccatagtccccaaccagatggtcagcagttacattgccaccagagcacagtagatacagcggccgcgctacttcacctttgtcatgctcgtcagggtggtgcaggagaagataccccgtagcaccttcaggatgccccgggataggcttctgtcccctgcgtccatctctgagagccaggtgttggacttcctatccaggcattccatcactgtgcccctgatgtcatcgacctcatcaggcttcccagtggatccatagtccccacccaccactagggcgacaaccaacatcaagcatcagaagctctacttcaacggcatcaagctcacaagtcctgatctctgccacttgggagagtcattcaggtggccattgaataaatggagtcataaggccaacatatgcgaagaataaaagcggcaacttgcactcgcaatgccggtctaatttcagcagcacctgagaagactttgaccgaaaaacaatcttgagcacatcttctctaccatctcccaacacaggttcttccacgatcactgctcacgcacctgcagcagaaagccctcaaaactcagacacttctatgtcaaaaactagattggctagtgcatactaccccaatggtagcattgacgtttaccattttt

SEQ ID NO: 111310 - DNA, 999 bp, Zea Mays
atggcggccgatgacggtggccgaagtgagcgcaccatgggggcgactaggagcacacacgcaggggtcgacggtaatcgaagggagcaaggatgtgagcaactcggtgcggtggggagcagcgacggcttgccgtgtacgacgctgcagagaaacaaagacagagctaagctcgacaccgtggcgaataggagatcgatagaggcggaaccgatagccaaacaggaactgcgcagatcgatgatgcgaggcccgatctggcaagcacgacgtagaggagggcatcgctgctgctgctccgacatgaagtacttgctaccgaagcagacgagcacgatggaggctggggagctgccgacggtcgaccctgccgtcactggcgagcaccaagtctgcgcgccatgggagatgagcagagaggaactcagcatcagggaacagctgcgtccggcgcagaatgagagcccgaccaggagacttggagcaggggcggaactcggcaaggtcgcggctaaggagagcaccatggcgcggactgctccgcggcctggacgaccgccgcgtcgcgcacgatgttgccctgccacatcttcttctcgcgtgggggctcccggagcccggcgcctgcgcagaccagccacgaggcgggagcgagctggagcgccacgatggggcttgaggccggcccgatggcgagctggccgagcaccagagagccgagcagggcgcggtccggtggaggtgacgtcgagcgccatgggacgagctcatggccgggagggactcgaccggcggctatggatggggcttagcagggagggcgcggccacggcaaggtggagaacgagttggaggccgagtgccacagggaaggagcgcgcggcagggggagaagacgagggagagagagctcggcagggcgccatgggagaggacaggagcagggacgatgcgggcctgtgcgagcgcatgcaagcgtcaaaaagtctacatgcgtga

SEQ ID NO: 111311 - DNA, 189 bp, Zea Mays
aacctcaaggcatcctttcggatgctgggggttccttcaaacagggatgctaaactttctggagcaacaatgaagacgttcgccacaattcccaacagttcgaacttctcatctatggagggggcattgaagctacgaacgaaatccccatattcagttatgtcacgtttcaaccgtaggccaccacta

SEQ ID NO: 111312 - DNA, 608 bp, Zea Mays
agggaataaaattttccagggttcaagaagcaagctgcaccatacaaagaggtggaaatttattgttccaacgcccatctatggtttttaagatgccatcaccttttccaccatctatgcgtgggtttgcatgcagtcgaagtcccaatgcagagctcattctgaaagcctaggacgttaatttctgttctttcgtccaaagtgtactgatcattcagtttgaaccgaattatccagataaacgcggagttggagacctcgctggtgaagacacgtcgccggaacctatcacagaaacccatgaagagcatctgaactaggggatctggtacgatgatccgtgaaccgagataaattacgggaggtcgagcttttatctctttccattttgtagcatcttttacttacctaaacttgtcttattatggtggtagttaatgtaagattcactgcaaacattactgagttcaccatggcgtaaatccagtctcacatgagtcatctagtgcatcctatagcgattacacaaatgacacatgcaacgcaaacttgaaatgtaggacattgttgttaccttggctttttaccctcagattttcattccgctc

SEQ ID NO: 111313 - DNA, 231 bp, Zea Mays
gatctcggtaaccaccacggcgtgatccttccgcgccatatgtgcttcaaccgatggctactacagccgccgaggacaatttgttcctaccacggcacaaggtgttctaaccacgacagtcgagggctacagctacatcttcggtttttgtctcgcgaggatggaatctcaagagaaaaatattgtacttcctaccccccaaggttgatcttgccctcatcgattggatta

SEQ ID NO: 111314 - DNA, 1140 bp, Zea Mays
cgttaatgctaggcccgagatccaccgaccaatccgttagagctctctacccagttacccacacgaaggaataataggctaggccgccgaccgccgccatcgagtcccactcgcacgccgccttcatccccctgtgcagcaggactgggtcttctaagaagcatgacctcaaatctaagcaaaaattggaaaagaagattagtttttacacaaaagtaaaagatgcagttacttccttaaatgctaagaagactgtcagtaagaaaaataaacagagtcggcgccagaagaagcttaaagcatacgatctgtcggcactttctgagttcctcccagaaccagctgcaccagagcagaagactgaagcaaagctgaactgcaagtcaagacagacattagtggtgcaggagtctgctcatcttaaggctgtactggacaacccgcagttccagcttgacccattcgctgcgatccatcagcacctgctggcaacgcagccgcctgcagctgcaaagaaggacgacgcagcggggaagcaggggaaggtttccaaggacaagaaaagcaggaggaagaagggcacatcgtcaatctctcaggcaatggatatctgattgtgttccttcagtactagtaacttggtccgatgtcgactgcccgtgttccactagagggagctcatcgaagttcgatatcgatggttggcatagtttgagtaccagtagaggtagtactgtaccagccctcgcttttggcagcctgtcgattgatgtttgcagaatcggtgccatcaacatttggtgctactttggaaactggggatttgaggagaggattgagggagaaaatgaacttgaggggattgagagggtcaatcctatattcctatatgaggtggcaatttccaagcacaacaattcatttgttattatacctgccgactgtttctgaatccagctcaactgttgtaggaagcttggaaacaagcgctccaatttcatacgtttgatatggttttagctgaaagttcgcagggacgtggcatgttcagttccgatcaatctaaccgatgaaatccaaaactgacgaggtccaggccgctctatttacagcatctaataccgactacacattcgtgaa

SEQ ID NO: 111315 - DNA, 1243 bp, Zea Mays
cgttaatgctaggcccgagatccaccgaccaatccgttagagctctctacccagttacccacacgaaggaataataggctaggccgccgaccgccgccatcgagtcccactcgcacgccgccttcatccccctgtgcagcaggtccagccggacgctctctcctgatcttcctccgccgtctcctcctgtcacccgcttgctttgaatccctttcttctgctccgccatcgcgacgcgccgacatgactgggtcttctaagaagcatgacctcaaatctaagcaaaaattggaaaagaagattagtttttacacaaaagtaaaagatgcagttacttccttaaatgctaagaagactgtcagtaagaaaaataaacagagtcggcgccagaagaagcttaaagcatacgatctgtcggcactttctgagttcctcccagaaccagctgcaccagagcagaagactgaagcaaagctgaactgcaagtcaagacagacattagtggtgcaggagtctgctcatcttaaggctgtactggacaacccgcagttccagcttgacccattcgctgcgatccatcagcacctgctggcaacgcagccgcctgcagctgcaaagaaggacgacgcagcggggaagcaggggaaggtttccaaggacaagaaaagcaggaggaagaagggcacatcgtcaatctctcaggcaatggatatctgattgtgttccttcagtactagtaacttggtccgatgtcgactgcccgtgttccactagagggagctcatcgaagttcgatatcgatggttggcatagtttgagtaccagtagaggtagtactgtaccagccctcgcttttggcagcctgtcgattgatgtttgcagaatcggtgccatcaacatttggtgctactttggaaactggggatttgaggagaggattgagggagaaaatgaacttgaggggattgagagggtcaatcctatattcctatatgaggtggcaatttccaagcacaacaattcatttgttattatacctgccgactgtttctgaatccagctcaactgttgtaggaagcttggaaacaagcgctccaatttcatacgtttgatatggttttagctgaaagttcgcagggacgtggcatgttcagttccgatcaatctaaccgatgaaatccaaaactgacgaggtccaggccgctctatttacagcatctaataccgactacacattcgtgaa

SEQ ID NO: 111316 - DNA, 1108 bp, Zea Mays
ttttctttttccttttttttttttgagtcccagcctacggacgccacctttaatcatgggccagacatgctttgagcttccatcataagaatattcctaaacacggtcccgttatccaaagaaaatgcccaagatgatacacaattagtataacagagagcacacaaatggttaaactaattcattattcatatacccacaatattaagtaagcacgcgatactaccaccttccaagtctcaacagcaaactaattaccttaactagctactacctcacacgttaacaacccagtagtccagtacagtcagtggccactagggaaatgataattttacatggagtacactaaggcagcatcatgccctctcctcctaggcttctgtccaacaactgagttctagaacccattccaccgaaaatcgcacaactttatcaggggaacacttcattagcgtcaaccattgaggcgctccaaggtctccgcaacatgcctcatcgacggcctccgctctggattcgcctgaacgcatgcaagggcgactttcagcactgcgatcatctcaccttcctgttcagaatcctgggcaagaaaagggtccagcacatcggcagaaggtttcttgtcttcgatgcagaattggacccattgaacaagatccatctgcatggtttccaagagaacagagggcgaccggccagtgatcatttcaagcaacaccacgccataggagtaaacgtcccatttctgggagggcttcagtgtcttcagcgcttccggagcttggtagcatgaccctttgctcatgagagggctcactgaggcatctatttgctgaatctgctccttttctaattcaacttggtctgattgcaaaaatggtgatgcgccagcaatgtttgcaagtcgcccaaggccgaaatctgaaatgaacggctccatatttgtcccaaggaggacattgtttggcctcaagtcaccatggacatactttttggggctgaattcatgcaggacagacatccccttggcaactcctttcatgatctttattcgggcttcccatggcaacgggatgaatgtcatcaacccaggtttacctgtaag

SEQ ID NO: 111317 - DNA, 929 bp, Zea Mays
gatcttctctttattgatattgtgacctgagataaatggagatgcttgaactttcctcggggttattagtttcatatccttgtttttgttctttagcacgtatcaccttatatcagttccttagcattgttgcttagtggttagttgatccagcataacacttacattttttgtttgatgctgtctaatgccaaggatattgtcccaaataaagtatttattttctgttgctcgagaagagaagttttctttcttttaaattctttatagatcacattacctgtgcatgcatttgtcctttcatcgttgcaaagtctatgattacagagatgctggatggaatgccccctggacttgaagaagcgcttgtactatcaaaggtgataaaatccattgacgtgcaagaggccgatatacttaggcgtatagtgttggatgctccatccactggacatacacttaagcttctgtcagcttctgattggattgaaatgttccttactttgagcattaagggcataaatgtggcttcgtccatgccatcgtttaatatgtatcttgaggacgtgcaattcatcatagatgatgcctccttatgggacaccaccaccatatgcagcaatgtatgcacaaggtacaccataacagcaggcaccaatgccaccgggttcacacccatacagttcttatcctatgcagtcaccaaacgggacagttcaaactccaggtgcaatgattttttggaccggtactgctatattgagcaagctatgtatgcttatgctattcaaatttgctcatttagatggagtagagaaatctggagggggctcgtggagatcctgggccattatttgcagaccatagtgacagcttgttggatcacttgggcgcttgggttatcaatggggagtaattccacaacatga

SEQ ID NO: 111318 - DNA, 730 bp, Zea Mays
gtggttgtggacattgcattctacttttgattttgtgctatgtttgtgattgtggactattagacatctcattccactttgtttgcggttgtcgacttgctattagttgaaacttgtgtttattgtggtaatgtggttgtggacatgtcattttgcacaatattattatgtgaacttatgttggttgtttggtatttgactttatataattgtctaaaattatgatatattgaaatttccctatgttgtttaaaactacgtttaaactttgtttaaaccgtttaaaagttaaaactccacccattagcgtttcaacgtttcgtcgttttaataaccatggtcaactgtgatctgataaagctcattctttctcggatataacaacaaaaacatccttgggcgaccaccttcgccttgaaactttgtctattggattgattatggcacactcagctgcctcaagacggtacccaatgacaatctctttcctctacctagctcgcagaatgacttcaaagaaatttaattcctcttcttctctaaggtacagatcagaaggtcgtatttgcatttcatttcactgtaaagggtgcagttgcaaatacagattaaccagacagaaacatgagaagacacatgattcaaaagcagccaagatgctaacttagaaatataattaggcaaagcggagcatgagaagaatcatatttctaaagaataaaaggaaaaa

SEQ ID NO: 111319 - DNA, 2681 bp, Zea Mays
ccgggcctgcgtggttcaaggaattggaggcaacctaatcggcggtcaggaatgcttcaagagttcgtcgacaacgtcatcgccgtcacaaaggaatctgtgaagacatttacatatgagtcactgaacaacattgcaaggttcataaatggaatgtcagcactcctattgacactattacctggaaaaggcaacattttagaagggataaatggctgggaacttaagccagcactccgtgggccgcgtcttcctcgttggatggaaaggtaacatagttttactctgttctgacaacttcattccttcttttgaacatagtggggtatcttcgtttaatgagttcatccatgaactttctgttgattctgatgctgattcaattgctgactctgtcgctggggacgatgatcatgaagagtttgtctgccctccgtctccattgtcccaaagttcacggttatcacatgcaagcagctttggtagacatgatcgtcgactcaggagacatatcagatatgcagtttcttggatactatggccattgagattctttgtttctttaatattcattttgttcaatgccattaaatttcggatggatctgcatctggcaattgagattttcatcgaatcagtctttgacatcgttcacaaagcagcacattatattctttctccttcagaagtgtggcagaacctgttttgctggattcaaggaagtggtcatgatactagttctgtcgttgatgtattgactgctaatgttggcagtgataatcctgttccaacagagaggaagactgtgtatcgtcattctctgaacacagattcccggacatgtgaagatgttattactgagcttgggtatccttttgaggctataaaggttgttacttcagatgggtatgtcgtgttactggagagaattccaaggcgtgattcgcagaaggttgttttgttgcaacatggaatattggactcatctatgggctgggtgtcaaatggtgttgttggctcaccagcatttgcagcttatgatcaaggttatgatgttttccttggaaatcttcgtggcttggtctcaagggagcatatagataaaagtatttcctcctacaaatactggaaatattctgttaatgagcatgggactaaagatatgccagcaattattgaggaaattcacaagatcaaaatatcggaacttggcaaaagtcagcctcaatcagcagaggggacaggagatcaaaatgataagttaaaaagtttggaagtacaggcttcacaggaagacagtatagaagaccaaccctacaagctttgtgctgtatgtcacagcctgggtggtgcagttatgctgatgtatgtggttacttcaaggatcacacaaaagccccacagattgtctagactggtcctgctatctcctgcaggttttcatgaggattccaatgtggtattcagtatggtagagaagctcatcttgtttgttggtccagtgcttgcaccacttattcctggactttacataccaactcggttctttaggatgcttctgaacaaattagcaagggatttccacaattatccagctttgggtggacttgtccagacccttatgggctatgtcgttggcggtgacagttcaaattgggtaggagtgctcggtttgccccactacaacatggatgacatgcctggtgtgtcatttcatgttgcgcttcaccttgcccagataaagagggcaaagaagttccaaatgtatgactacggtagctctgcagcaaatattgaagcgtacggaacaccggaaccattggacttgggagctcattatggtctcattgacattcctgtggacttagtcgctgggcagagggacagagttatctcaccatccatggtaaagaagcactacaagctgatgcggaagtcaggggtggaggtttcatacaatgagtttgagtatgctcatttggatttcacattctcgcatagggaggagcttttgtcctatgttatgtcccgcctacttttagtgactgatccaggtaaaggccgtatcaagcagaccaccgtgcgactcaggaggcagaagaaagttcagtcagagattgaggagagcattgagtgcagagccaaggaggaatctgatgaactagctggacatttggagtgatgtggagcctgcaggttaagagtgtgttgtaagtttgtgaataggatactcgtgtcgtctctcatatgttatacaccatgtggaagatcaggggagaataggtctctgtttctagtatcatgttcatggggatcgctttttttaacccctgtaagtaacagtagaggtatatgcatcgactccgttgagcattaggtgtcctgctcttttaagtatcgagaacgaggagaatggtcaggaaccggatgtttacctggcaaatatccagtgttcttgcgacttcttttgtagaatgtcacagccattcaaaggatgtgatgtcaggcgtgcaagcgatggacagtatgttttctgcatatgttatggacagtatgtttcaactaaaacgtttttggtttggaaccaattgttactgttgcatgagtgttattgagcatggataattagcatagaaatgtaattctagtttcactggaatggaagaaagcttgttcactag

SEQ ID NO: 111320 - DNA, 264 bp, Zea Mays
gccgcggtgactccccgagcagaagaacccgatcgaacgtggccacggcggcgagtccccgatctcagatccctgctgcgagcgaagtgttcgattcgagcagagatggcggcggcatgggcggggctggctttgttgctcgtcgcggcgcagttggcgtcagtggcgcaagtcacggcgccagcgttcctgtgggcgcccaaaaactacgggcagaattgtaatcctgctgccgcctacgctatggctctagctactagctag

SEQ ID NO: 111321 - DNA, 587 bp, Zea Mays
atggcaggcaccgccgctggcaccggggtcaccatcgatgacaacagcggtgtaaggaccacgatgatgttttggatggtcgagaaaatcccccccgaggatcgagccacctgtccttccactgccaccccaactatggaatccaagttgaaggcttcaaggatgcacatttatgtccgccgaggtggtccaaattaccaatctggactggctaaaatgcgtaagcttggtgcagaactcggcgttccaattgaggtgtatgggccagaagcgactatgactggaatatgcaaataagcaattgaatgcatcatggctgcagcgtaatcagagcgtagctctgggtagtttgggatctgcaaacacgcaattcaatgtgtcatggactcagcataaatgagagatggatagtagttgcattatagttcacacatggtgtttctgtttttgtttcagatatgttgtagcgtgttgtttgaacaaaaccttcgcagatcattactgcaaagaaattactgtgtgttaaaataaattcaaagtctagttttatgccttttggaatgcatattgaactgcaaagtgactct

SEQ ID NO: 111322 - DNA, 491 bp, Zea Mays
acctgctacttgagcaaacaacggcatagctcgtcctcgccgttgccaacttgggagaatcctgatcgtgactgactgcaagatgaagctgctcgtcggaggccagaggaggcagaggggattcggcaaggccctcaaggagcagagggccaggctctacatcatccagcgctgcgtcgtcatgctcctgcgatggcacgactgatccaatccacatactgccatgggggagcttcgtccgagatacaaaccagtggattcacagggcgagctccatcgtccttgcctggtgcttgcttcatcgggcgccggagttttgagaggtgtcgcgctgctgccacaatggttgccgcttgccggctgctgtacatagagatagagggccatggccaatatagtgtagtacaaatagaggtaggtgttcgtcagtgtctactgtgtcattgtgtatggaatgccaaatcagtgaacaagacagttgttggggtctt

SEQ ID NO: 111323 - DNA, 455 bp, Zea Mays
aggtggcatcaccagtgatggcgttcgatccttgaaatgtacatgatgtgataagagtaagcgtcactagagaatgggaattccaaggcgcaacaaatgatggtcctctccatcatgtcaacatgatcatatccgatgaaccgaaaaacaagaatcatgagtgcaatggcaaatggaaggtgaaggcccttttgattgacaacttaggaaaagatggaatggaactcaaattttggtggtcggtcaagtgtgtagagttgaaatcatatatacttagttaggctcaaatttagcgcaattcagttagtattttagtttggatttagagtacacttatgtatgagttatttagcaatgcttatttatgagatattgaatgatacttatctacattatattaactatagtgttgttaaatatatgtgtgtatgtatattataatgtggtatctcaaa

SEQ ID NO: 111324 - DNA, 689 bp, Zea Mays
gttagtctttgtgcttcatcatccggttgtgagcgaaattggagcaagtttgaatttatgcataccaagaaaaggaacaggctagagcacaaaagactgaatgatttagtgtatgtttcatacaatataaagatggccgctaggttccaaaaattgcgtgaagaagggaagaactttgatcctttggttcttgaagattttgattgggacaatgagtgggttgatcgattagctaattcatctattgttggggatgaccctcttttcacatgggagcatgttgatcatgccatcggtgcatctagacaacttcatggccgctactttcctaggagagctcatggtactcaagtgccaattcttgaggatgatgaagatgatgttgatgagggtgatgagaatgaagacgatgacaattttgtgcttgacgaccttgacatggatgatgaagaaacaaacaacagtggtggctgtggtgatgagcaagacaaggatgatgttggtttagatgatttggatgatggttattgagtgtttgagtaactcttgtgtgcttgtggttgtggacatggcattctactttagttgctttagttgaacttgtgttattgtggtaatgtggttgtggacatgtcattttgcacaatattattatgtgaacttatgttggttgtttggtatttgacttg

SEQ ID NO: 111325 - DNA, 414 bp, Zea Mays
atggcgaggtgctccgacgagggcatgagcgacgtcggggcgagctcgcgacggaagccgaacgcagatgagctgtgcaacgccgacgaacggcggtccctaggcgctgtgctcaagcaagggcaagagtcgggagagagaaaggagtggagaggaggttggcgaagaatgaagcactgcccggcctctcctggcttgaggacgacgtgggtgggcgggcggttttgggagggaggagctgacagcgggcccatgcgtagcgacgacgttgggcaacgcccacgcatgcgcgcgacgcggcagggagcgcgcggccacgggcgagacgtgcagggacgtggcggcggttgggcaagcgagcgcgggcgcgacgcgctgggctgcgtgcactacaaccttttaggccttctatga

SEQ ID NO: 111326 - DNA, 359 bp, Zea Mays
tttatattggactgacagttggctgacattattacctcctatgattgaagaatggatttctgttaaggagaaattggttgccctaaaaaatgcagaaccttatgtacaaaaggtatcaacaagatgttaatgggagaatatgcagaaagctgatggatgtacttgcttttttgtacttgcttttttgtacttccttttttgtactagctgtaacacatttaccttgttctctcaaacactaatggatgtacttgcttttttgtataaaggattgagggagaggaagcaaaatgactgtatgggagaatatgcagaaagctgaagcagaagcagccatacaaaagtttttattgtgctag

SEQ ID NO: 111327 - DNA, 378 bp, Zea Mays
atggacagatcatggatcaatgcaacactattcagcaagccacacctggaaggagttagtgagttcatgcagcttgtaacagagcgatttaatgtgaatgaagaaatactttgtccatgccgcaagtgtttgaatcgtcttagtggacatagaggacaggtggaggaccacttatatcttcatggcatggctagtacatacactaggtggatgtatcatggagaagccatggatggcataattaatgaaaatggtgaccagcaggatgaacatgtgagtttcaatgagatgctggtatgacccgagatgaagatcttggtgataggattatgtatggtagaggagttatacactgcggaagaagaggcgaaaaggaaa

SEQ ID NO: 111328 - DNA, 531 bp, Zea Mays
atggagtgggcgtcgatcctgacaaggtcagcaccgagcccgacctccttgacgagcggcaggttctgggtgttgaggaccacgacgcgccctccgttcttgatgtcgacgtcaagcggcgcctctaggcagttgaggaccaggccctgcctgtcctcgtcgcgcgcctcgggcatcttgtgcccgtccttgaccctgacaatgccggatccgggctgggtggagacgagcttggcggcgtcgtcctgggtgaggtcccatgcgcgggcaacgaactctgtggagaagcccgtgaagatgcccgtggagccggtgagctggaagtttgtgaactggcccggcttgtggcccgtggaggtgtcgccgaggaagagcaccacgaggtcggagatagcggcgtcggcgttgttgtgccaccaggtgacgacgccgaaggggagcgccagcgcgtcgccttccttgacggagatgaccttctccttggtcgcctccgggagaaccacgccgaatatacctttgcctgtgcataca

SEQ ID NO: 111329 - DNA, 91 bp, Zea Mays
ggacagtggaacaccattttccatttttacattcatatattatttataaaccatttaaaactacttaatatgcatcaaacaagttaaatca

SEQ ID NO: 111330 - DNA, 2085 bp, Zea Mays
aaaaatcccacaattcatttcacttatcagtcgcgtcgcgtcgcgtcgcgtctctctctctcttccccgacacggaagtcactgtcctccgcggccccaccccgccccaccgccacacacaacacaccgcacactcccctgcgccaccttttcttccacagcttccaacgccagcccgagctcccattccaaaacatcactccctcgcgaaccccaagaactgcagcgacggcaatggcgatggcggcggagggcgcggcgagcgagccagagctggtgtcgatcccggcgacgccgcacggtctgtcgacgccggagggcgcggccacgccgaccggagcgggcgggggcggcggcggcaggagcaagggctccgggaccccagggcgtcgcgtggtggagggcctgcgcgggtacctggaggacgtgggccacctcacgcgcctcgacccgcgcgacgcctggctgcccgtcaccgagagccgcggcggcaacgcccgctacgccgctttccactccctcaacgccggcctcggcttccaggcacttctcctcccgctcgccttcccggacctcggctggagctgggggataatttcattgactattgcttatttctggcaactgtacacactgtggatcctagtgaagcttcatgaggctgtgccaggcaggaggtacaacagatatgttgagcttgcacaggcagcatttggagaaaaaatgggaatgtggctggctcttttcccaactatttatctctcggcaggcactgcaactgcactgatccttgttggaggggagaccatgaagctgttcttccaaatagtgtgtggcccactctgctcgccgaatcccattacgacagtcgagtggtacttggtgttcacatccttggcagttattctttcccagcttccgaatctcaattcaatcgctggtctttcactcatcggtggggcgactgcgataatgtactgtaccatgtcatgggttctctctgtcagccaaccgcggccaccgacagtatcttatgacccagtgacatccaattctttcggtttatccctattctcaatcttgaatgccctcgggataatagcgtttgccttcagagggcacaatcttgctctggaaatacaggcaacaatgccatcgactttcaaacatccagcacatgtgccaatgtggcgtggggccaaagtagcgtatctcctgattgcaatgtgcctcttccccgttgcagttggaggctactgggcctacggaaacatggtgccaccaggagggatgctggcggcactctacgccttccacagccatgacatctcgcagggcgttctcgcgacgacatgcctcctcgtcgtgctcaactgcctcagcagcttccaaatttactccatgccggtgtttgacagctttgaggcctactacaccggccgcaccaaccgcccgtgctcggcatgggtacggtcagggttcagggtcttctacgggttcctctcgctgttcatcagtgtggccctgccatttctctccagccttgccgggctgctgggcgggctcaccctgcctgtgaccttcgcctacccgtgctttatgtggatctgcgtcaagaagcccgagaggttcagcttcagctggtacctcaactggggccttggtctgctcggcacagcgttcagtctggcgttctcgctgggtggcgtctggagcatagttaacaatgggatgaagctcaagttcttcaagcctaactaggtacatagattgctcgcttgctccaatctgcatgcaagttattagaagaaattagtcgtggaactgaatgttacatattactactacataattatgctgtatgacgactcctacattggcttggtaagaacaatggcgtgtatgtaagttaatgtctgagaaattcgaaatctgaggggctttgcgtatagagatatttccatgtattttagtatcagctgctaaaatctcgattcctgtatatggtggtggttgtctgcttcagtgtactttgaactttagaaagttgtcagtaatttgaggacttcatcagcttcacgttcg

SEQ ID NO: 111331 - DNA, 185 bp, Zea Mays
ccacaaaacagatcctatctctaaaaccgaccatatccacaaaacagatcctatctctaaaaaccgaccatatccacaaaacaaaatcctatctctaaaaattaaccctatccacaaaatagatcttatctctacaaaccgaccctatccacaaaataaatcctatctctaaaaccgaccctatc

SEQ ID NO: 111332 - DNA, 1938 bp, Zea Mays
caaaatattcaccacatcaaatatttgggacgaaggcagatgagttatctgatttcaaaatatctgtgatttccattaaaaaagaggaatatagaaaaaatctgaaaaactaaaaaaaaaaatctttcagctctatcctctaccgccgccccttgatattttttcagccgacgcaccgcctttgatcttatcttgctccttccgattttttttaccagtcgccggtacttatcttcttccctccgctctagcgaccatcccacgcgcccttgatttttcctgccgcccaagcgtcatcccgaagccttctctggattcttcttggagctgccgcaacctccatttcctacgcgcgctcttcctggattcagcgctacggctggtcactacggcgtgctccttttcttcttccctagtgctcgccgcgagcccagctgcctctctctcccatggccggtgatgctccagctccctgcgcgctctatttcctcgcgtggcttcctgctcgcctggccgcgcgtctaggagctctccatcgcggtgcgcgcttcttccccgcgtgctcctccctgcggctcgccctctctccctctcagctcgccgcatcctgctgaggctctcccatggccgcgcccctgctgcccgccggtgcttgccgcgcgcgcttagtctccctagcgctcgaagcccagtcaaccagcccaggcgtgtttctctcctgctctgctcgtcagccgcgtgcatctcgagctcagctcctgcgtgtacacagccgatcggcttcccgcgcgctgctctctgcgctcgcccctggctcccatggcgcgctctactctctgcgcgcagtgaggctcctgcgcgtcgcgatctcccaagctcgccatggctgccggacgagtctctcccctctgtgctcgtcttcttcgagcttggttcctgtgagcgcagccgagctcctctgcgtgtgctgcgcccagccaaggttcctccctgcgcgcgccctcaattcaccgtgtgcccagctcgctccagctcgccggttgagcttctacctcggcgtcgctcccatgcccgtgcttgcccgtggtcgcgcgcagtcgcccagctcagcctctgctctgttcctgctgctgtgcgcgtgctcgtcggtgtttccagctcgcccgaccggagttttcctgcgcgcgccattttcctatctcagatttcgccagccgccgttgtcctattcgcgtcagcacgcgaccgtggtcgtgttcatcgagttcgccaacgttttgttgtcgattcgattgtcgtcgctgctgcgtgcctcgctgtgtgctcacgtttgacgtcgagctgttaaaaccgtcctcccttgctcataacctcgctgtcgtcagagccctccctagattcgggtcctcacccgagcccgcgctaacctgcttgaccacacctcgcaagctcgctccagactcgatctcgtcgtcgttccgtacgtcgtcccgcgctaatcccaagagtcgggtgaagacgaagctagcatcctgatatttaccaagcactcgacaaaaagctcgaacaagtcgtcgatcgtcatcctcgtctgcgccaagatccgagaagattaggcgcagaagaaaataaatcagtacgcggccgaagaattctcgatgtggataaagatgaagcgcgattcgacgcagcactcaccctattttcgatgaaatgctgagctaaaaggcatcgtcgatttcgtggtttcaagtcagatttaatgagggtaagttaattcgttattccagtcaactaggtatataaatagattaaatagaattgttggtcgcgataattgttattaatttagcatacgtatattgtgatgttcgatctagatgaatcggtaaatcaagttaattaagatacacagtttaaagagttaatttgattgtt

SEQ ID NO: 111333 - DNA, 729 bp, Zea Mays
atggcgctcaagctcccttgctctcttctttccgcgcagctctctggtgccgtgcccctccttctccaccctgcacgctcggctcccatctcaccaaccatggtcgcgccttgctccctccacgcgtgcggccctgttccccgtgctgcgcgtccctccctctcccctctgctcgtcggccgcgcccatgcccatctcctctgccgagcagctcgcccaggctccctccatggcggatctcccacgtatgatgctgcctgctctttttcgtcgtgtggcactgctccccttcgcaaactccctcagcgcgctctccctggtacccctacccaagtctggtcgccggacctacaccaacccctgcgcgcgctagtagccgcgtcctgtttgtctttctgcagtgctcgacgcccagcgactgctccagctcggccatggccgctgcgccgtgtccttgcgctcgccgctggagctcccacgcgcttggctgcaagcttctccctgcttccccagccgagcgccgtgaagtccctgcgcgcaagctatctgttggccacgtgcgaagctctctgttcgctgtcaaattgcttgcttgctgtttacgccgtcgaagttccctcgccgtgcgctctagcgtcggctgccgccgattccgccattaaactttcaagctcgccaacgctccagctcgttgttgtcgccaagtccgaatatcacatctcgttctag

SEQ ID NO: 111334 - DNA, 406 bp, Zea Mays
ctgctatggctggccgagccccctgctcgcgccttcagttcgtccaaacattgccaagtccctccctagtttgagctccctccctgctccagctttgtctaagtcgcgcagcctccagccatgcgcgagcagccgttgtccgcccctgccctgccgtgctccggccagaccacccacaggcgtgtcaaggcaggataaggcccatgcgcgcgatagcggccggcctgaccctcgtctgcgtggcctagtggctagcctgtggcccggcgtgatcagcctgccattgcggcggcgcaacccgccatcctcgccgtcgtcatgcccgtgtcctcgtcgtcgctcgtgcgctgcgtcgtgcacgcaacatgtcgtcgtatctcgcctcgtctcgccgtcgtcgcgaggt

SEQ ID NO: 111335 - DNA, 321 bp, Zea Mays
cacggacactgaaaggcggatgtgcggattggcttatagagaaatgtactgaacttggagcttctagtgttacccctctcctgacagaacgatgtcacacaatagcggaaaatcgggtggacaggctgcaacgccttgtgctggctgcaattaaacaatgtatggagtttgggtatcacctccgttcatggcatgttaaacaatgtatggagtttgggagccttaaaacaagaggatacaagtggcgacatcacaacccctacaagcttgtgccttaaaacaagaggatacaagaagttggagtgcttttgtgaaggcttt

SEQ ID NO: 111336 - DNA, 295 bp, Zea Mays
atggagcttacctacacggcagcagcgagcagacgtcgatctggcggcacgacgagcagctacaggaagacgagggcgagcagcaaggtgctgatctggagcgtcatgggcggctgggcgagcggttttggtgagggagaggcgacatgggcatagccagaggagagaggtggttttgggaagatgaatagtgccttgcgggctgggcaacttgtccacgcgtgcacgttgtgcagccgggcaaacagcacgagaggtgggttgggggcgcgctgggccaaatgtccgagatggt

SEQ ID NO: 111337 - DNA, 699 bp, Zea Mays
aaccctaataacatttcctactcctgccggatcagactagcgagccaagccaccgacggccgacgtcgagcctccgcggccgagcctccgcctagcaccaactccgtcgtcgatcgtcctatgcgaccacgcccccgtccgccttccgtctcctgcctccactgagtcgcgggcgcgacatcggggaacgccaaggctgagcttcgcccatacgcctaccgccctgttatgccccgaaccgccgtgctgaggtccgcccaggccgggccaggagcttctcccggcagacccacccccgcccaacggagctccatgcctccgcccagggccattgtccgagctacgccccacgctcctgtccagtgccctggccacttagatggttctgctcagtcatggtatttttagtgtctggttcaacaacttcaacttcaaccaagggacgcatctatcacaagacgtatggttgccaaatgaatataagtgacatggagattgtgctttctatcatgaaaaatgaaggttatattgaaattgttcctcatcctgagagtgcatataatatttatcaacacctatgacatctaggacaatgtagataatatttatcaacatgatactgatgtatccttaatccttactgttctccatatattactcccatggtacattgttgctctggagattttcttacctatg

SEQ ID NO: 111338 - DNA, 803 bp, Zea Mays
aaccctaataacatttcctactcctgccggatcagactagcgagccaagccaccgacggccgacgtcgagcctccgcggccgagcctccgcctagcaccaactccgtcgtcgatcgtcctatgcgaccacgcccccgtccgccttccgtctcctgcctccactgagtcgcgggcgcgacatcggggaacgccaaggctgagcttcgcccatacgcctaccgccctgttatgccccgaaccgccgtgctgaggtccgcccaggccgggccaggagcttctcccggcagacccacccccgcccaacggagctccatgcctccgcccagggccattgtccgagctacgccccacgctcctgtccagtgccctggccacttagatggttctgctcagtcatgtttagtgtctggttcaacaacttcaacttcaaccaagggacgcatctatcacaagacgtatggttgccaaatgaatataagtgacatggagattgtgctttctatcatgaaaaatgaaggttatattgaaattgttcctcatcctgagagtgcatataatatttatcaacacctatgacatctaggacaatgtagataatatttatcaacatgatactgatgtatccttaatccttactgttctccatatattactcccatggtacattgttgctctggagattttcttacctatgctgttatgatcataactagaatgaccaattcgttgaacaggagtgcaagaaacttgtcattgttcacctatccgagagtattttgttgttctaaggaatttaaaactgc

SEQ ID NO: 111339 - DNA, 888 bp, Zea Mays
aaccctaataacatttcctactcctgccggatcagactagcgagccaagccaccgacggccgacgtcgagcctccgcggccgagcctccgcctagcaccaactccgtcgtcgatcgtcctatgcgaccacgcccccgtccgccttccgtctcctgcctccactgagtcgcgggcgcgacatcggggaacgccaaggctgagcttcgcccatacgcctaccgccctgttatgccccgaaccgccgtgctgaggtccgcccaggccgggccaggagcttctcccggcagacccacccccgcccaacggagctccatgcctccgcccagggccattgtccgagctacgccccacgctcctgtccagtgccctggccacttagatggttctgctcagtcatggtatttttagtgtctggttcaacaacttcaacttcaaccaagggacgcatctatcacaagacgtatggttgccaaatgaatataagtgacatggagattgtgctttctatcatgaaaaatgaagcgatacgggtctgccatctctatatgacatttggctgtaaatggattatgatcatagttgaataagttggagcgtcaggtcaatggtccccccaataattaaactagatggtggagtggagctttgttttgggatgatgcaagcaacttttatgtttcagaacattgtactcaactgatgcttgtggccgttgaacctattctacttacttttggatttaagttaaggatagttaaaaatatttgatgtttaatacttgtgttggatgttttatgtgtcaattctatgtggatgctagaaaagttgtgtacactcatgttatttgatgaaattgtatgcacgatttggtttgaattcaattgaata

SEQ ID NO: 111340 - DNA, 891 bp, Zea Mays
aaccctaataacatttcctactcctgccggatcagactagcgagccaagccaccgacggccgacgtcgagcctccgcggccgagcctccgcctagcaccaactccgtcgtcgatcgtcctatgcgaccacgcccccgtccgccttccgtctcctgcctccactgagtcgcgggcgcgacatcggggaacgccaaggctgagcttcgcccatacgcctaccgccctgttatgccccgaaccgccgtgctgaggtccgcccaggccgggccaggagcttctcccggcagacccacccccgcccaacggagctccatgcctccgcccagggccattgtccgagctacgccccacgctcctgtccagtgccctggccacttagatggttctgctcagtcatggtatttgtctggttcaacaacttcaacttcaaccaagggacgcatctatcacaagacgtatggttgccaaatgaatataagtgacatggagattgtgctttctatcatgaaaaatgaagcgatacgggtctgccatctctatatgacatttggctgtaaatggattatgatcatagttgaataagttggagcgtcaggtcaatggtccccccaataattaaactagatggtggagtggagctttgttttgggatgatgcaagcaacttttatgtttcagaacattgtactcaactgatgcttgtggccgttgaacctattctacttacttttggatttaagttaaggatagttaaaaatatttgatgtttaatacttgtgttggatgttttatgtgtcaattctatgtggatgctagaaaagttgtgtacactcatgttatttgatgaaattgtatgcacgatttggtttgaattcaattgaatattgatttt

SEQ ID NO: 111341 - DNA, 1654 bp, Zea Mays
aaccctaataacatttcctactcctgccggatcagactagcgagccaagccaccgacggccgacgtcgagcctccgcggccgagcctccgcctagcaccaactccgtcgtcgatcgtcctatgcgaccacgcccccgtccgccttccgtctcctgcctccactgagtcgcgggcgcgacatcggggaacgccaaggctgagcttcgcccatacgcctaccgccctgttatgccccgaaccgccgtgctgaggtccgcccaggccgggccaggagcttctcccggcagacccacccccgcccaacggagctccatgcctccgcccagggccattgtccgagctacgccccacgctcctgtccagtgccctggccacttagatggttctgctcagtcatgtgtctggttcaacaacttcaacttcaaccaagggacgcatctatcacaagacgtatggttgccaaatgaatataagtgacatggagattgtgctttctatcatgaaaaatgaaggttatattgaaattgttcctcatcctgagagtgcatataatatttatcaacacctatgacatctaggacaatgtagataatatttatcaacatgatactgatgtatccttaatccttactgttctccatatattactcccatggtacattgttgctctggagattttcttacctatgctgttatgatcataactagaatgaccaattcgttgaacaggagtgcaagaaacttgtcattgttcacctatccgagagtattttgttgttctaaggaatttaaaactgcttgttgttccactatttgaactctgcaacaatgttcaggtgatgcagcattcatagtctcgttgtcgatggtgtccggctgaaactttggaaactttacacatccattgagttctcgatctgggagcagtaaatttatcttttttgaagtagagattgtacatggcattcttgttttatctattttgtttcgattaaccttgtttgtcttaaactgcttacattccatatataggttactgcctccattctacagggtattgctagtatgatgattgaaatacacaatttattgatattcagacttaatatattcttgtgagcctttccagccataactgttgtacatggttttccttcttttgtttggccataaccagtgtgtgctaatattgtatattgtgtcatgctttcaagtttcaagaatttattaagattttgtttctaaaacctgtttcatgtacattgatgcagcgatacgggtctgccatctctatatgacatttggctgtaaatggattatgatcatagttgaataagttggagcgtcaggtcaatggtccccccaataattaaactagatggtggagtggagctttgttttgggatgatgcaagcaacttttatgtttcagaacattgtactcaactgatgcttgtggccgttgaacctattctacttacttttggatttaagttaaggatagttaaaaatatttgatgtttaatacttgtgttggatgttttatgtgtcaattctatgtggatgctagaaaagttgtgtacactcatgttatttgatgaaattgtatgcacgatttggtttgaattcaattgaatattgatttttattaatta

SEQ ID NO: 111342 - DNA, 1557 bp, Zea Mays
ctgccggatcagactagcgagccaagccaccgacggccgacgtcgagcctccgcggccgagcctccgcctagcaccaactccgtcgtcgatcgtcctatgcgaccacgcccccgtccgccttccgtctcctgcctccactgagtcgcgggcgcgacatcggggaacgccaaggctgagcttcgcccgggccaggagcttctcccggcagacccacccccgcccaacggagctccatgcctccgcccagggccattgtccgagctacgccccacgctcctgtccagtgccctggccacttagatggttctgctcagtcatggtatttttagtgtctggttcaacaacttcaacttcaaccaagggacgcatctatcacaagacgtatggttgccaaatgaatataagtgacatggagattgtgctttctatcatgaaaaatgaaggttatattgaaattgttcctcatcctgagagtgcatataatatttatcaacacctatgacatctaggacaatgtagataatatttatcaacatgatactgatgtatccttaatccttactgttctccatatattactcccatggtacattgttgctctggagattttcttacctatgctgttatgatcataactagaatgaccaattcgttgaacaggagtgcaagaaacttgtcattgttcacctatccgagagtattttgttgttctaaggaatttaaaactgcttgttgttccactatttgaactctgcaacaatgttcaggtgatgcagcattcatagtctcgttgtcgatggtgtccggctgaaactttggaaactttacacatccattgagttctcgatctgggagcagtaaatttatcttttttgaagtagagattgtacatggcattcttgttttatctattttgtttcgattaaccttgtttgtcttaaactgcttacattccatatataggttactgcctccattctacagggtattgctagtatgatgattgaaatacacaatttattgatattcagacttaatatattcttgtgagcctttccagccataactgttgtacatggttttccttcttttgtttggccataaccagtgtgtgctaatattgtatattgtgtcatgctttcaagtttcaagaatttattaagattttgtttctaaaacctgtttcatgtacattgatgcagcgatacgggtctgccatctctatatgacatttggctgtaaatggattatgatcatagttgaataagttggagcgtcaggtcaatggtccccccaataattaaactagatggtggagtggagctttgttttgggatgatgcaagcaacttttatgtttcagaacattgtactcaactgatgcttgtggccgttgaacctattctacttacttttggatttaagttaaggatagttaaaaatatttgatgtttaatacttgtgttggatgttttatgtgtcaattctatgtggatgctagaaaagttgtgtacactcatgttatttgatgaaattgtatgcacgatttggtttgaa

SEQ ID NO: 111343 - DNA, 810 bp, Zea Mays
ctgccggatcagactagcgagccaagccaccgacggccgacgtcgagcctccgcggccgagcctccgcctagcaccaactccgtcgtcgatcgtcctatgcgaccacgcccccgtccgccttccgtctcctgcctccactgagtcgcgggcgcgacatcggggaacgccaaggctgagcttcgcccgggccaggagcttctcccggcagacccacccccgcccaacggagctccatgcctccgcccagggccattgtccgagctacgccccacgctcctgtccagtgccctggccacttagatggttctgctcagtcatggtatttttagtgtctggttcaacaacttcaacttcaaccaagggacgcatctatcacaagacgtatggttgccaaatgaatataagtgacatggagattgtgctttctatcatgaaaaatgaagcgatacgggtctgccatctctatatgacatttggctgtaaatggattatgatcatagttgaataagttggagcgtcaggtcaatggtccccccaataattaaactagatggtggagtggagctttgttttgggatgatgcaagcaacttttatgtttcagaacattgtactcaactgatgcttgtggccgttgaacctattctacttacttttggatttaagttaaggatagttaaaaatatttgatgtttaatacttgtgttggatgttttatgtgtcaattctatgtggatgctagaaaagttgtgtacactcatgttatttgatgaaattgtatgcacgatttggtttgaattcaattgaata

SEQ ID NO: 111344 - DNA, 1440 bp, Zea Mays
cgctgcgcttcttcctctgcgctcctcccctgctcgcttcttcacgcgtgcagcttcctgcagcccaccgcccacgcttcctcatctttcttctaccagcgctcggcttttagccaccgaagttggccgatcgtcgaccctgcctggacctccacctccggccactgtcttggtctttccctgctctggatccatggcaactagatccgcccagctgagttcgtcggacctctggtctttgcctccccacgcgccatggttgttggaagctccatcagccatcccgccgaatgtgcgacctcttcagctcgccggtgctccctctgcttctcccatggccgccgcgccctttgctcctcccagccggccgaggtccctcccatggcgtcttggagccccagctcggcctcctccccagcgccatcccgagcctctccgtgcacgcgcccctggcccctgctcggatctcactccagctcaccgatccccttccctgtcgtggaggcaggccgctactgctcggcttctctggtgcgcgtgatttgccggccaagtcccttcaccggtggtctcctcgccgtgtgcgctggtcgccttgtgtgctcggccgcggtgcgccctactcgcgttctaggttggtccgggcgttgcaggctccgttcggcgtcgttccctgctcagccttcacagctagtgcgtcgtcgttcgtctgtggtcgagcgtctgctccatcccggcaccctgcactagtgctcgagaaaaatcccaaacgaatcggcatgccatcgtctgcatcgaatgggagttgtggtgccgacaagtcgacatcgtcattcgtctcctcttcgggtctccaacttgtgttcatgccaaaaacaaataatccgagaagattaggcgtgaaaggaaacaaatcagtacgctgccggagaattctcgatgtggatggagaagaagtgcgattcgatgcggcactcaccatgtgttcggtgaaatgctagagttgaaaggcgtcgtcgatttcgtggtttcaagtcgaatttaattatggtaagctaattcaccacttctaatatttggtttaatggatggattgatagatatgtatgcagcgacgattatcccgcttgtagcacgggcacgtgtttattagacgcttgttggaatacgggagctacatgtaacgtgatgattgtgttcacgattgcgaggttgttgtgccgtgtagctaagtttaggttaaaagacataggttatgcgagaaggattaaatcggtgtttagtatccgatgagtggtcgaattaacattatgcaatgtaggtcttgtgtttctgtttctagtgtctagtcgaagtattgtgtatggcggatttcgtttagttgtatggagtcgatgccctgctatgatatccttgatgctttatgcttgtgatttgatg

SEQ ID NO: 111345 - DNA, 820 bp, Zea Mays
cgagcgctcagtcgtccctcctctctctaccctctgtgcgcttcatctccctggctagaacttccctgcgcgcgcctgctcccatgccgcgtcccctcacctcgttcctctctcgctcgccccagcacctggccgagcttcctggcctttgcgccctggcccctctactcggtgctctctcgcccatggcgcgcaaccgcgtcttcaagcccggcctccagcctcctcccctgcacgacgacccagctccctctcccatggcggctccctccgcgcgtccctggccctagcatggagctcgcccaatctgcgtgtcgtgctcctctgctcgccctccctagccatggaacttcctatgcgcgcccggccggagtttcctcggctcggacctttctgccatggcgcgccctgctccctattgccgcgaactccaactcggcgcctagctcccctgcgcgctctgctcccttccccatagtgcgccctcgccctctcgtttctctacttgccgtcgtgccctgccctctgctctagcttgccgtgcgcccagcggattccagcaccgtgaagtttccctgcgcgtgcgcgctcctgccgagctcgcccctgcccatgccacgcgcttccttggtcgtccctgcgcgcagctgcgagctctgcttggccgctcctcctgttccctggccatggtggtgttgtggcatggcgacgtcgtgcacgtcgtggcagccgtcctggtcgtgaagcagtccgcgccgtagaattcgcccggccacgacctcatcgaactgcgaagctccctcgccgtgcgctctggcat

SEQ ID NO: 111346 - DNA, 1380 bp, Zea Mays
cacatgtgatgatgggttcactagtgtaggcttgagtgaaaaccctaagtaacacctggggtgttacactttcgaccgtacgctgttgatctcaaagatcagggaggagtaacctgactgcatgatgcttacattctcagttttcccctcaccgaaagtatctgatactgtggttgagccatacaatgccactctttctatccaccagttggttgagaacgctgatgagtgtatggttcttgacaacgaggccctctacgacatttgcttcaggactcttaagctgaccacccctagctttggtgatttgaaccatttgatctctgcaaccatgagtggagtcacctgctggctaaggttccctggtcagctgaactccaacctcaggaagctggcagtgaacctaatccccttcccccgcctccacttcttcatggttggcttcgcgccgctgacgtcccgtggctcccagcagtaccgagcactcacagtccccgagctcacacagcagatgtgggacgccaagaacatgatgtgcgccgctgaccctcgccacgggcgttacctcaccgcctcggccatgttccacgggaatatgagcaccaaggaggtcgacgagcagatgatcaacgtgcagaacaagaactcgtcctacttcgtggagtggatccccaacaacgtgaagtccagcgtgtgtgacatcccgccgaggggcctgtccatggcgtccaccttcgtgggcaactcaacttccatccaggagatgttccggagggtgagcgagcagttcactgccatgtttaggaggaaggctttcttgcactggtacacgggcgagggcatggacgagatggagttgtctactgatactgaatttctaggtacattagttatattccttttatttatttaccaatacttagcgtagtatacttacattgtagagctttcggctgtcaatagggaaatctgctgggatgctttcggctatcaacagggaaatctgctaggatgcttgagtttgctgtcaacagggaaatctgctgggatgcttgagtttgctgtcaactgctggtatcatccaacttgatggcctcactttcagcagcggctccggtcggtggcccttgcataagaatggagacttgagtttgcttgtctcttttgctgtggagggtgacgtggcatccaagctccctgttggtcttgggcgtgctactgggattagcactgttcccatggtgctgcgcagtgatttttaccttttctttatgtcggctctgattctcttgtttagctacaatgtagggtcgtgtatctacagccagacctgtgggttgtttattttagttcaacatgtggatcattccctcagtgatg

SEQ ID NO: 111347 - DNA, 111 bp, Zea Mays
tgtgtttggggctgttatgtttgtctttgtttctctcctcctgttatcccctgtaattcttgtgtggcctcttggctataacttttgtgtttttgcttcttctattaatat

SEQ ID NO: 111348 - DNA, 4173 bp, Zea Mays
aagaataagagacaaagctgggtagtcgagggtaaaaaaaaccccctccctgctcctgtctgagcttcgccgtggcgtgcccgtttcgaccctggaaaatcacgaaatcgccccgacagcacacgaccgacctgtccccccttcaccgcatcagcaacatcccctctcctccctcgctccttcttcctcctcttcccgccgccgtcgtccgccgccgccgctggcttggcggccgcctctcgtacacccatcgcagttgcgggcgacgacgaccacatgactatgatgacgccgccccctctcgagcagcagcaggaggacgacgagatgctggtgccgcatcaggagctccctgtcgctggcccagaagcagccccacagccgatggaagttgttgcgcagacagagcctgccaccacagcggagagccagccgcctgaggacccgcagacgacgcgcttcacctggacgatcgagagcttcagccgtcttaacactaagaagcactactctgatgtatttgtcgttggaggatacaaatggcgtgtcctaattttccccaaggggaacaatgtggatcacttctcgatgtatttggatgttgcagattctgggaacctcccatacgggtggagccggtatgctcagttcagcttggctgttgtgaatcagatccatcctaagtatacgattcggaaagatactcagcaccaatttaatgcacgtgagagcgactggggtttcacatcatttatgcctttgagtgacctatatgacccaagcaggggctatcttgtgaatgacaccattattgtggaagctgaggttgctgtccgcagaatggttgattattggacttatgactcgaaaaaagaaacaggttttgtaggtcttaagaatcaaggtgctacctgttatatgaattctctccttcaaacgttataccatacaccatattttagaaaggctgtatatcatatgccaacaactgagaatgacatgccatctgggagtatccctttagccctgcagagcctgttttacaagctacagtatagtgacaacagtgtagcaacgaaagagttgactaaatcctttggatgggatacctatgattctttcatgcagcatgatgtgcaagaactcaacagagttctttgtgagaaactggaagataagatgaagggaactgttgtggaaggaacaattgaacaattattcgaaggccaccacattaattacattgagtgcattaacgtggactataaatctaacagaaaagaatcattttatgatctacaacttgatgtgaaaggttgtcgtgatgtttatgcatcatttgataagtatgtggaagtggagagtctagagggtgataacaagtaccatgcggagcgttatggcttacaggatgcaaggaaaggtgtgcttttccttgatttccctcctgttttgcagcttcaactgaagcgttttgaatatgattacatgcgagatacaatggttaagattaatgaccgctatgagttccctcttcaacttgatcttgatagagacaatggaaaatatctatctccagatgcagatcgaagtattagaaacctctatactcttcacagtgttcttgttcatagtggaggagtacatggtggtcactactatgctttcattcggccgacactctcggatcagtggtacaaattcgatgatgagcgggttacaaaagaagacactaaaaaggcacttgaagagcagtatgggggtgaggaagagttgcctcaaataaaccctggtttcaataacacaccattcaaattcacaaagtattcaaatgcctacatgcttgtctatatacgtgagaatgacaaggataaaataatgtgtaatgtcgatgagaaggatattgctgagcatttgcggataaggttgaagaaagaacaagaagagaaagagcacaagaagaaggagaagtctgaagctcatctctacactatcataaagattgctcgagacaaggatttaaaggagcaaattggtaaaaatatatattttgacctggtggaccatgaaaaagtttgcagcttccgcattcagaagcagttgccttttactgcattccaggaggaagttgcaaaggaatttggcatcccagtacagtttcagcgcttctggttgtgggctaagaggcagaaccatacataccgcccgaatcgtccattgaccccccatgaggaagcacaatcagtcgggcagcttagggaagtctcaaataaggcacacaatgctgagctgaagctgtttttggaagttgaacttggaccggagctatgtccaattcgtccacctgagaagagcaaagaagacatacttcttttcttcaagctctataatgccgagaaggaagaactttgttttgtcggtaggctttttgtgaaggctctgggaaaaccgtctgaaatattgacaaaactgaatgaaatggctggattttctccaaatgaagaaattgagctatatgaggaaattaagtttgagccaaatgtgatgtgcgaacatattgacaagaaacttactttccgttctagtcagcttgaagatggagacatcatctgtttccaaaaggctcctgttccagatggtgatccacaagtgcgctatccagatgtcccttcattcttggagtatgttcacaataggcaggttgtgcactttcggtctctggacaaaccaaaggatgatgatttttctttggaattgtcaaagcttcatacttatgatgatgttgttgagagagttgcacataaacttgggttggatgatccatcaaagattcggcttacatctcacaattgttattctcagcaacctaaaccacaacctattagatataggggagtagaacatctactggatatgcttgtgcattataaccagacttctgatatcttgtattatgaggttctggacattccactgccagaattgcagtgtttgaaaacgcttaaagttgcattccaccatgcaacaaaagatgaggtggttgttcatagcataagacttccaagaaacagcaccatcagtgacgtgatcactgatttgaaaaccaaggttgaactatcaaatcctgatactgagctccgcttgcttgaagtattttaccacaagatttataagatttttccgcctcatgagaagatagagaacataaatgatcagtactggacattacgagctgaggagattccagaggaagagaagaatcttggcccacatgaccgtttgattcatgtttatcattttatgaaagaccctaatcagaatcagcagattcagaatttcggagatccttttttgatggttatccgtgaagttgagactgctgcagaggtactggagcgcatccaaagaaaacttagagttccggatgaggacttctccaagtggaagcttgcattcatatccatgaaccggccagagtacctccaggacactgatgttgtatcagcacgttttcagaggagagatgtatatggtgcttgggaacaataccttggcttggagcacaccgatacaacatcgaaaaggtcttacacagccaatcagaatcggcacacctatgagaagcccgtgaaaatttataattgagaaaacttaaagtttcaatcgattgacggaggcctcgacaacagtatgcccaagatgatgaggcttagaacagaaaaattggcagaggaatatagttgctgcctgtgctgaggcctatacaagcccatgaatgccacgtcaaccttcagtgttgttactgctgttgtctattggttcttctcgaggctttgcttccaagcaaccaagcatgtgtgttggttttttcatcgtgtctagtatgatggcccctgctaggatagtttgcttaatttgtagagcaaagcgagtacataaaaaaagatttttggtagggggcatgtatacaggattatagccgatactgattgctgccgcttgctgctgtgggaacaatggcagagattgtataatgggtttgttattggttcctaattttcgtgatgttgagaaatgtaagaggagaaccgcgtggatagtacagttttgagttccagcctaggctgtttgttgcaacttggcatatttggtataatattctgctttccacaa

SEQ ID NO: 111349 - DNA, 1836 bp, Zea Mays
gtttcttgttaatccatttgtcaatctttctgttgaacttcttttacagatgactcacatggtgacatgacatcgctttgctattacagttttgtcggtaggctttttgtgaaggctctgggaaaaccgtctgaaatattgacaaaactgaatgaaatggctggattttctccaaatgaagaaattgagctatatgaggaaattaagtttgagccaaatgtgatgtgcgaacatattgacaagaaacttactttccgttctagtcagcttgaagatggagacatcatctgtttccaaaaggctcctgttccagatggtgatccacaagtgcgctatccagatgtcccttcattcttggagtatgttcacaataggcaggttgtgcactttcggtctctggacaaaccaaaggatgatgatttttctttggaattgtcaaagcttcatacttatgatgatgttgttgagagagttgcacataaacttgggttggatgatccatcaaagattcggcttacatctcacaattgttattctcagcaacctaaaccacaacctattagatataggggagtagaacatctactggatatgcttgtgcattataaccagacttctgatatcttgtattatgaggttctggacattccactgccagaattgcagtgtttgaaaacgcttaaagttgcattccaccatgcaacaaaagatgaggtggttgttcatagcataagacttccaagaaacagcaccatcagtgacgtgatcactgatttgaaaaccaaggttgaactatcaaatcctgatactgagctccgcttgcttgaagtattttaccacaagatttataagatttttccgcctcatgagaagatagagaacataaatgatcagtactggacattacgagctgaggagattccagaggaagagaagaatcttggcccacatgaccgtttgattcatgtttatcattttatgaaagaccctaatcagaatcagcagattcagaatttcggagatccttttttgatggttatccgtgaagttgagactgctgcagaggtactggagcgcatccaaagaaaacttagagttccggatgaggacttctccaagtggaagcttgcattcatatccatgaaccggccagagtacctccaggacactgatgttgtatcagcacgttttcagaggagagatgtatatggtgcttgggaacaataccttggcttggagcacaccgatacaacatcgaaaaggtcttacacagccaatcagaatcggcacacctatgagaagcccgtgaaaatttataattgagaaaacttaaagtttcaatcgattgacggaggcctcgacaacagtatgcccaagatgatgaggcttagaacagaaaaattggcagaggaatatagttgctgcctgtgctgaggcctatacaagcccatgaatgccacgtcaaccttcagtgttgttactgctgttgtctattggttcttctcgaggctttgcttccaagcaaccaagcatgtgtgttggttttttcatcgtgtctagtatgatggcccctgctaggatagtttgcttaatttgtagagcaaagcgagtacataaaaaaagatttttggtagggggcatgtatacaggattatagccgatactgattgctgccgcttgctgctgtgggaacaatggcagagattgtataatgggtttgttattggttcctaattttcgtgatgttgagaaatgtaagaggagaaccgcgtggatagtacagttttgagttccagcctaggctgtttgttgcaacttggcatatttggtataata

SEQ ID NO: 111350 - DNA, 1323 bp, Zea Mays
atgaagaccaccaaagagaagttgttggaggctcaagaaaagtgcaagaaagcactagatggagcaaaaaggaaaagggaggtgaagactgttcgtgagctagaacttagagaggaagttcatgtgtctagggttggaggatcagaagaagtgacttgtgttggaagttcagagcctcacaaattaggccccatggacaaatggacaaaagctattgatcctacagcaaccaaatatgaatctttgactcaacagaggctgaacaaagaactttggaaagaaagattacatgaggttcataaatatattgcaagatgggcctttaaccatgatgtgaagccatctatgggctttgtatatggagaaatattgaaggcaaagagacatgtcaaagaggcccttggcaatgttgagacccgtttcaaggatgttgttgctgttattgacaagaagatggctggaagacttgattctccattgcatttgacagcttatttgctgaatccacactacacttatgctgacccatcaatctttgatgttcccagaataacagaaggtctaaggctcagccccggtcgtggtcgttctcacatgggcttcgatgccgctgtgtatgggtggggcaggggttcgggggttttctcgacctgtgtgagaaggtcgagtttttattatcatgacgacgaaatgcaagaacaagcagccaacatcgaactgcagaagtttcagaatagagaaggtccatttagcaagaagcttgcaaggacttttgaaaactttgattataatccagcatcatggtggcggctttatggaactgaaacaccagctctacagaagatggctaccaagatcctatctttaacagcaagttcttctggttgtgaaagaaattggagtgggtttgatggggtgcacactaagaagagagataggcttactacagaccgcctcaacaagttggtctacattcagttcaacaacaggctaattaataagagagcaaagatcaagtccaagaaaattactgatgttctcttgtctagtggtacaactgaagctcaaggtttcctccaagagaatggagatgattgtgcattagtctcctttagagatgacgaagacgaggaagaagtcatggaaggtacagggataccttggtctgtgcttggagatgcagagggagcagaagaacaactagagctgcgtagaagtgcaaggctgagagagctcaatgaagaagagtttgagtccgaagaagaagagtttgatgaagatgaggatgaggatgaggatgagatggatgaaaccggcgtgtga

SEQ ID NO: 111351 - DNA, 381 bp, Zea Mays
atggccagtggccgagcagtgtgttccatggcggctagagaacaacatcgacatggagcaccatggacgagcccggccatcttgggcgagcgcagggaagaagcagctcctgctgctggcgtccacgggaaaggagttgggggctgccgacgagcaggggtaagggcgagcagagaagtatcgagtggggccagggaaatgggtaggagtgaccagcgcgcgccaggggagacagatggagcagggcgcggcgcggctatggggagaaggaagagagaactccgaccaggaagccgagctggagcaaggagaagagggggggacgcgacgctgggagaaacgccggccagggagcaggatggccgcgactatggcgagtag

SEQ ID NO: 111352 - DNA, 784 bp, Zea Mays
atggaccacgacaaacatcctgctccggagtgtcctcaccaaggttggtccaagagccacccattgcaggaaaggcttttcctcgttgggcagtgggctcaagcgctagaggagaggtcatatcgctttcgtcctccccttcaacctctccggatggggaatcaagggttgacccttgtgacggagggtaatcgcctattcctctcccacctaccatgtgctgcaatgtggggtcggatcctcagcccttccgatgttggcgatggacgagctacagggctgactggagatacctcgctcggttgtgcggatgtccgacactcatatcacgggtctccaagcgtgattagccatcgtggaggcctggcaggaggctgagttggtggagcttcattaggagattgactcggtgacccaaagcgtctatgctcgcgagacaacctgcttgcaatgcttactcgacattcgaatccgcattcgaaacatcgtggatcacatccttctccatggggccggtgttgcctttgctgtcgccaagctccgcactagggtgcttcgttcgtggtctttgagaacctaatctagggatacgacgatgccgcctgtggggtcgtcagcgctgtgtctttaaaggatctgatctgatgggttccctagggccctcttctggcgttcaccttttggttcattggtgcaggcatcttgtaacaccacaaaactatcaactaaaaataatgcaattagtttattagtggtaaatatagtaatgatttttttcttccaa

SEQ ID NO: 111353 - DNA, 1459 bp, Zea Mays
aaccaaacccacacaacaaaggccgcgcggctgttggataaccaaggcgtcggaggatttgcctgccgtgtagttcttcctcgttggcacccggctccgcactggtaagaaatccatggccaaattctcctttaacgacgccgatgaagaccctccaaccttctcttccgagggtgaaaagagaaagcgcgatgacggcccaggcgaagcggcggcaagcggaggaccctctaaggcccgaattctgacggtcgagggcgaagagcaggatggaggtgcggtggtaggggcggggagggctgaagggaacggcagcaagggggtggagacggtagttggcggagaggctgacgggattagtgtgcgcatcgacccggatgtgctcgattgctccatctgcttcgatcccctccaaccgcccctctaccagtgccaaaatggccatgtagcgtgcttttcctgctggtctaggctcaccaacaaatgccacatttgttctagtgatgctaactttgtaagaaacattgcactggagaaagttgttgagtcagttaagtcatcctgctcatatgccaaatggggctgtaacaagttggtcagctatgcatgcagaaacgctcatgaagaatcctgcctttttgctccatcgatgtgtcctattcctggttgtgggtacagaggatttactggatggtggtcaggacatttccttacaaaccataatagtgatgggctgcgcttctcatatggtcagtgttttgatgtgagtttggaaatgtcagttccttttctggttcttctagcagaggatgatcacctattcattttcatcaacaagaacgtgattccctttggccatgcgctttcagtgtgttgccttaggactggcaatctgaattggaatttcttatacgaaatgagagcaactagtaaaggaaacactaaaaacagtctgcaattgaaggcttctgtcacaaatacaagggagtggcgaggtctcaatcctacagaagttttccttttggttccatatgccttcagcaaatctagcaaacttacactgaatgtctctattgagagggttgctgatgtgaagtgaatatctgcagtttgtaatgtgttgtaaaatgtaaaaaaggtggcagtgtaagtttgtctttagaaactggttttccactgaggcatctctgacccatttggtttgctaaacccttgactctattcttgtgattcagatgatgccatcaaggtttgtaactgtatgtgtatactcccatgtactaaaatctgtaactgagatgcttgacgtaggaactatatgaaatattcaatttgcattcttgtgtaaaccatgaattcttgatatacatgcaacaattggttccttctgttcttaggtctgggaatttggttgtgtttattgatgtatttagatgcaaggaatgaatggcaccattta

SEQ ID NO: 111354 - DNA, 672 bp, Zea Mays
accaaacccacacaacaaaggccgcgcggctgttggataaccaaggcgtcggaggatttgcctgccgtgtagttcttcctcgttggcacccggctccgcactggtaagaaatccatggccaaattctcctttaacgacgccgatgaagaccctccaaccttctcttccgagggtgaaaagagaaagcgcgatgacggcccaggcgaagcggcggcaagcggaggaccctctaaggcccgaattctgacggtcgagggcgaagagcaggatggaggtgcggtggtaggggcggggagggctgaagggaacggcagcaagggggtggagacggtagttggcggagaggctgacgggattagtgtgcgcatcgacccggatgtgctcgattgctccatctgcttcgatcccctccaaccgcccctctaccaggtagttattcccgttttgaaaatcgcctatattgcttgattccccgtagtaatttgggtaggatgacataatatgctgtaaaagcataatatgattagcatcctagttcctgaaatgtttgtacaaactgtaagaactaagaagcaacagtttgttactaaattgaggatatgaaaggagacagtaacatataaatacaaagcagttgacttaccagtgtgcgtgcagcacgcttcgacaaaa

SEQ ID NO: 111355 - DNA, 1494 bp, Zea Mays
accaaacccacacaacaaaggccgcgcggctgttggataaccaaggcgtcggaggatttgcctgccgtgtagttcttcctcgttggcacccggctccgcactgagaaagcgcgatgacggcccaggcgaagcggcggcaagcggaggaccctctaaggcccgaattctgacggtcgagggcgaagagcaggatggaggtgcggtggtaggggcggggagggctgaagggaacggcagcaagggggtggagacggtagttggcggagaggctgacgggattagtgtgcgcatcgacccggatgtgctcgattgctccatctgcttcgatcccctccaaccgcccctctaccaggtaaaagttggtccatgctgtatgccttctcataatatgcagaccattcttatcaaaagtcatatcttaaggttgcctttcaatgattgcagcttgtttctgtattttttcagtgccaaaatggccatgtagcgtgcttttcctgctggtctaggctcaccaacaaatgccacatttgttctagtgatgctaactttgtaagaaacattgcactggagaaagttgttgagtcagttaagtcatcctgctcatatgccaaatggggctgtaacaagttggtcagctatgcatgcagaaacgctcatgaagaatcctgcctttttgctccatcgatgtgtcctattcctggttgtgggtacagaggatttactggatggtggtcaggacatttccttacaaaccataatagtgatgggctgcgcttctcatatggtcagtgttttgatgtgagtttggaaatgtcagttccttttctggttcttctagcagaggatgatcacctattcattttcatcaacaagaacgtgattccctttggccatgcgctttcagtgtgttgccttaggactggcaatctgaattggaatttcttatacgaaatgagagcaactagtaaaggaaacactaaaaacagtctgcaattgaaggcttctgtcacaaatacaagggagtggcgaggtctcaatcctacagaagttttccttttggttccatatgccttcagcaaatctagcaaacttacactgaatgtctctattgagagggttgctgatgtgaagtgaatatctgcagtttgtaatgtgttgtaaaatgtaaaaaaggtggcagtgtaagtttgtctttagaaactggttttccactgaggcatctctgacccatttggtttgctaaacccttgactctattcttgtgattcagatgatgccatcaaggtttgtaactgtatgtgtatactcccatgtactaaaatctgtaactgagatgcttgacgtaggaactatatgaaatattcaatttgcattcttgtgtaaaccatgaattcttgatatacatgcaacaattggttccttctgttcttaggtctgggaatttggttgtgtttattgatgtatttagatgcaaggaatgaatggcaccattta

SEQ ID NO: 111356 - DNA, 1381 bp, Zea Mays
accaaacccacacaacaaaggccgcgcggctgttggataaccaaggcgtcggaggatttgcctgccgtgtagttcttcctcgttggcacccggctccgcactgagaaagcgcgatgacggcccaggcgaagcggcggcaagcggaggaccctctaaggcccgaattctgacggtcgagggcgaagagcaggatggaggtgcggtggtaggggcggggagggctgaagggaacggcagcaagggggtggagacggtagttggcggagaggctgacgggattagtgtgcgcatcgacccggatgtgctcgattgctccatctgcttcgatcccctccaaccgcccctctaccagtgccaaaatggccatgtagcgtgcttttcctgctggtctaggctcaccaacaaatgccacatttgttctagtgatgctaactttgtaagaaacattgcactggagaaagttgttgagtcagttaagtcatcctgctcatatgccaaatggggctgtaacaagttggtcagctatgcatgcagaaacgctcatgaagaatcctgcctttttgctccatcgatgtgtcctattcctggttgtgggtacagaggatttactggatggtggtcaggacatttccttacaaaccataatagtgatgggctgcgcttctcatatggtcagtgttttgatgtgagtttggaaatgtcagttccttttctggttcttctagcagaggatgatcacctattcattttcatcaacaagaacgtgattccctttggccatgcgctttcagtgtgttgccttaggactggcaatctgaattggaatttcttatacgaaatgagagcaactagtaaaggaaacactaaaaacagtctgcaattgaaggcttctgtcacaaatacaagggagtggcgaggtctcaatcctacagaagttttccttttggttccatatgccttcagcaaatctagcaaacttacactgaatgtctctattgagagggttgctgatgtgaagtgaatatctgcagtttgtaatgtgttgtaaaatgtaaaaaaggtggcagtgtaagtttgtctttagaaactggttttccactgaggcatctctgacccatttggtttgctaaacccttgactctattcttgtgattcagatgatgccatcaaggtttgtaactgtatgtgtatactcccatgtactaaaatctgtaactgagatgcttgacgtaggaactatatgaaatattcaatttgcattcttgtgtaaaccatgaattcttgatatacatgcaacaattggttccttctgttcttaggtctgggaatttggttgtgtttattgatgtatttagatgcaaggaatgaatggcaccattta

SEQ ID NO: 111357 - DNA, 1132 bp, Zea Mays
accaaacccacacaacaaaggccgcgcggctgttggataaccaaggcgtcggaggatttgcctgccgtgtagttcttcctcgttggcacccggctccgcactgtgccaaaatggccatgtagcgtgcttttcctgctggtctaggctcaccaacaaatgccacatttgttctagtgatgctaactttgtaagaaacattgcactggagaaagttgttgagtcagttaagtcatcctgctcatatgccaaatggggctgtaacaagttggtcagctatgcatgcagaaacgctcatgaagaatcctgcctttttgctccatcgatgtgtcctattcctggttgtgggtacagaggatttactggatggtggtcaggacatttccttacaaaccataatagtgatgggctgcgcttctcatatggtcagtgttttgatgtgagtttggaaatgtcagttccttttctggttcttctagcagaggatgatcacctattcattttcatcaacaagaacgtgattccctttggccatgcgctttcagtgtgttgccttaggactggcaatctgaattggaatttcttatacgaaatgagagcaactagtaaaggaaacactaaaaacagtctgcaattgaaggcttctgtcacaaatacaagggagtggcgaggtctcaatcctacagaagttttccttttggttccatatgccttcagcaaatctagcaaacttacactgaatgtctctattgagagggttgctgatgtgaagtgaatatctgcagtttgtaatgtgttgtaaaatgtaaaaaaggtggcagtgtaagtttgtctttagaaactggttttccactgaggcatctctgacccatttggtttgctaaacccttgactctattcttgtgattcagatgatgccatcaaggtttgtaactgtatgtgtatactcccatgtactaaaatctgtaactgagatgcttgacgtaggaactatatgaaatattcaatttgcattcttgtgtaaaccatgaattcttgatatacatgcaacaattggttccttctgttcttaggtctgggaatttggttgtgtttattgatgtatttagatgcaaggaatgaatggcaccattta

SEQ ID NO: 111358 - DNA, 1367 bp, Zea Mays
cacgcacctggtttcgtccccaaatctcactcaatccccagtcccgacacccatcctctccaccgaagtcaccaccgcatggacgacgccgcgaatcccacccctccaccatccacctccgccgcatccgcggcggccgcggcggcgcaacaccagcagctccagcgccaactcttcctaatgcagcaggcgcagtcccatccgcagcagctgtcgcagcaggccatgtcccgcttcccctccaacatcgacgctcacctccgccctctagggccgcttcgcttccaacagccccagccccagccccagccgtcccactcccagggtccatctcagtcgccgtcgcaggccacgcagcaggcgtcaccccagcagcagcagcagcaggcggcggcggcggcggcagcggcgcaggcacaagcacaggcccaggcccaggcggcacgggtacgaagccccgagatggagatggcgctgcaggacgccatgcgggtctgcaatccggacgtcaagacgcccttccagtccatcgaggacgctgtcaacaggttattaccttaccatgttgttgccgactatgaggctgaagaagatgacaggatccttgatagcgacacaacaggccagatcccttctcgcctgcagcaatgggaccataatattctggtgaagattgctgagttcacgacaacttttgacaagcaagtattggcatataacataatgaccaagaaaagggccatcggtgagttcaggtcggaggagcggctcatgctggagcaagccttattgcaggaggaaaagcaagctatgctgggactgagggcagagatggagtcgagagagaaagctggtcgcgaggctgccgaagtgaagatgcgtttggcaatggagcatgctcgtgctgaggcacaagctcactctgagatgatgaatcatggtcctataagggccagtgctgttgcttcgcaaggggaggatggtccgagtcatgacatggtgcaagaacatggcgaagatgggtggggaaattctcagagggatgatgaagatccatcggaggatttcctcaacgatgagaacgaacctgagaatgggaactcagatgggcaggaggactggcgcagatctggggagtttgatctcaactctaggtaaggcagttggatttccacatgaaggtttctaggtaggctacgacatgctggtattgtatctactattctattgttgtgttcggtgaagatgtctttgtggctgtaaacatggcattcgaacaattcagtttctttgtaatttgactagtaatatttacttgagcactcaatatgtgccatttccaacttggagaaaaaaaattacaataa

SEQ ID NO: 111359 - DNA, 156 bp, Zea Mays
gagattacctgtcgagggcaacaccttcaaccgacaatgacgctgcagcaggtccgtgacaccatttggcggccagtgccggctgaggctgcagcggttttgccggcccccggctcaccaagcacaagccaggtcatgactctgcattatggcaga

SEQ ID NO: 111360 - DNA, 422 bp, Zea Mays
gaggtattgtaacactatattctgaaactggatttaaggatgcaagtgggaacccaatagtttttggagttcaactaattaattatgtgtttagtttattaatccacatgccattcttgttgtacgcctgtgtgcggtgccacaggctcctggcatgcgcgttcgccggtcgcgccagcgccagcacgtgtgttgcgtcgcatcgctcaccttcacgtcagcctcgcgccaggcgagccagcactacgtgcggttgctatgcagcaccagccgctccctcgtcctgctcagggtgagacgtttcacgcagatctaatatctaggatatacaagggtcagctcaaattctcaagaccatgtacgccaaggagaggtcgtaggatcatagtttgggtaagataggtagaagatcgacgggaata

SEQ ID NO: 111361 - DNA, 147 bp, Zea Mays
atggacatgatacgaagggaggaaaggggcatcttgcagttacttgtggtggtggggtggctgccgatgacagcgatggaggccgaggcgcggaacgagaaggacgacgccgaccgcagttatatcttaggtctaaacatattctga

SEQ ID NO: 111362 - DNA, 1161 bp, Zea Mays
atctctatggagagtggagatgcgtactgacctaaccctcaagaagctcctggggatctgcagcaatggcggctccctcctcctgcatgtgtggatgagcggcaacggcatgagctaaccacccacattggccggacaagtcgccagcaggcaggcaggacgcggacacattatcctactcactggttctgggctgcccggagcaggaaccacaggccggcctcgtgggcgggaggtggcggcgccgccgccaccactgcccccaccggcgctgccgaggacgaggacgaaggccctggttgcagagaaagctgcagttgcagctgcggcggcgggagcaggggcgcagccgccggctgtacggatacggacaccgaagggcctgcgtcgtcatcgggcctcggccgtttcagccggtgcgggggtgacggcggcggggacgccgaagacgggccgccgatcccgagctggagccaggaggaaccggcgtcgcttccgccgctgcttgcgctggtgctggccgctgcttcccggacgtcgcgcggtatctctggctgctgcggtggcgcggcggtgtcgtccttgctctggcggtgcgggtgggaggggtcctgtgccatgggcctcaggacgacgacgacgctgccggggccagggagcggcggcggcggcggcagctggtgttggctgtgtcttgtgctgaggcggcgaacgctgacggcggccggcccatgggcgtggcggtgcggccggagcaacgtcaccatcctctcatgcctccccctctccggtggcccgcggccgacacaagagcaggaggaggaaggtgcaggcagaggaaggagaaaaagttccaaggagcaaggcgggtgcctttcatataaggtaaggtagacaatgaattattatgtatagtagtatatacatccatccactaatttctccctctcttgtgccgcgtgctggaggctggagcagagagaaggtaaggtgtcgtgggcgtcgcgcacagtgcctctctctctctctctctctctctctctgcaaaagtgcgttacatatgcatgcatgctgaggtcatcccatgccatgcactaaccgcgtgtatgacgttggccccgtttgtcagaaaagtccataaagaaaaactggaccaaacaa

SEQ ID NO: 111363 - DNA, 276 bp, Zea Mays
ctggttaggatccttgaactagcaggagagactgtcatgctagcttctggtactgccattggatatggttcaacattgactatgactgatacatcgaacaagattaagaaggggacaaaaggagatgtttctgtactgaatcctactcttataatttcagttcctacaattttggatcgtatcagagatgcagtgtttaagaaagttggtgagaaggggggcctaccaaaaaaagttgtttgaattttgcataaaagcggaaatctttgcatcaat

SEQ ID NO: 111364 - DNA, 498 bp, Zea Mays
tatttgatgcttagggatgccttgcactacaaagcagctttcattaggctaaaaacagcaaaccgtcaaaagtataacaacatttgtccttctgatagtgaatgggccatggctgtaaaagtttttcagtgcttgcaaagtttttatgatcttactgagttgttgtccggaacttcgtatccaactgcaaatatgttctatagaggtttctgtgagataaaggatctgcttgataaatggtgtgtggatgaagatttgactattagaacaatggcaatatccatgagtgacaagtttgagaaatattggagctgttctagtttgagtcttgctctagcatgctttcttgatcctaggtataagaagaagcttgctaaattctacatgaaaaagttctatggtgactactaccaggtccgtcttcctgagttagttggtgctatgaagaacctgtttctattttatgcaagctctaaaccttcagcttccaacaatgat

SEQ ID NO: 111365 - DNA, 597 bp, Zea Mays
tttactgggtctccaataggaaccaattcatatgcagcagcaatgataataatagcataagctgcttattcttttcaatttggtgatgctattgacagggacatagcaattactgaaatacaaggatctacatgtacacccccaagcctttggctattcatagaaaaaaaaatgtaggcttatatcagcggaaatagtgctaaactgtaccagaacgaaactaaaaaacttcaaactcaaggtcctctgagttgcttctgaactccaggcacttgccttctttcttccgctctttggcaagagtcacgatgttgcaaggttgtgtctctggtggagcagcagaccgaatcagagcccaattcaagccttcaaagaaggggtgctgcttgatctcagcagctcctctcaacgatccaaatctgttctcaggctccttaaccagtaaacctctgatgagatctttggtgttgctgctcacagctggatggtctgggaaccggagattctgcgagaccacatttgccaatgtttcatcattcccaggtcctctgaagggtgtcttgccgtatagaagttcataaaggaagacaccaaacg

SEQ ID NO: 111366 - DNA, 1812 bp, Zea Mays
cgctgcgggtgaagttcggctatctgatttgccgcccgcgatacggcgaaaccctagctccacagcgccgttgcatggagtcccagcgatacaactacggcagcggcgccggcaccggcggcaaaatccgccgctaccctccctctcgcgccgtggctgcgtcaccatatgctcgaccggccaccgccccgacccacgctcctggaaccgccacggcggcggtttcgcatgagggcgggtggctgtcccggatcatagccgccggcacctcgcgattccttccctccttgttcagcttcagcacgtctcaacctcagcaagccgcgccggccccgtcgccaacgcgcgaccagctgccagtcgtcgagccgccttcgccgcttcccccacctttagtggatgatcgtccagaatgtgaagaaaacggtggagtggctgccaataatttgtgtactgaaaatcctcaaagttgtaccaaggaagaggaagaaaacatgctaagaaattctgatgaccatggtggaacggctcttgaagaattattgaagcagagaactttcacgaggagtgagtttgaatatttggccaatttgttatggtctaaaactattggagcaaattcactgaagctagaagatggtaacgtcaggaaaatgattgtttatgacaaagaaaatgcctcggaatactccaacttacctcttaatttttccactacaacattcagcgctgatgatcaagttgccacgcctgcagaaattgcaaaagcttatatgggtttaaaatcttccaagggttcccctctacgccttagattgcacgatccctcctctatgcctatcacatctatggaagttagtatgtcacaaaaagctaagcctcccacaatcccacttgcccaaggctcaagattgcatacttccaaaacttctgattgtcttgaaagcaactacacaacaccgaatggagtaatctgcaaaatgtcatcatctccttatttcaagagtggtgtgtcttcaaaggagctatttggttctgtatcttcacattaccagacctcaaatagtgttcatacttttggcagacaggtacttattattgaagcacaattgccatctagtattgtagcatatttatttggtgtcttacaaacttcaggattactatgacagtgagttgcaaatctaagtatctaacttttctatgtagagttctaaatttctttgttccaatgttgcctaattgtttcatatggaaccttggaagtcaatccgccatttgaagtactatgctaatgttcttacactcttactagatttaatactaatggttgcctgttttatctcactatactgtggttgcttatacaccttgtaatcttgtatgctgtccacattattttctttctttgagtgagattatctcactgacgttggatgcagcaatgttggttaaagtgcaattctagaaaactgccatctttcatgaaattcaggttcctctttactgaccttctttaaatggacttcatacaagtaaatttatatcatttaggtagcttatataaaacaaaaacagaactgaataactccagcaggtttacatccagcactcttagtctggtaacaacataggcctatgtttttgttagactgtatctgtttctatctataatgggcctacaagcctagtccatgtacctttcacacacgcacacgcactctatatcatctcttttttttcgaacacacaggagagctgtgtatcattgaattaagaaggatctaaaattagaccaaatacaaacacaac

SEQ ID NO: 111367 - DNA, 1108 bp, Zea Mays
cgctgcgggtgaagttcggctatctgatttgccgcccgcgatacggcgaaaccctagctccacagcgccgttgcatggagtcccagcgatacaactacggcagcggcgccggcaccggcggcaaaatccgccgctaccctccctctcgcgccgtggctgcgtcaccatatgctcgaccggccaccgccccgacccacgctcctggaaccgccacggcggcggtttcgcatgagggcgggtggctgtcccggatcatagccgccggcacctcgcgattccttccctccttgttcagcttcagcacgtctcaacctcagcaagccgcgccggccccgtcgccaacgcgcgaccagctgccagtcgtcgagccgccttcgccgcttcccccacctttagtggatgatcgtccagaatgtgaagaaaacggtggagtggctgccaataatttgtgtactgaaaatcctcaaagttgtaccaaggaagaggaagaaaacatgctaagaaattctgatgaccatggtggaacggctcttgaagaattattgaagcagagaactttcacgaggagtgagtttgaatatttggccaatttgttatggtctaaaactattggagcaaattcactgaagctagaagatggtaacgtcaggaaaatgattgtttatgacaaagaaaatgcctcggaatactccaacttacctcttaatttttccactacaacattcagcgctgatgatcaagttgccacgcctgcagaaattgcaaaagcttatatgggtttaaaatcttccaagggttcccctctacgccttagattgcacgatccctcctctatgcctatcacatctatggaagttagtatgtcacaaaaagctaagcctcccacaatcccacttgcccaaggctcaagattgcatacttccaaaacttctgattgtcttgaaagcaactacacaacaccgaatggagtaatctgcaaaatgtcatcatctccttatttcaagagtggtgtgtcttcaaaggagctatttggttctgtatcttcacattaccagacctcaaatagtgttcatacttttggcagacaggttttgaagaggaagagtac

SEQ ID NO: 111368 - DNA, 2073 bp, Zea Mays
atggcaactaagatactgaagcagcttgacacattagtaccttcacagaaggaaaacacatcagaaacaaagcagaaacatgagagtgccatatatttcgaggaagatgtttctcgacaaaagaaagtacaagcagagagagatcttttggaaccttctccatcagaagtacctgatggtattgcatcgaacaaatcaatctcacaaattaccttgaacaaggaaaagcctccagccttttcttccagaggtaatgctcccaatctggtattatctgatgaaattggacgaagcaaaatgtccactccaggaaatggcttcaccttccctgccccgactgtcaacaatgcctactcacagggccctccaacacctacattgacatctcctatactaacagttgaaaagcagccttcagtattctgcagtgcttcagtcacttctgcacaaagtgaccctaggatttcaaaatcagttttgggaggaccagttacacagaaattagaaagcaagttaaatggagataatcaacgagtgccttccaagaattctggacaagttgcatctttcacaagtaatcctgtatttaaggttgatggccctgggcatgcgtcaaactctgttctctcagctgtacaatcttataatacatcaactggctcagtttcatttcaaagtgctggctcttctaccatctccactaacttaacttcaaacattacacagagctgttcaactggaggcagtttcactttctccaatactcgttttggtagtttatcggcaacctcaaatatgtttgcagcaaaatctttagcgttgtcttgtacagcaagccccggtgcttctttgggtttccctccagttcatactgcaagttctccagctgctcaccgcaaatctgaagcagcaaatagcagtatcagttttagttccatgcagcagtttggcattgcaggttcttccacagtgcaggacaaatccaaggcagtagacagcagtaccccttttggctttccccagaagtttgacaccgtgagttccgcttcagaggatatgtccaaggcagactctcctgagccgacatttttttctgggaatcataatgtgcaatcagaaaattgcagttccctgttcacacagagtccaggaaataatttgagttccaaatcttcagaaaatttgaactctggaagctcgcatagttttgcagattcaccagttggttcagcaacaatgtgctctagcccttcgaattcaaactctctgttttcttgggctgctggctcaggtgcaagaactgctccaccatcttcccctgctacaagctcatcttttgcttttagttccagtccagcattttcagcacaaccagtattcgccagcaaattgactacacctgcttcactttcatatggctcaccaaatactggccctgctacatcaccattcagctcaatgccaagcgctgtattttcattcacgtcagctactccttcaataccaaatccatcacccacaacaccaatatttggtgaccctactgtacagatgaatggagggaacatagttattgacaggaatgggtccccttcccctgcaacttcgccatttggcttgccaagcagctctccatcgactccaactttcagtacgcctgcaactcagtttgcttctagtacatcaggctcacctggagtttttgaaattggcaagtatagtcaagcttcttcaggtgggttctcaatgggccctagtggtggcaacgacaaatcaaacagaagaattgtcagagttaagagaaggaaatgaaataccaatatttttcaagttgctctgagcatttataagactaaggcaatcagcacgtagaactttttgtttcacatcatttgtctgcggtggcaatgagaatgagatgccattcttaaattgatgatcacaattctggcacagtagcagcaatggaactagccttttcgcgatacggtcgcccatgacattttgttgtacggtttgtcacaacaatgctataatgaaatatataggtacttctccaacttgtattaaaca

SEQ ID NO: 111369 - DNA, 368 bp, Zea Mays
tgccagcgacagcaacgggtgcaatgcattacattaccgcaggcaatatcaatcagcatatgcagaataattgaggaaagaaaacaatcccaagtagtttttccagaagtaacatgaaaacagtgaaataaaaataacgccggagttcgggagggggcaaggttgcatatggtagcaacgaatgatgttgaagaaagtaagatttatacacgcacttggctttcaatctgatgacagcaaactgggggaaatagtcaaaggctactgttgtttctcagtggtggaagccacgttagacgctgatctggattctgattcaccacaagcccttataaccgcctcattctgtgataaaacattgcaaaata

SEQ ID NO: 111370 - DNA, 519 bp, Zea Mays
atggaacctccagctgaagagtcgccgcgccagcgctgggccttggaccgcccatcctgggagctcagccgccgggacggccaggacgcagacgccgaggaggtggaaatcaagggggtggtcgctggtaccggagtgatggccggcgaggggctggtgggaaggggagctgggagggaagccgaacaggcgggttggggttccgaggaggagggcgccgcgccagggcagggagccgaggcgacagccatcaacctcttccaaagaataagaattttgcatatcagctacaatggatcaatccagggttccacagtggagcagcaactccaatttggaggcaaaccgtcaccacaatccattgttgactttgtcaaacacgctctaaagcctaataactccactgcacgtgccatttctgaaacaaactgcccacctgcttctgcaaagcatgtcacctgtcattcaatgaccaaagagcgaaaggtcatgcacagtgaaaaatcttatggttattga

SEQ ID NO: 111371 - DNA, 832 bp, Zea Mays
ttggttgctgatctccgcatgctcttgcccagagtcacagaaggaactatatgaaaagcatcataatacagctgatgggcgtatcaggatatggtttgggttgagacagataatgaatgcaactgatcgtttactgcttgaaacaagagatattgcccagaagctaaatactggaatccatatgcatattgcagaaataccatatgaaaatcaacttatacttcggaccaaaggaattgatcatggcacagtgacatatttagacaaaattgatttcctgaggagtaatttactggctgcccattctgtttggttgaatgtacctgagataggctttttttcaaaggctggtgttaaggtttctcactgtcctgcatctgccatgcgtatgttggggtttgctcctattagagaaatgctggattctggtgtttgtgtctcccttggtacagatggagcaccgagcaataatagaatgagcattgtggatgagatgtacttagcgtccctaattaacaaaggtcgtgaggcatatatcagtggaacaacaaacccaactgctcttcccgctgagacggtgctgaagatggctactattaatggtgcaaaagcagttctgtgggacaatgaaataggttcgctggaggttggcaaaaaggcggacttggtggtggtgaatccatttacatggtccatggtccccttacatgacagcattgccaacattgtctactgcatgcggacagagaatattgagtctgttatgtgcaatggtcggtggatcatgaaggatcataaaatcatgaatctcaatgaggtaattcactgcttc

SEQ ID NO: 111372 - DNA, 659 bp, Zea Mays
ttggttgctgatctccgcatgctcttgcccagagtcacagaaggaactatatgaaaagcatcataatacagctgatgggcgtatcaggatatggtttgggttgagacagataatgaatgcaactgatcgtttactgcttgaaacaagagatattgcccagaagctaaatactggaatccatatgcatattgcagaaataccatatgaaaatcaacttatacttcggaccaaaggaattgatcatggcacagtgacatatttagacaaaattgatttcctgaggagtaatttactggctgcccattctgtttggttgaatgtacctgagataggctttttttcaaaggctggtgttaaggtttctcactgtcctgcatctgccatgcgtatgttggggtttgctcctattagagaaatgctggattctggtgtttgtgtctcccttggtacagatggagcaccgagcaataatagaatgagcattggcggacttggtggtggtgaatccatttacatggtccatggtccccttacatgacagcattgccaacattgtctactgcatgcggacagagaatattgagtctgttatgtgcaatggtcggtggatcatgaaggatcataaaatcatgaatctcaatgaggtaattcactgcttc

SEQ ID NO: 111373 - DNA, 114 bp, Zea Mays
atatttttcttatgaatgtaaattatgtttgaaagggaaatgtgcccttgggccatttctaagtattttggtgattgagtgtcaacacaagggcttaaaagtgaatcaatgccc

SEQ ID NO: 111374 - DNA, 2224 bp, Zea Mays
gttagtctttagtacacggtcagccgcccgagccgggtcggagttgagcacttccccttctcctacccttcacctcccgtttgcccgcagccgccaccgcgtccccaagcactccagcgcccccgtccccgatcgacgccatggtgtcggaggccagcaagaagaaggccgcccagaagaaggccgctgccgccgcaaagaggggaggcaaggcctcggtggcgtcctcgtcgtcttcatctgcggccgcggccgccgataaggtggcgaacggcgtcgtggcgcttaagctatcagaccgcacctgcaccggggtcctcgcatctcaccccctttcccgggatatccacatagagtctctttctttaacattccatggacacgaccttattgtggattctgatttggagctgaactacggaaggcgatacggtttgcttgggttgaatggctgtggaaaatctactcttctcacagcaataggctgcagagaacttcctatccctgaacacatggacatataccatctaagccatgagattgaagcttctgacatgtctgcactgcaagccattgttagttgtgacgaagaaagagtgaagttggaaaaggaagctgaaattttggctgcacaggatgatggtggtggtgaagcattggagcgtgtttatgagcgtctagatgcaatggatgctggaactgcagaaaagcgagctgctgaaattttatttggtctgggttttgacaaacaaatgcaagcaaagaaaactaaagatttctctggaggttggcgtatgaggattgctttagcaagagcactgtttatgaatccaacaatccttttgcttgatgagcccacaaaccatctagatcttgaggcttgtgtctggttggaagagacactgaagaaatttgaccgcatacttgttgtcatatcacactcccaagattttctaaatggagtgtgtactaacattatccatatgcaaaacaagaagctcaagttatacaccggtaactacgatcagtatgttcaaactcgctccgatcttgaagagaatcaaatgaagcagtacaaatgggagcaggaacagattgcttcaatgaaggagtacattgctcgcttcggtcatggttctgcaaagcttgctcgtcaggctcagagcaaagagaaaactcttgcaaagatggagcgaggtggtctcaccgagaaggttgttagggacagagttctagtgttcaggtttacagatgtaggcaaacttcctccacctgtgctgcagtttgttgaagtcaagtttgggtatacaccagataatctcatatacaagagtcttgactttggtgttgatcttgactctagaatcgcattggttggtcccaatggtgcagggaagagcactcttctgaagcttatgactggtgaccttgctccattagatggcatggttcggcgccacaatcacctgcgcattgcacagtaccatcagcatcttgcggacaagctggatctggacatgccggctctggcttacatgatgaaggaataccctgggaccgaagaagagaagatgcgagctgctgttggcaggtttggcctatcaggaaaggcgcaggtgatgccaatgaggaatctttctgatgggcaaaggagccgtgtcatctttgcatggttggcatataggcagccgcaactgctactgctcgatgagccgacaaatcatttggacattgagaccattgactccctggcggaggcactgaatgagtgggatggtggtttggtcttggtgagccatgatttcaggctgatcaaccaggttgctcaagagatttgggtgtgtgagaatcaggcggtgacaaggtgggaaggtgatatcatggatttcaaggcacacttgaagagcaaggctggtttatctgattagagggctttttccagcaaccatgagctttttaactctgtatcacgaagtcccagttttccaatagcgaactatcagagttactttattgtatcggatttcttttgacttgcattgcaacctgattaccttatactacctggaatatttatttatatatcttttgaaatgctattatgtgtattgttaagtttcgtagattttggaagttttgatttgtcaaagttactagattctatgatcattgtgaacatacaacttaaatttagttttcaattcaactgattttatttcttcag

SEQ ID NO: 111375 - DNA, 1555 bp, Zea Mays
aggctgcagagaacttcctatccctgaacacatggacatataccatctaagccatgagattgaagcttctgacatgtctgcactggatgatggtggtggtgaagcattggagcgtgtttatgagcgtctagatgcaatggatgctggaactgcagaaaagcgagctgctgaaattttatttggtctgggttttgacaaacaaatgcaagcaaagaaaactaaagatttctctggaggttggcgtatgaggattgctttagcaagagcactgtttatgaatccaacaatccttttgcttgatgagcccacaaaccatctagatcttgaggcttgtgtctggttggaagagacactgaagaaatttgaccgcatacttgttgtcatatcacactcccaagattttctaaatggagtgtgtactaacattatccatatgcaaaacaagaagctcaagttatacaccggtaactacgatcagtatgttcaaactcgctccgatcttgaagagaatcaaatgaagcagtacaaatgggagcaggaacagattgcttcaatgaaggagtacattgctcgcttcggtcatggttctgcaaagcttgctcgtcaggctcagagcaaagagaaaactcttgcaaagatggagcgaggtggtctcaccgagaaggttgttagggacagagttctagtgttcaggtttacagatgtaggcaaacttcctccacctgtgctgcagtttgttgaagtcaagtttgggtatacaccagataatctcatatacaagagtcttgactttggtgttgatcttgactctagaatcgcattggttggtcccaatggtgcagggaagagcactcttctgaagcttatgactggtgaccttgctccattagatggcatggttcggcgccacaatcacctgcgcattgcacagtaccatcagcatcttgcggacaagctggatctggacatgccggctctggcttacatgatgaaggaataccctgggaccgaagaagagaagatgcgagctgctgttggcaggtttggcctatcaggaaaggcgcaggtgatgccaatgaggaatctttctgatgggcaaaggagccgtgtcatctttgcatggttggcatataggcagccgcaactgctactgctcgatgagccgacaaatcatttggacattgagaccattgactccctggcggaggcactgaatgagtgggatggtggtttggtcttggtgagccatgatttcaggctgatcaaccaggttgctcaagagatttgggtgtgtgagaatcaggcggtgacaaggtgggaaggtgatatcatggatttcaaggcacacttgaagagcaaggctggtttatctgattagagggctttttccagcaaccatgagctttttaactctgtatcacgaagtcccagttttccaatagcgaactatcagagttactttattgtatcggatttcttttgacttgcattgcaacctgattaccttatactacctggaatatttatttatatatcttttgaaatgctattatgt

SEQ ID NO: 111376 - DNA, 2209 bp, Zea Mays
aaaatatgcaaaaaaaaaaatctattgcctgactccttcaaaccctgcacaccccacctgccttgtaccaaattcccctgacccgtcggtctgctatcccatctgagctcacggcgatcctctttctcctcatcggcatgagcggcttcttggcggtggtcggcaaggtcggcacctttctgctgtgggtgctgttcctggtcttgcagaccgccaccaggatcgtcggcagcctccttgccagctcagctgagcagcaggatgaccaccatcaggaatcggcggcggcacggcgcaggtcgccgccagcctccccacatcccgaactttacgagccggcgtctgcgtctctggcgcagctgtgggacccaccgcctcttccgcaccttgcttttgctcccgctgcggatgagagctcttcgtcctccagcttacggcggcgtgccagtgcgccgctgccccgagcggatgaagactttgtggtgccatcgagcgcttactcgcgtccaacagtgggggtggctcatacacactctgtgtcagcaccaccactgagggcaatcgagacgcgggcggtgccatctaggctggtgacagccgggggtaagcggccaaggctggagaggaagtactccaagattgttgaccagtaccgatccttggatgaggttattgaagcattagcacaggctggtcttgagtcttctaatttgatcataggaattgatttcacaaagagtaatgaatggacaggaaagaattgcttcaatggtatgagcctgcataatatcagtgacaacccaaatccttatgaacaggcaatatccatcattgggaaaaccttatctgcttttgatgaggataatttaattccttgctttggttttggagacgcatctactcatgaccaagatgtatttgccttctatcctgatgaaagaccatgcaatggttttcaagaagctttagctcgatacagagagattgtacctcatcttcgcctttcgggtcctacgtcattcgccccaataattgacatggccacaaccattgtggagcaaagtggtggccaataccatgttttagtaattattgctgacgggcaggtcacaagaagtgtagatactgaatttggtcagttaagcacccaggagcaaatgacagttgatgctattgtacaagcaagccaattcccattgtctataattcttgttggagttggagatggtccatgggatatgatgaaggaatttgatgacaatataccagctaggtcttttgacaatttccagtttgtcaacttcactgcgatcatgtcaaaaaagataagtcaaagcaaaaaggagacagagttcgccctttcagcactaatggaaattccattgcaatacaaggcaacattagagcttggaattttaggacgtcgaattggagagtcacctgagcggattccacttcctcctccttttgcaagttatagcacagtttcaagagcagaaccatctcgggcaaatagttatcgaagtgtgccttcacatccaagggaggagccagctgtaaattcaactatcacagcatcagttacatccccatcagctgccgaaagtagagttttagaaccccagatgtgcccagtttgcctttccaaaccccgggacatggcatttggttgtggccaccagacatgttcagaatgtggaccgcaagtcacagattgccccatctgtcgaaggcccattgacacgagagtaaaattgtactaattatttttgggtggaactaggtttaactgaagcacatgccaggagtagaatccactaaaataaatctctatttgactgttaacgatgtagtgtgaattaatttaataaatcagacgtagagaaaaggaggatacttgttctttgcttgtatcctgttcctacattgtgcgttgatagatgtgaggctacttccattatctgatactggacaggcgccctacttcgctgcggcgattacatataatgttgaagtatggttatggtttgtctgtaaactggatggtatttggcttgttagtatggataacctagcttgtatataaagagacaatcattagtagatgatgtggtttgctaatatgaataactaaacactccctctattcccgtttataattcgtaccattccgtcttattcatcttttttttttgcaaaaaataaaaaa

SEQ ID NO: 111377 - DNA, 414 bp, Zea Mays
atggcgagcagggcggggcggcagagagccgaggcaggtggggccatagcctggaagcacgatgtagtgcgcgccaaggcctcaatcgtccaagcagactgcgaggcgggcttagggcagcggcgacgttgtccacatggaggccgaggtcgcgacattgtcaccgtagacgtgttgcagtgttatcgtggcgtgattgcggttagggacgattgtccaggcgactcgattgagggtgattgtttaggcggcgtggggtgttggcaagggctggtgctgaggagggtagatgtgaggggtgagggatgggcaagtccacatgtctaccgtacagggcaaataatcttatcttcgctattgcaagggtttgtcaccattaccatttacaacctggtgaacaagcttgtcgggtaa

SEQ ID NO: 111378 - DNA, 1200 bp, Zea Mays
atgactgtcttttgtgatcagccagattggcttcaagtatgggcagagattgagagacatgacagtcttaatatgctgcaggcaccaattgatttagagaaaaatcaaggaacgatgcttgagcacaactcaattgattataagtctccagtaaggaaaagagaaacatctcgacctcaccttgtctattgtggcatccggcgtggaagcacaagacgtcgtagcatatggcgtggaaacatcggaggagctccggccaccgctactggcaatctcggaaccccacgacttcttggcctgtggagcggtcttcccctgaaggccaactctaggtgccatagaaaatggagcgaatcttcggcggctggtgccgtacttgcagttgtcgccatcgccgcctaccaagcacacgttggtggcgccgtccgcagcacccatgatgccgcatcggagcagcacgtcgcggagatgagcgtcgtgccacacggatgtagagatgtcgtgcgccaccggacgggagcctgcggcgggagagcaacgttcggccgagatgcggggagggcggtggacgggatccgaggaggccagcggttgaacatgagccgacgcgtgggtcggcggcgaagcgagtcggtggtcgtgccccagggcgaggtgggccaacaagggcgacggcagggacgagaggtctgggagggagtgtcaaactcacggcgggtgaaggacgaggaaaccttggacgccccttgcggcgcggcgccgtttgacggggaggcgtattataattcgttgaacttcggaattgtagtatctgcgtcagatttagctgcagtaatcctcgtttttacggcagtccgtttcttacaacggatccacggagctcctctccccgagcgctgctcttcctcgggcatctccaccgcgcggatggtgatggtcccgggcggcgtcgcgccgctgcactcccacccgggaggcaccgagctcatcttcgtcatcgagggcagcgtcgtctccggcttcatcagcgccacgctcaacagggtgtacaccaagacgctcagcgacaaccccggcctgcagatcctcgacttcgcgctcttcgccaacgacctgcccacagaggtcgtgaacaaggtgaccaacctggacgaactgcagatcgtcaaactcaaggcgctgttcggagggaggggctag

SEQ ID NO: 111379 - DNA, 1372 bp, Zea Mays
ctctctcaccagtcactatttgattggaattgtctttggacttgggagaggatttgatctcttgtttgtgtcttgtattgaatgttatagctcttgtataaggtgtgaaggctgaaaacttggatgtaatgaatggtggttggttggggtatttatagccccaaccaccaaaggagccgttggtggaggctgctgtcgcatggcgcaccggacagtccggtgcgccagccacgtcacccgaccgttaggatattattccaatttcttcccgaaacttcctaagaaaaatcccgaattggatccaaaattgacgggttaatgtgagcttatccatgcggttaggcactcttcaaataggaatccattttctaactggctttcgtgctttggtgagtcgtccgagatcctttcgatgacctatgttgtgttgaagggatatctatatgatccgatcgattgcataagacccgcggtagcaatagaacggggaaagtatacagaaaagacagttcttttcgatttcgattatctatatattagttcgtttctatttctagatataatcaaacaattccatcgaattgagtatgactgtatgtgtgatagcatctactataccaggaatatcaatgaaccccattcttgcaattgctcaggataccctcttttagctgctaggtctatttcttagttcaagatccctcttactaactggaataaaagaattagtagatctgttccgcccaaaatgggaatgggtgctatggttatgaacttataatcatggaatcgactcgatcatcagattataagttcattccataccggaccagatcgtgcacattcttattatgagaaggggtcatttgagcctatggaaataggatactctgtttacatagaaatccctacgtccttacattctatttaggattaggaataggtgtaatcagacctgcttttgacatatctatcctatccttatttgggtaccatatgcacctctttgggcttctattgaatcgagaaattggattgtacatctttttgattttgatatcgattttgatacatataaggtgtcctacggataatgcaaatcgaagctatttgatgtctgactcaggcctatatgtatatgaccgatcgatcgaaatactccaagactccacctttgtcatatattccatatatcacattcgatagatatcatgttcatggaatacaattcactttcaagatgccttgatggtgaaatggtagacacgcgagactcaaaatctcgtgctaaagagcgtggaggttcgagtcctcttcaaggcataatacggagaatgctcattgaatgagcattccccgtagaagtattccg

SEQ ID NO: 111380 - DNA, 201 bp, Zea Mays
tttgagttcatgtgacttattttagaaacttgagctcacaaacttcctattatttggtctctgtatggtggaattatgtcattctataatctctgttcgtttagtcagtcattgtgaactatcttctaatcgctcccttcattggtcgtgttgtaccaagacatattggatggagtaaacaacaacatcagttagtcaaat

SEQ ID NO: 111381 - DNA, 333 bp, Zea Mays
atggctgttggaggtgcggatggcgacatggtagatgacgctattgtggaatcgacaggacatgtaggtgtgctagatgcaccgcgacatcatcgccctcagctgcaaccactagtacaccactgcatcaggatgattgaagtcaaaacaacttttcttcttctgaagatgagcggaaatgtcccatatccagttgatcaacaccaccttgatgatccacatgttaaagccaacttactctttcaggcacatttctccaaagcagaatttccaataagcgactatgtcactaacttgaaatcagttcttgatcagagcatacgtatcatatag

SEQ ID NO: 111382 - DNA, 1325 bp, Zea Mays
tcacgcaaccaccactgcctcacgcaaccacctcagcccggtccacctctaccaccggccacccactgcctccacccccgccctagatcaccaccgcactctcaggcgcaagaacgagctcaccaggcaaagtcacggcggcgacctccgccttccaggtctcgcccttgctggcgcgcgcctctgctcaccacccagcgccgcgtcttccttctccagtccggtcgctggccgaccgccagcgcggctccgggccctgctttccgcacgcccaagcctgcgcgctccggacgcacctctcctgctcttctgggcttgggaaagagaagaaaccagcataaaaacactagatctgtgaaggatttgaggaagaaaccaaaccgaaaccctagtgacgatgctagagttcggacctcgctctgagtcgaaacgaccagagaccgctgccttccctccccattttcctttcccatgaaccaagcagcgtatgagctttccatccctcctcatttacctatcccacctctcatatcccgttatccaaacggcacctcagggtactgcaatccagaagcaggggccctggcctcagcgcacctggatggcagggctggaggagttgaagaagaagctacaacccttgctgttcgatgacctggacagagttggcgccagtaccagggtgcccttaccagaagatacttgcgattcctacgcagtttctgatggtgggactgttaatttacttagtagatccttgggtgagtataaaatcaatgagcatggctttcataaacgaagtgctgggccagacgagttagattctgatgagaaggcttaccgttgtgcctctcatgagatgcatatatttggtcccatcggtaatggtgcaagcagtgtagtggagagagctatatttattccagttcatcgaatcttggccttgaagaagataaacatattcgagaaggagaagaggcaacaaattctgaatgagatgagaacattatgtgaagcatgttgttatcctggtttagttgaattccagggtgcattttacatgcctgattctggacaaataagtatcgctcttgaatacatggatggtggttccttggcagatgttataagggtcaagaagtctataccagaaccagttctttcacatatgctacagaaagtattgcttgtatggatcttccatgtcttttcaatccatatctgtagtttctagacattagtaaaagccatgatatggctttctgtatatttgacttggtacattcttctgtttataattcaaaagggtctgcgatacttgcatg

SEQ ID NO: 111383 - DNA, 2342 bp, Zea Mays
tcacgcaaccaccactgcctcacgcaaccacctcagcccggtccacctctaccaccggccacccactgcctccacccccgccctagatcaccaccgcactctcaggcgcaagaacgagctcaccaggcaaagtcacggcggcgacctccgccttccaggtctcgcccttgctggcgcgcgcctctgctcaccacccagcgccgcgtcttccttctccagtccggtcgctggccgaccgccagcgcggctccgggccctgctttccgcacgcccaagcctgcgcgctccggacgcacctctcctgctcttctgggcttgggaaagagaagaaaccagcataaaaacactagatctgtgaaggatttgaggaagaaaccaaaccgaaaccctagtgacgatgctagagttcggacctcgctctgagtcgaaacgaccagagaccgctgccttccctccccattttcctttcccatgaaccaagcagcgtatgagctttccatccctcctcatttacctatcccacctctcatatcccgttatccaaacggcacctcagggtactgcaatccagaagcaggggccctggcctcagcgcacctggatggcagggctggaggagttgaagaagaagctacaacccttgctgttcgatgacctggacagagttggcgccagtaccagggtgcccttaccagaagatacttgcgattcctacgcagtttctgatggtgggactgttaatttacttagtagatccttgggtgagtataaaatcaatgagcatggctttcataaacgaagtgctgggccagacgagttagattctgatgagaaggcttaccgttgtgcctctcatgagatgcatatatttggtcccatcggtaatggtgcaagcagtgtagtggagagagctatatttattccagttcatcgaatcttggccttgaagaagataaacatattcgagaaggagaagaggcaacaaattctgaatgagatgagaacattatgtgaagcatgttgttatcctggtttagttgaattccagggtgcattttacatgcctgattctggacaaataagtatcgctcttgaatacatggatggtggttccttggcagatgttataagggtcaagaagtctataccagaaccagttctttcacatatgctacagaaagtattgcttggtctgcgatacttgcatgaagtaaggcatctagtgcatagagatataaagccagcaaatttactggtaaatcttaagggcgaggcgaagattacagattttggtgtgagtgctggtttggacaatacaatggctatggcacagtcacatatatgtcacctgagagaattcgtaatgagaactattcttatgctgctgatatttggagtcttggactaacaatattggaatgtgctactggaaaattcccatatgacgtaaatgagggccctgcaaatctaatgttgcagatacttgatgatccatcaccaacaccaccagtagatacttgttcattagaattctgctcattcatcaatgattgcttgcagaaagatgctgatgcaaggcccacatgtgagcagaggtatgcaggaactgaagtggacttggcagcatatgtcaaaagtgtagttgacccaacagaaaggctaaagcaaatagctgagatgcttgctatacattactacctcttgtttaatggacctgatgggatttggcatcatatgaagacattctacatggaacaatctactttcagtttctcagagaacgtgtatgttggccagaatgaaatttttgatattttgtcaaatataaggaaaaagctaaaaggtgataggcctcgagagaaaattgttcatgttgtcgagaagctacattgtcgtgcaaatggtgaaactggggttgcaattcgtgtgtctggatctttcattgtgggaaaccaatttcttgtatgtggcgaggggataaaagctgaagggatgcctagcttggatgagctctctattgacattccaagcaaacgcgtaggccagttcagagagcagtttatcatgcaaccgggaaacttaatgtcatgctattacatatcaaagcaagatctgtacattatccaatcctgattgaacatattatttgtaagattattctctgaagcacatgtatagaggatttagaagaattcctttcggacctggttttgaatcttatttactttgtggaactgaaattttgggccaaacctctgacaagaattgaaaagtttaagtcttcaactatattcatgtttagaactgtttttatatttggttggtattgataattttcgttt

SEQ ID NO: 111384 - DNA, 2381 bp, Zea Mays
tcacgcaaccaccactgcctcacgcaaccacctcagcccggtccacctctaccaccggccacccactgcctccacccccgccctagatcaccaccgcactctcaggcgcaagaacgagctcaccaggcaaagtcacggcggcgacctccgccttccaggtctcgcccttgctggcgcgcgcctctgctcaccacccagcgccgcgtcttccttctccagtccggtcgctggccgaccgccagcgcggctccgggccctgctttccgcacgcccaagcctgcgcgctccggacgcacctctcctgctcttctgggcttgggaaagagaagaaaccagcataaaaacactagatctgtgaaggatttgaggaagaaaccaaaccgaaaccctagtgacgatgctagagttcggacctcgctctgagtcgaaacgaccagagaccgctgccttccctccccattttcctttcccatgaaccaagcagcgtatgagctttccatccctcctcatttacctatcccacctctcatatcccgttatccaaacggcacctcagggtactgcaatccagaagcaggggccctggcctcagcgcacctggatggcagggctggaggagttgaagaagaagctacaacccttgctgttcgatgacctggacagagttggcgccagtaccagggtgcccttaccagaagatacttgcgattcctacgcagtttctgatggtgggactgttaatttacttagtagatccttgggtgagtataaaatcaatgagcatggctttcataaacgaagtgctgggccagacgagttagattctgatgagaaggcttaccgttgtgcctctcatgagatgcatatatttggtcccatcggtaatggtgcaagcagtgtagtggagagagctatatttattccagttcatcgaatcttggccttgaagaagataaacatattcgagaaggagaagaggcaacaaattctgaatgagatgagaacattatgtgaagcatgttgttatcctggtttagttgaattccagggtgcattttacatgcctgattctggacaaataagtatcgctcttgaatacatggatggtggttccttggcagatgttataagggtcaagaagtctataccagaaccagttctttcacatatgctacagaaagtattgcttggtctgcgatacttgcatgaagtaaggcatctagtgcatagagatataaagccagcaaatttactggtaaatcttaagggcgaggcgaagattacagattttggtgtgagtgctggtttggacaatacaatggctatggcacagtcacatatatgtcacctgagagaattcgtaatgagaactattcttatgctgctgatatttggagtcttggactaacaatattggaatgtgctactggaaaattcccatatgacgtaaatgagggccctgcaaatctaatgttgcagatacttgatgatccatcaccaacaccaccagtagatacttgttcattagaattctgctcattcatcaatgattgcttgcagaaagatgctgatgcaaggcccacatgtgagcaggtaaagataattaggcttctgtcacacccattcatcaagaggtatgcaggaactgaagtggacttggcagcatatgtcaaaagtgtagttgacccaacagaaaggctaaagcaaatagctgagatgcttgctatacattactacctcttgtttaatggacctgatgggatttggcatcatatgaagacattctacatggaacaatctactttcagtttctcagagaacgtgtatgttggccagaatgaaatttttgatattttgtcaaatataaggaaaaagctaaaaggtgataggcctcgagagaaaattgttcatgttgtcgagaagctacattgtcgtgcaaatggtgaaactggggttgcaattcgtgtgtctggatctttcattgtgggaaaccaatttcttgtatgtggcgaggggataaaagctgaagggatgcctagcttggatgagctctctattgacattccaagcaaacgcgtaggccagttcagagagcagtttatcatgcaaccgggaaacttaatgtcatgctattacatatcaaagcaagatctgtacattatccaatcctgattgaacatattatttgtaagattattctctgaagcacatgtatagaggatttagaagaattcctttcggacctggttttgaatcttatttactttgtggaactgaaattttgggccaaacctctgacaagaattgaaaagtttaagtcttcaactatattcatgtttagaactgtttttatatttggttggtattgataattttcgttt

SEQ ID NO: 111385 - DNA, 790 bp, Zea Mays
gatttgacaaaattgtgagctgctgaaattttgtgtagttacatgctcagttatattttacttgcatgttcttttatgtcaggaagtaactggaaccttttccaactgcattcttctggatgttttgaatcttatgtggtattacactttattacatgatagttatagttgtgctgaaatgtgcctctgagcagtcttacaattcttgttttggcagtttctcagagaacgtgtatgttggccagaatgaaatttttgatattttgtcaaatataaggaaaaagctaaaaggtgataggcctcgagagaaaattgttcatgttgtcgagaagctacattgtcgtgcaaatggtgaaactggggttgcaattcgtgtgtctggatctttcattgtgggaaaccaatttcttgtatgtggcgaggggataaaagctgaagggatgcctagcttggatgagctctctattgacattccaagcaaacgcgtaggccagttcagagagcagtttatcatgcaaccgggaaacttaatgtcatgctattacatatcaaagcaagatctgtacattatccaatcctgattgaacatattatttgtaagattattctctgaagcacatgtatagaggatttagaagaattcctttcggacctggttttgaatcttatttactttgtggaactgaaattttgggccaaacctctgacaagaattgaaaagtttaagtcttcaactatattcatgtttagaactgtttttatatttggttggtattgataattttcgttt

SEQ ID NO: 111386 - DNA, 228 bp, Zea Mays
atgggcgggagcgaggaattggccgccgcggtcgctccctccacgaccatcatccagggcatgagcatgactcgtagagcttcgctgcggcaccaggaaccggggcgcaaccgtatttggttttcggtgaggtttgtgcgccgagtcatcgggcggccgtactccggcaatggcaccgccgtgccgccccgtttaactgggtcgcgcaacctagaagagagtggttga

SEQ ID NO: 111387 - DNA, 2820 bp, Zea Mays
catagaatctcataacttgtttgctgtgtttcactagtgatggcagacgtccaggaatgccattatgattcaacgtcacaggccactgacagcttgcatgttgagcctatatatgagtcgttcctatgcccgcttaccaaacaggttatgcgggatcctgtctctattgacagtggtgttacgtttgaacgcgatgccattttgaagtacttcaatgaatgtcttagcagcagaaggaggcttgtctgccctgtaactaagatggagctcagcaacactgagttaaatccaagcatagctctgaggaacactattgatgaatggatgaaccgcaatgaggtggctaaacttgacgtcgctcggaagtcattgacttctgatagcacggaaagtgatatggtacaagcactccagtatgttgatgagatatgtcagagaagtcgatccagtaggcaggttgtgagaagagatgggttgataatcatgattgctgacttgttgaagaaaagcagtacgaaagtacggcaaatggcactagagactcttcgctccatcgcaaaagatgacaatgacaataaggttgagattgctgctggagacaatattcgcacaattgtaaagttcttaaatcatggtcagactcaggaaaaggaacgagctgtgtctctgttgtttgaactttcagagaacaaggctctttcagaaagaattggcagtgtttctggagctattcttatacttgttggcttgtcaagcagtaaagtagaaaactcgctgattgttgacagagctgagaagacattggaaaacttagagagctgcgaaaagaatgttagacagatggctgaaaatggtagattgcaaccccttctgaggctgcttcttgaaggttcacctgacatacaattatctatggctgcatacctcggagagcttgttttaagcaatgatgttaaggtacttgtggcacaaaaggctggttccacactagtcaatatcatgaaaaaagggaatagagaggccagagaagcagctttgaaggcattgaaccaaatttcatcttatgatgctagtgcaaagatattaattgaagcaggtattcttccgcctctcatcacagacctctttactgttggcagtaatcagcttcctatgagattgaaggaggtctcagcgaccattcttgcaaatgttgtggcatcgggtgcacgttttgagtccattccacttgatcataataggcagaccttagtgtctgaagacattgttcacaatctacttcatcttataagcaacacaggacctgcaattgagtgtaagttgctccaggtgctcgttggtctaactgattcttcgacatctgtacaaaatatagttgatgctatcaaaggttcaggtgctattgtcagtttaattcagtttgttgaagcacctcaaagggaagtacgcatgaattccatcaagctcctgaataacatatcaccatatatgggtcaagaacttgctgatgcttttcgtggaaactttagtcaactccgcagcttggtcaaggtcattgttgataacaatggtatttctgaagagcaagcagctgctgctggccttgtagctgatcttcccatgcgggactctgtcctcaccagacgtcttcttcaagatggggcatttgcaacaatcattccaaaagttttaagaatccgacaaggcgagattcgtggggggcgttttgtgaacccattcctcgaaggtctagttagaatagtctcccggatcacatttgtcttggatgatgatccagatatcattgttgttgcttgtgattacaatcttacttcactcttcactgatctgcttcagatgaatgggcttgacattgtccagatcgtctctgctaatgcgctagagaaactctcacagcagtcaaaacatcttacgaagatactgcctgctcccagcccagggttgtgcttttcaatatttccatgcctcagccagaagactgtagcaactggggtttgtagagttcactgtgggatttgttctgcaagggagagcttctgtctcttggaggggaagtcagtggagaagttggttgcttgcttggataataataatgagaaagtagttgaagctgccctatcagcgttatccactttactggaggatggagtggacattgaccaaggtgtcatggtgctgtgtgatgccgaaggaatcaacccaatacttgacgtattgtgtgagaacagaaatgaggcactgcgccagagagcggtgtgggcagtggagagaatcctgaggatggatgaaatagcatatgaaatatcaggaaaccaaaatgttggtacagccttggttgaggccttcaggcatggtgactataggacaagacaagttgcagagcgagcattgaagcatgtagataagctgcccaatttctctgggatattttctaagatgggagcacaatgacgacgttacatggaagtagtctaattctattttgacacatggattgcagatccacatgaggcacagatgaacacatgtagattggttttgctgacccgcagatggtggtagcgatccgattgatcgaagaagaatcgaaacattgcacgtgttgtatagtgtatatttctacctgtaaacttgtatgtattttttagattggtcagattcatagaataggttgctatccctgttgtgtttagataaatataaataatgcataatccccagctctgggtggggaaaaagaaagaaatgtgaagtatttgcacgtatttaatcatggttttctggttgagtttattgcga

SEQ ID NO: 111388 - DNA, 554 bp, Zea Mays
gacgccctgcatgcaggcatgcagctgccctcccactcaccccgcgcgtccgcctgtggctgggcacgttcaacacggcggatgaggcggcccgcgcgctgcgcggggagaacacacgcacgaacttcacggaccgcacgcggcacggcggccccgccggcgcggccagggccacgttgagcaagaacctgcagcacgtgatggcgcaggcggccgccaccggtagggccacggcgtgcgcgggggtgggcgaccagttcgcgctcgacgcggtgttctggcacccggtgacgacgcagcagcaggtgaagcacgcggtggagccgagcttcgtggtgccgaggcggaccgaggcgccgccactgtcattggtgcctgcaggaggtggtgaggtgtggcgtgtggacgacgtcgacaccgcggatgagtcgttgtgcgccgccgaggagagatcgttcaaggtgtcctcgtctgtgatcgtgccgccctccttcagcacctcgtcatccaaatggccaataattgcttcactaactattaagaaactaatgtag

SEQ ID NO: 111389 - DNA, 11454 bp, Zea Mays
acaacaatcacaaccctctctctccctctccttcacgtagccgcctctgaatccccacctctctgctctcccgtcggcctcctccgcgaccgatgtgtgtgccccgccgccggcccaaaacactagaggtgacgagcaggtaaggggttccgatcggagatggcggcggcggcggccgcacatagagccagcttcccgttgcgcctgcagcagatccttgctggaagccgcgctgtctcacctgcgatcaaggtcgagtctgagccgcccgcaaatgtcaaagcatttattgatcaagtaatcaatattccactacatgacattgccataccgctatcaggcttccgttgggagttcaataagggaaatttccaccactggaagcctttatttattcattttgacacatatttcaagacatacatttcttctcggaaggatcttcttttatctgatgatatgactgaggctgaacctatgccaaagaatgccatcttgaaaattttaatagttatgcagattattttggagaactgtcagaatagaagttcttttactggtcttgagcatcttaagcttctcctggcatcgtcagaccctgagatagttgtagcagcattggaaactcttgttgccttggtcaaaataaatccttcaaagttgcatatgaatggaaagctaattagctgcggatccataaacacccatcttctatcattggcccaaggatggggcagcaaggaggaaggcctaggcatatattcttgtgttgtggcaaatgaaggaaaccagcaggggggcctgtccttgttcccagtagacttggagagcaaatatcagcatcgtcttggttcaactcttcattttgagtataatttgggttctgcacagtaccctgaccaaactagtgacaagggcaagtcatctaatttgtgtgtgatacatattccagacatgcatcttcagaaagaggatgacttgagcatactgaagcaatgcgtggacaaattcaatgtgcctccagagcacaggtttgcattgcttacaaggataagatatgcccgcgccttcaactccacacggacttgtagtatctatagccgcataagtcttctttcgttcattgtacttgtgcaatcaagtgatgctcacgatgagctcacatatttctttacaaatgaaccagaatacataaacgagttaatcaggcttgttcggtcagaagattctgtccctgggcccattcgtgcacttgctatgctagcactgggagcacagctggcagcatatgcatcatctcatgagcgtgctaggatattgagtggctcaagtatcatttctgctggtggaaatcgtatggtgttgctcagtgtcttgcagaaagcaatattctcactcaatagcccaaatgatgcctcatctcctctaattgttgatgctcttcttcagttttttctgctccatgtattgtcctcatcaagttcagggactacggttagaggctcaggcatggttcctcctctcttgcccctgctgcgagataatgattcttctcatatgcatcttgtctgcttggcagtgaagactcttcaaaagcttatggagtacagcagccctgctgtttctctgttcaaagacttgggtggtgtagaccttttgtctcggaggttacatgtagaagtgcagcgtgttattggtactgctgatggtcataattcaatggttactgatgcagttaaatcaaaagaggaccacctgtactcccagaagcgattgattaaagctttgcttaaggctttggggtcttctacttattcccctgggattcctgctcgttctcaaagctcccaagataattcattgcctgtgtcactttcccttatatttcagaatgtagaaaagtttgggggcgacatttatttttcagcagttacagttatgagcgaaataatccataaagatcctacatgctttcctgctttgaaagaacttggtcttccagatgcttttctctcatcagtgactgctggggtaataccatcttgtaaagccctgatctgtgttcctaatggcctgggtgcaatatgcctcaataaccaaggacttgaggctgtcagggaaacttcagcactacgatttcttgtatataccttcactagcaggaaatacttgataccactgaatgagggcgttgttcttctagctaatgcagcagaagagcttcttcgtcatgtgcaatccctgagaagtattggtgttgacatcattattgaaataatcaataaactaagttcatctctgaaagatagaaacaatgaaacagccatcttggaagaaaaaacagatatggaaactgatgttgaaggtcgtgatttggtaggtggtatggattccagtgtggagggcagtaatgatgaacagttttctcatttgagcattttccatgtgatggtattggttcaccggacaatggaaaactctgaaacctgccggttatttgtcgaaaagggaggtctaaatgctcttttgacactcttgttgaggcctagcattacactgtcatctggagggatgcctattgctttgcatagcacaatggtgttcaagggatttactcagcatcactctactccacttgcacgtgcattttgctcgtctttaagggagcatttgaagagtgcattaggggaacttgataaagtttctaactcatttgagatgaccaagattgaaaaaggagcgataccttctttgtttgttgttgaatttctgctatttttagctgcctcaaaagacaatcgttggatgaatgctttgctctcagaatttggcgatgctagcagggaggtcctggaagatattgggcgagtccaccgggaagtgctttggaaaatttcgctttttgaagaaaacaagattgacgctgaaattagtttatcttcttccacatctgaagcccagcagcctgacttgtctgccagcgacattggtgatagcagatacacttctttcaggcaatatcttgatccaattttaaggcgaaggggttctgggtggaacatagagtctcaagtgtctgacctcattaatatgtatcgagacattggcagtgcagctagtgactctcagagagttggttctgatagatattctagtctgggtttgccctcaagttcccaggaccagtcttccagttcatctgatgcaaatgtcagcacaagatcagaagaggaaaagaaaaattctgagcattcctcctgctttgacatgatgagatctctctcctaccatatcaaccatctttttatggagcttggtaaagcaatgcttcttacatctcgtcgggagaacagtcctgtaaacctatccccatccgttatatctgttgctaacaacattgcttctattatgttggaacacctcaactttgaaggacattcggtaagttctgagagggagatgactgttaccacaaaatgccaatatcttggaaaggtagctgaatttattgatgggatattattagatcggccagaatcctgtaatccaattatggtaaattcattctattgctgtggtgtcattcaggccatcctgaccacatttcaggccaccagtgagttgctcttcacaatgagcaggccaccatcttcacctatggagacagatagtaaaactggaaaggatggaaaggatatgaattcttcatggatctatggtcccctcatcagctatggcgcaattatggatcatcttgtgacctcgtcttttattctctcttcatcaactagacaattacttgagcagcctatttttaatggatctgtaaggtttcctcaagatgctgagaggttcatgaagttacttcagtctaaggtgttgaagacagttcttcccatctgggctcatcctgagtttccagaatgcaacattgagttgattagttcagtcatgtccatcatgaggcatgtttgctctggggtggaagtgaaaaacactgttggcaatgatggtgctcgtttaactggtccacctcctgatgagagtgcaatttcattgattgtagagatggggttttctcgtgcaagagctgaagaagcattaagacaagttggaaccaacagtgttgaaatagcaactgattggttattctcacacccagaggatgaacttgctcgggcgctcgcaatgtctcttgggaattctgatacacctgcacaagagggaaatggtaggtccaatgaccttgagctggaggaagtaacagtccagctgcctcctatagatgaaatgttacactcatgttttcagctacttcagacaaaggaagcattagctttccctgtcagggatatgcttgttactatcagctcacagaaggatggccaaaaccgagtaaaggtgcttacatatttgattgaaaatctgaaacaatgtgtggtggcatctgagccttcaaatgatactgcactgtctgctcttttacatgttcttgctttgattctccatggagatactgctgctcgtgaagttgcctcaaaggcaggaattgtgaaggttgctttagatctgctttccagctgggagttggaacttagggaaagtggcatgattgaggttcctaattgggtaagttcctgtttcctttctgttgatcagatgctccagttggaaccaaagttgccagatgttacagagctagatgttctgaaaagggataattcaaatataaaaacatcacttgtgattgatgagagcaagaaaaaagattcagaatccttgtcaagtgttggattactagacatggaggaccagtatcaacttttgaagatctgttgcaagtgcatagaaaaacagttgccttcggcttccatgcatgctattcttcagctctctgcaacactgacaaaagttcatgcagctgctatttgtttccttgagtctggtggtctgaatgcattgctatcattgccaacaagtagtttgttttctgggttcaacagtgtggcttctacaataattcgtcatattttggaggaccctcacacccttcagcaagcaatggaattagagatacgtcacagtcttgtcacagctgctaatcgacatacaaatcccagggttaccccacgcaattttgtccagaatttggcatttgtcatatatagggacccagtgatatttatgaaagctgtccagtctgtgtgccagattgagatggttggagatagaccgtatgttgttctgttaaaggatcgtgagaaagaaaggagcaaggagaaggataaggacaaatcagttgataaggataaagcaacaggtgcagtcgctaaggtagtgtccggggacacagctgcaggatctcctgcaaatgctcaggggaaacagtctgatttgaattcaagaaacgtgaaatctcaccgcaagccaccccaaagttttgtcactgttatagagcatctcttagatctggtgatgtcctttgttccgccaccccgtccagaggatcaagctgatgttgtctctggtactgccttatcttctgacatggacattgactgcagttctgcaaaagggaaagggaaagctgtgtctgtcccacctgaagagagcaagcatgctatccaagagtctactgcatcccttgccaaagcttcatttttccttaagttgatgacagatgtgttgttaacttacacatcatccattcaagttgttcttcgtcatgatgctgatctgagcaacatgcacggtccaaatcgaacaaattctggtctaattagtggtggaatctttaaccatatcctgcagcatttccttcctcatgccacaaagcaaaagaaagagagaaaaagtgatggagattggatgtataaattggcaacaagggctaatcagttcttggtggcttcatctattcgttctgcagaggcccgaaaaaaagttttttctgaaatctgcaatatacttcttgatttcaccgactcgtctgcagcttacaaagccccagtagcaaggatgaatgtgtatgttgatttactgaatgatattctgtcagcccgatcaccaactggctcctcattgtcagcagaatctgcagttacatttgttgaagttggtcttgctccttcattattgaaaatgcttcaaaatcttgatttggatcaccctgattctgcaaagatcgttactgccattgttaaggccctggaactcgtcagtaaggaacatgttcattcagcagataatgcaaaaggagagaactcatcaaagattgcttccgacagcaacaatgtgaattcatcacctaataggttccaggctcttgacatgacttctcagcccacagagatgattactgatcacagggaaacatttaatgctgaccaaacttcacaaagttcagattcagtggcagatgagatggatcatgatcgtgatatggatggtggctttgctcgtgatggtgaagatgattttatgcatgagatggctggcgatggaactggtaatgaatctacaatggaaatcagatttgaaatttcacgcaatagagacgatatggctgatgatgatgatgatgatgacaacactgatgaagatatgtctgcagaggatgatgaggaggttaatgaagatgatgaagacgaagatgaggagaataacaatttggaggaagatgatgcccatcagatgtctcatcctgacacagaccaggaagaccgtgaaatggatgaagaagaatttgacgaggatctactagaagatgatgacgatgaggatgaggagggagtcatccttcgcctggaggaggggattaatggcattaatgtgtttgaccatattgaagtatttggtggtagcaacaatttgtctggggatacactgcgtgtgatgcctctggacatttttggtacaagaaggcaaggccgaagtacctccatatacaatcttcttggcagggctagtgatcatggtgttcttgatcacccacttcttgaagagccttcctcgacattgaatttttcacatcaagaacaaccagagaatcttgttgagatggctttctctgatcgaaatcacgaaggtagctcctcccgtttggatgctatattccgcagcttgcgaagtgggcgtaatggacatcgctttaatatgtggctagatgacggtccacaacgcaatggatctgctgcccctgcagtacctgaaggcattgaagaattgctgatctctcatttgagtcggcccactcaacaacctggtgcccagactgttggtggtactcaagaaaatgaccaacccaaacatggctcagctgctgaggcaagggaaggatcgccagctcagcaaaatgagaacagtgaaaatacaacgaatcctgtagatctgtcagaaagtgctggccctgcacctcctgatagtgatgcacttcaaagagttgtgtccaatgcaagtattgagcatgctacggagatgcagtatgaacgcagcgacactataacacgtgatgttgaagcagtgagccaagcaagcagtggcagtggtgctactttaggggagagcctcagaagtttagaggttgaaataggaagtgttgaagggcatgatgatggtgaccggcatggaacttcaggggcctcagaacgattacctttgggtgatattcaagctgctgctcgatcacgcaggccatctggaaatgctgtggctgtaagcagtagagatatgtctctggagagtgttagtgaggttcctcaaaatccagatcaagaacctgatcataatgctagtgaggggaatcaggagcctagaggggttggtgctgacacaattgatcctacatttttggaggctcttcctgaggacttgcgagctgaagttctttcttcacgtcaaaatcaagtgactcagacttctaatgaccaacctcagaatgatggtgatattgatcctgaattccttgctgcactcccccttgatataagagaggaggtgctagctcaacaacgtagtcaaaggatacaacaacaatcacaagaattagaaggacaaccagttgaaatggatgctgtttcaattattgcaacattcccttcagaaattcgggaagaggtccttttgacatctcctgacaccctcctagctacactcacacctgcactagttgctgaggccaacatgttaagggagagatttgctcatcggtatcacagtagttctctttttggtatgaactccaggaacaggagaggtgagtcctcccgacgtgacataatggcagcaggacttgataggaacacaggtgatccctccagatcaactagcaaaccaattgagattgaaggtgctcctcttgttgatgaagatggccttaaagctcttattcggttacttcgagttgttcagcccctatacaagggtcagctgcagaggcttcttgtgaacctttgcacgcatcgggataacagacaggccttggttcaaattctggtggacatgcttatgcttgatctgcaggggttttcaaagaaatcagtagatgcatctgagccaccatttaggttgtatggatgccatgcaaatatcacatattcacgtcctcaatcttcaaatggtgttcctccattggtttcacgtcgtgtgctcgaaacactgacaaacttggcaagaagccatccaaatgttgctaaactcttgctctttcttgagttcccttgcccatcaagatgtcgctctgaagcacatgatcataggcatggcaaggctgttctagaagatggtgaagaacggaaagcctttgcggttgttcttttgttaactctgttgaatcagccactttatatgagaagtgtagctcatcttgaacagttactaaacctccttgaagttgtcatgcataacgctgagaatgaaattaatcaagctaagctagaagcgtcatctgagaagccatctgagaatgcagtgaaagatgtcaaagataacaccagcatttctgattcatatggatcaaagtcgaatcctgaggatggtagcaaagcccttgctgttgacaataaaagtaacttgcgagctgttctgcgaagtcttccccaatcagagcttagattgctatgttcattgcttgcgcatgatggattgtcggacagcgcttatctccttgtaggtgaagtgttgaaaaagattgtggctctggcccctttcttctgttgccatttcataaatgagcttgcacgatcaatgcaaagcttgacattttgtgcaatgaaggagcttcgtttgtacgagaattctgaaaaggctcttcttagttctacatcagccaatggaactgcgattcttagagttgtgcaggctttgagttctcttgtcagtactcttcaagatagaaaggatccagaacagcctgctgagaaggaccattcagatgcagtttcccagatttctgaaattaacacagcattggatgctttgtggttggaattgagcaactgcataagcaaaatagaaagctcttcagagtatgcatcaaatctaactcctgcttctgcaagtgcagctacattaacagcaggagtagcacctccattgcctgcaggaactcaaaacatattaccatatatagagtcattttttgtgacatgtgagaagttgcgtcctgggcaacctgatgctgtacaagaggcttcgacttctgatatggaagatgcttcaacatctagtggtgggcagagatcatattcctgtcaagctagtcttgacgagaagcaaaatgcttttgtgaaattctcagagaagcacagaagattgctgaatgcattcatccatcaaaaccctggattactggagaagtcattctcgctgatgttaaaaattcctcgcctgattgattttgacaacaaacgtgcatatttccggtctaaaatcaagcatcagtatgatcatcatcatcataatcctgttagaatttctgtgcgtcgttcatatattcttgaggactcctacaatcagcttaggatgcgctctcctcaggacttgaagggtagactcactgttcattttcaaggagaagaaggaattgatgctggtgggctgacaagggaatggtaccaatcgctttcacgagtcatttttgacaagagtgcccttctatttacaacagtcgggaatgatttgacgtttcaaccgaatcctaattctgtatatcaaactgagcacctctcatactttaaatttgctggacgagtggttggcaaagctctcttcgatggtcagcttttagatgctcattttactagatctttctacaaacacatacttggtgtcagggttacataccatgacattgaagctatcgatcctgcatactacaagaatttgaaatggatgctcgagaatgacataagtgatgttttggatctcaccttcagcatggatgcggacgaagagaaactgatattgtacgagaaggcagaggtatttgctgtcactgattgtgagttgattccaggagggcgtaacatcagggttactgaggagaataaacatcaatatgtagatcgggtagcagagcatcgactgacgactgcaatcaggcctcaaattaatgccttcctggaagggtttaatgaactcattccacgggagctgatatctatcttcaacgacaaagagcttgaacttctgattagcggtcttccagatattgacttggacgatttgaaagcaaatacagaatattctggctacagcatagcctctccagtcatccagtggttctgggaaatcgttcaggggttcagcaaggaagacaaagcccggttcctccagttcgtcactggcacttcaaaggtaccgttggaaggttttagtgcacttcaagggatctctgggccacaaaggtttcagatacataaggcctacggcagcacgaaccatctgccttcagctcatacttgctttaaccaactagacttgcctgagtacacatccaaagagcagctccaggagcggttactattggcaatccacgaagcaaatgaaggtttcggatttggctaatcagttatactcgtttgtccgtgccctgagaactgcaataggcgagcagcacgtgtgtggctgatcacattatgaactccacgtgtgtgatgagagatggccggagagaacatgtccaggatagacgaatgcccgtgggagaggtactactgttaagagagagagcgactattttgtgtttataatctttgtctgtttgtagtttttgccttacattggtcgttgctccgaagtttttccccttcttttcgttcatagactggtgtaagttgtaaccgaacattatgtcaaatgcaggtcatcttacgctggaatgttatacctcccctaatctgttaaaacaactgtaaattccgaaggactatttattctaatattattagagcgaaa

SEQ ID NO: 111390 - DNA, 11470 bp, Zea Mays
acaacaatcacaaccctctctctccctctccttcacgtagccgcctctgaatccccacctctctgctctcccgtcggcctcctccgcgaccgatgtgtgtgccccgccgccggcccaaaacactagaggtgacgagcaggtaaggggttccgatcggagatggcggcggcggcggccgcacatagagccagcttcccgttgcgcctgcagcagatccttgctggaagccgcgctgtctcacctgcgatcaaggtcgagtctgagccgcccgcaaatgtcaaagcatttattgatcaagtaatcaatattccactacatgacattgccataccgctatcaggcttccgttgggagttcaataagggaaatttccaccactggaagcctttatttattcattttgacacatatttcaagacatacatttcttctcggaaggatcttcttttatctgatgatatgactgaggctgaacctatgccaaagaatgccatcttgaaaattttaatagttatgcagattattttggagaactgtcagaatagaagttcttttactggtcttgagcatcttaagcttctcctggcatcgtcagaccctgagatagttgtagcagcattggaaactcttgttgccttggtcaaaataaatccttcaaagttgcatatgaatggaaagctaattagctgcggatccataaacacccatcttctatcattggcccaaggatggggcagcaaggaggaaggcctaggcatatattcttgtgttgtggcaaatgaaggaaaccagcaggggggcctgtccttgttcccagtagacttggagagcaaatatcagcatcgtcttggttcaactcttcattttgagtataatttgggttctgcacagtaccctgaccaaactagtgacaagggcaagtcatctaatttgtgtgtgatacatattccagacatgcatcttcagaaagaggatgacttgagcatactgaagcaatgcgtggacaaattcaatgtgcctccagagcacaggtttgcattgcttacaaggataagatatgcccgcgccttcaactccacacggacttgtagtatctatagccgcataagtcttctttcgttcattgtacttgtgcaatcaagtgatgctcacgatgagctcacatatttctttacaaatgaaccagaatacataaacgagttaatcaggcttgttcggtcagaagattctgtccctgggcccattcgtgcacttgctatgctagcactgggagcacagctggcagcatatgcatcatctcatgagcgtgctaggatattgagtggctcaagtatcatttctgctggtggaaatcgtatggtgttgctcagtgtcttgcagaaagcaatattctcactcaatagcccaaatgatgcctcatctcctctaattgttgatgctcttcttcagttttttctgctccatgtattgtcctcatcaagttcagggactacggttagaggctcaggcatggttcctcctctcttgcccctgctgcgagataatgattcttctcatatgcatcttgtctgcttggcagtgaagactcttcaaaagcttatggagtacagcagccctgctgtttctctgttcaaagacttgggtggtgtagaccttttgtctcggaggttacatgtagaagtgcagcgtgttattggtactgctgatggtcataattcaatggttactgatgcagttaaatcaaaagaggaccacctgtactcccagaagcgattgattaaagctttgcttaaggctttggggtcttctacttattcccctgggattcctgctcgttctcaaagctcccaagataattcattgcctgtgtcactttcccttatatttcagaatgtagaaaagtttgggggcgacatttatttttcagcagttacagttatgagcgaaataatccataaagatcctacatgctttcctgctttgaaagaacttggtcttccagatgcttttctctcatcagtgactgctggggtaataccatcttgtaaagccctgatctgtgttcctaatggcctgggtgcaatatgcctcaataaccaaggacttgaggctgtcagggaaacttcagcactacgatttcttgtatataccttcactagcaggaaatacttgataccactgaatgagggcgttgttcttctagctaatgcagcagaagagcttcttcgtcatgtgcaatccctgagaagtattggtgttgacatcattattgaaataatcaataaactaagttcatctctgaaagatagaaacaatgaaacagccatcttggaagaaaaaacagatatggaaactgatgttgaaggtcgtgatttggtaggtggtatggattccagtgtggagggcagtaatgatgaacagttttctcatttgagcattttccatgtgatggtattggttcaccggacaatggaaaactctgaaacctgccggttatttgtcgaaaagggaggtctaaatgctcttttgacactcttgttgaggcctagcattacactgtcatctggagggatgcctattgctttgcatagcacaatggtgttcaagggatttactcagcatcactctactccacttgcacgtgcattttgctcgtctttaagggagcatttgaagagtgcattaggggaacttgataaagtttctaactcatttgagatgaccaagattgaaaaaggagcgataccttctttgtttgttgttgaatttctgctatttttagctgcctcaaaagacaatcgttggatgaatgctttgctctcagaatttggcgatgctagcagggaggtcctggaagatattgggcgagtccaccgggaagtgctttggaaaatttcgctttttgaagaaaacaagattgacgctgaaattagtttatcttcttccacatctgaagcccagcagcctgacttgtctgccagcgacattggtgatagcagatacacttctttcaggcaatatcttgatccaattttaaggcgaaggggttctgggtggaacatagagtctcaagtgtctgacctcattaatatgtatcgagacattggcagtgcagctagtgactctcagagagttggttctgatagatattctagtctgggtttgccctcaagttcccaggaccagtcttccagttcatctgatgcaaatgtcagcacaagatcagaagaggaaaagaaaaattctgagcattcctcctgctttgacatgatgagatctctctcctaccatatcaaccatctttttatggagcttggtaaagcaatgcttcttacatctcgtcgggagaacagtcctgtaaacctatccccatccgttatatctgttgctaacaacattgcttctattatgttggaacacctcaactttgaaggacattcggtaagttctgagagggagatgactgttaccacaaaatgccaatatcttggaaaggtagctgaatttattgatgggatattattagatcggccagaatcctgtaatccaattatggtaaattcattctattgctgtggtgtcattcaggccatcctgaccacatttcaggccaccagtgagttgctcttcacaatgagcaggccaccatcttcacctatggagacagatagtaaaactggaaaggatggaaaggatatgaattcttcatggatctatggtcccctcatcagctatggcgcaattatggatcatcttgtgacctcgtcttttattctctcttcatcaactagacaattacttgagcagcctatttttaatggatctgtaaggtttcctcaagatgctgagaggttcatgaagttacttcagtctaaggtgttgaagacagttcttcccatctgggctcatcctgagtttccagaatgcaacattgagttgattagttcagtcatgtccatcatgaggcatgtttgctctggggtggaagtgaaaaacactgttggcaatgatggtgctcgtttaactggtccacctcctgatgagagtgcaatttcattgattgtagagatggggttttctcgtgcaagagctgaagaagcattaagacaagttggaaccaacagtgttgaaatagcaactgattggttattctcacacccagaggatgaacttgctcgggcgctcgcaatgtctcttgggaattctgatacacctgcacaagagggaaatggtaggtccaatgaccttgagctggaggaagtaacagtccagctgcctcctatagatgaaatgttacactcatgttttcagctacttcagacaaaggaagcattagctttccctgtcagggatatgcttgttactatcagctcacagaaggatggccaaaaccgagtaaaggtgcttacatatttgattgaaaatctgaaacaatgtgtggtggcatctgagccttcaaatgatactgcactgtctgctcttttacatgttcttgctttgattctccatggagatactgctgctcgtgaagttgcctcaaaggcaggaattgtgaaggttgctttagatctgctttccagctgggagttggaacttagggaaagtggcatgattgaggttcctaattgggtaagttcctgtttcctttctgttgatcagatgctccagttggaaccaaagttgccagatgttacagagctagatgttctgaaaagggataattcaaatataaaaacatcacttgtgattgatgagagcaagaaaaaagattcagaatccttgtcaagtgttggattactagacatggaggaccagtatcaacttttgaagatctgttgcaagtgcatagaaaaacagttgccttcggcttccatgcatgctattcttcagctctctgcaacactgacaaaagttcatgcagctgctatttgtttccttgagtctggtggtctgaatgcattgctatcattgccaacaagtagtttgttttctgggttcaacagtgtggcttctacaataattcgtcatattttggaggaccctcacacccttcagcaagcaatggaattagagatacgtcacagtcttgtcacagctgctaatcgacatacaaatcccagggttaccccacgcaattttgtccagaatttggcatttgtcatatatagggacccagtgatatttatgaaagctgtccagtctgtgtgccagattgagatggttggagatagaccgtatgttgttctgttaaaggatcgtgagaaagaaaggagcaaggagaaggataaggacaaatcagttgataaggataaagcaacaggtgcagtcgctaaggtagtgtccggggacacagctgcaggatctcctgcaaatgctcaggggaaacagtctgatttgaattcaagaaacgtgaaatctcaccgcaagccaccccaaagttttgtcactgttatagagcatctcttagatctggtgatgtcctttgttccgccaccccgtccagaggatcaagctgatgttgtctctggtactgccttatcttctgacatggacattgactgcagttctgcaaaagggaaagggaaagctgtgtctgtcccacctgaagagagcaagcatgctatccaagagtctactgcatcccttgccaaagcttcatttttccttaagttgatgacagatgtgttgttaacttacacatcatccattcaagttgttcttcgtcatgatgctgatctgagcaacatgcacggtccaaatcgaacaaattctggtctaattagtggtggaatctttaaccatatcctgcagcatttccttcctcatgccacaaagcaaaagaaagagagaaaaagtgatggagattggatgtataaattggcaacaagggctaatcagttcttggtggcttcatctattcgttctgcagaggcccgaaaaaaagttttttctgaaatctgcaatatacttcttgatttcaccgactcgtctgcagcttacaaagccccagtagcaaggatgaatgtgtatgttgatttactgaatgatattctgtcagcccgatcaccaactggctcctcattgtcagcagaatctgcagttacatttgttgaagttggtcttgctccttcattattgaaaatgcttcaaaatcttgatttggatcaccctgattctgcaaagatcgttactgccattgttaaggccctggaactcgtcagtaaggaacatgttcattcagcagataatgcaaaaggagagaactcatcaaagattgcttccgacagcaacaatgtgaattcatcacctaataggttccaggctcttgacatgacttctcagcccacagagatgattactgatcacagggaaacatttaatgctgaccaaacttcacaaagttcagattcagtggcagatgagatggatcatgatcgtgatatggatggtggctttgctcgtgatggtgaagatgattttatgcatgagatggctggcgatggaactggtaatgaatctacaatggaaatcagatttgaaatttcacgcaatagagacgatatggctgatgatgatgatgatgatgacaacactgatgaagatatgtctgcagaggatgatgaggaggttaatgaagatgatgaagacgaagatgaggagaataacaatttggaggaagatgatgcccatcagatgtctcatcctgacacagaccaggaagaccgtgaaatggatgaagaagaatttgacgaggatctactagaagatgatgacgatgaggatgaggagggagtcatccttcgcctggaggaggggattaatggcattaatgtgtttgaccatattgaagtatttggtggtagcaacaatttgtctggggatacactgcgtgtgatgcctctggacatttttggtacaagaaggcaaggccgaagtacctccatatacaatcttcttggcagggctagtgatcatggtgttcttgatcacccacttcttgaagagccttcctcgacattgaatttttcacatcaagaacaaccagagaatcttgttgagatggctttctctgatcgaaatcacgaaggtagctcctcccgtttggatgctatattccgcagcttgcgaagtgggcgtaatggacatcgctttaatatgtggctagatgacggtccacaacgcaatggatctgctgcccctgcagtacctgaaggcattgaagaattgctgatctctcatttgagtcggcccactcaacaacctggtgcccagactgttggtggtactcaagaaaatgaccaacccaaacatggctcagctgctgaggcaagggaaggatcgccagctcagcaaaatgagaacagtgaaaatacaacgaatcctgtagatctgtcagaaagtgctggccctgcacctcctgatagtgatgcacttcaaagagttgtgtccaatgcaagtattgagcatgctacggagatgcagtatgaacgcagcgacactataacacgtgatgttgaagcagtgagccaagcaagcagtggcagtggtgctactttaggggagagcctcagaagtttagaggttgaaataggaagtgttgaagggcatgatgatggtgaccggcatggaacttcaggggcctcagaacgattacctttgggtgatattcaagctgctgctcgatcacgcaggccatctggaaatgctgtggctgtaagcagtagagatatgtctctggagagtgttagtgaggttcctcaaaatccagatcaagaacctgatcataatgctagtgaggggaatcaggagcctagaggggttggtgctgacacaattgatcctacatttttggaggctcttcctgaggacttgcgagctgaagttctttcttcacgtcaaaatcaagtgactcagacttctaatgaccaacctcagaatgatggtgatattgatcctgaattccttgctgcactcccccttgatataagagaggaggtgctagctcaacaacgtagtcaaaggatacaacaacaatcacaagaattagaaggacaaccagttgaaatggatgctgtttcaattattgcaacattcccttcagaaattcgggaagaggtccttttgacatctcctgacaccctcctagctacactcacacctgcactagttgctgaggccaacatgttaagggagagatttgctcatcggtatcacagtagttctctttttggtatgaactccaggaacaggagaggtgagtcctcccgacgtgacataatggcagcaggacttgataggaacacaggtgatccctccagatcaactagcaaaccaattgagattgaaggtgctcctcttgttgatgaagatggccttaaagctcttattcggttacttcgagttgttcagcccctatacaagggtcagctgcagaggcttcttgtgaacctttgcacgcatcgggataacagacaggccttggttcaaattctggtggacatgcttatgcttgatctgcaggggttttcaaagaaatcagtagatgcatctgagccaccatttaggttgtatggatgccatgcaaatatcacatattcacgtcctcaatcttcaaatggtgttcctccattggtttcacgtcgtgtgctcgaaacactgacaaacttggcaagaagccatccaaatgttgctaaactcttgctctttcttgagttcccttgcccatcaagatgtcgctctgaagcacatgatcataggcatggcaaggctgttctagaagatggtgaagaacggaaagcctttgcggttgttcttttgttaactctgttgaatcagccactttatatgagaagtgtagctcatcttgaacagttactaaacctccttgaagttgtcatgcataacgctgagaatgaaattaatcaagctaagctagaagcgtcatctgagaagccatctgagaatgcagtgaaagatgtcaaagataacaccagcatttctgattcatatggatcaaagtcgaatcctgaggatggtagcaaagcccttgctgttgacaataaaagtaacttgcgagctgttctgcgaagtcttccccaatcagagcttagattgctatgttcattgcttgcgcatgatggattgtcggacagcgcttatctccttgtaggtgaagtgttgaaaaagattgtggctctggcccctttcttctgttgccatttcataaatgagcttgcacgatcaatgcaaagcttgacattttgtgcaatgaaggagcttcgtttgtacgagaattctgaaaaggctcttcttagttctacatcagccaatggaactgcgattcttagagttgtgcaggctttgagttctcttgtcagtactcttcaagatagaaaggatccagaacagcctgctgagaaggaccattcagatgcagtttcccagatttctgaaattaacacagcattggatgctttgtggttggaattgagcaactgcataagcaaaatagaaagctcttcagagtatgcatcaaatctaactcctgcttctgcaagtgcagctacattaacagcaggagtagcacctccattgcctgcaggaactcaaaacatattaccatatatagagtcattttttgtgacatgtgagaagttgcgtcctgggcaacctgatgctgtacaagaggcttcgacttctgatatggaagatgcttcaacatctagtggtgggcagagatcatattcctgtcaagctagtcttgacgagaagcaaaatgcttttgtgaaattctcagagaagcacagaagattgctgaatgcattcatccatcaaaaccctggattactggagaagtcattctcgctgatgttaaaaattcctcgcctgattgattttgacaacaaacgtgcatatttccggtctaaaatcaagcatcagtatgatcatcatcatcataatcctgttagaatttctgtgcgtcgttcatatattcttgaggactcctacaatcagcttaggatgcgctctcctcaggacttgaagggtagactcactgttcattttcaaggagaagaaggaattgatgctggtgggctgacaagggaatggtaccaatcgctttcacgagtcatttttgacaagagtgcccttctatttacaacagtcgggaatgatttgacgtttcaaccgaatcctaattctgtatatcaaactgagcacctctcatactttaaatttgctggacgagtggttggcaaagctctcttcgatggtcagcttttagatgctcattttactagatctttctacaaacacatacttggtgtcagggttacataccatgacattgaagctatcgatcctgcatactacaagaatttgaaatggatgctcgagaatgacataagtgatgttttggatctcaccttcagcatggatgcggacgaagagaaactgatattgtacgagaaggcagaggtcactgattgtgagttgattccaggagggcgtaacatcagggttactgaggagaataaacatcaatatgtagatcgggtagcagagcatcgactgacgactgcaatcaggcctcaaattaatgccttcctggaagggtttaatgaactcattccacgggagctgatatctatcttcaacgacaaagagcttgaacttctgattagcggtcttccagatattgacttggacgatttgaaagcaaatacagaatattctggctacagcatagcctctccagtcatccagtggttctgggaaatcgttcaggggttcagcaaggaagacaaagcccggttcctccagttcgtcactggcacttcaaaggtaccgttggaaggttttagtgcacttcaagggatctctgggccacaaaggtttcagatacataaggcctacggcagcacgaaccatctgccttcagctcatacttgctttaaccaactagacttgcctgagtacacatccaaagagcagctccaggagcggttactattggcaatccacgaagcaaatgaaggtttcggatttggctaatcagttatactcgtttgtccgtgccctgagaactgcaataggcgagcagcacgtgtgtggctgatcacattatgaactccacgtgtgtgatgagagatggccggagagaacatgtccaggatagacgaatgcccgtgggagaggtactactgttaagagagagagcgactattttgtgtttataatctttgtctgtttgtagtttttgccttacattggtcgttgctccgaagtttttccccttcttttcgttcatagactggtgtaagttgtaaccgaacattatgtcaaatgcaggtcatcttacgctggaatgttatacctcccctaatctgttaaaacaactgtaaattccgaaggactatttattctaatattattagagcgaaaattctctctttcgctctcccaatcc

SEQ ID NO: 111391 - DNA, 2423 bp, Zea Mays
ttttttatactgtatcgaattatcttacatcagttttttgttcccttgtattctcttttacctaatgtgatggtggatggcccttttgtcattttcagattgtcggacagcgcttatctccttgtaggtgaagtgttgaaaaagattgtggctctggcccctttcttctgttgccatttcataaatgagcttgcacgatcaatgcaaagcttgacattttgtgcaatgaaggagcttcgtttgtacgagaattctgaaaaggctcttcttagttctacatcagccaatggaactgcgattcttagagttgtgcaggctttgagttctcttgtcagtactcttcaagatagaaaggatccagaacagcctgctgagaaggaccattcagatgcagtttcccagatttctgaaattaacacagcattggatgctttgtggttggaattgagcaactgcataagcaaaatagaaagctcttcagagtatgcatcaaatctaactcctgcttctgcaagtgcagctacattaacagcaggagtagcacctccattgcctgcaggaactcaaaacatattaccatatatagagtcattttttgtgacatgtgagaagttgcgtcctgggcaacctgatgctgtacaagaggcttcgacttctgatatggaagatgcttcaacatctagtggtgggcagagatcatattcctgtcaagctagtcttgacgagaagcaaaatgcttttgtgaaattctcagagaagcacagaagattgctgaatgcattcatccatcaaaaccctggattactggagaagtcattctcgctgatgttaaaaattcctcgcctgattgattttgacaacaaacgtgcatatttccggtctaaaatcaagcatcagtatgatcatcatcatcataatcctgttagaatttctgtgcgtcgttcatatattcttgaggactcctacaatcagcttaggatgcgctctcctcaggacttgaagggtagactcactgttcattttcaaggagaagaaggaattgatgctggtgggctgacaagggaatggtaccaatcgctttcacgagtcatttttgacaagagtgcccttctatttacaacagtcgggaatgatttgacgtttcaaccgaatcctaattctgtatatcaaactgagcacctctcatactttaaatttgctggacgagtggttggcaaagctctcttcgatggtcagcttttagatgctcattttactagatctttctacaaacacatacttggtgtcagggttacataccatgacattgaagctatcgatcctgcatactacaagaatttgaaatggatgctcgagaatgacataagtgatgttttggatctcaccttcagcatggatgcggacgaagagaaactgatattgtacgagaaggcagaggtcactgattgtgagttgattccaggagggcgtaacatcagggttactgaggagaataaacatcaatatgtagatcgggtagcagagcatcgactgacgactgcaatcaggcctcaaattaatgccttcctggaagggtttaatgaactcattccacgggagctgatatctatcttcaacgacaaagagcttgaacttctgattagcggtcttccagatattgacttggacgatttgaaagcaaatacagaatattctggctacagcatagcctctccagtcatccagtggttctgggaaatcgttcaggggttcagcaaggaagacaaagcccggttcctccagttcgtcactggcacttcaaaggtaccgttggaaggttttagtgcacttcaagggatctctgggccacaaaggtttcagatacataaggcctacggcagcacgaaccatctgccttcagctcatacttgctttaaccaactagacttgcctgagtacacatccaaagagcagctccaggagcggttactattggcaatccacgaagcaaatgaaggtttcggatttggctaatcagttatactcgtttgtccgtgccctgagaactgcaataggcgagcagcacgtgtgtggctgatcacattatgaactccacgtgtgtgatgagagatggccggagagaacatgtccaggatagacgaatgcccgtgggagaggtactactgttaagagagagagcgactattttgtgtttataatctttgtctgtttgtagtttttgccttacattggtcgttgctccgaagtttttccccttcttttcgttcatagactggtgtaagttgtaaccgaacattatgtcaaatgcaggtcatcttacgctggaatgttatacctcccctaatctgttaaaacaactgtaaattccgaaggactatttattctaatattattagagcgaaaattctctctttcgctctccc

SEQ ID NO: 111392 - DNA, 104 bp, Zea Mays
cctcctattttttattccacttgtcgaatcttgcatcactattacctattctagattcgagtttgttagagttcctaatacaatggatcaagcagtctcattag

SEQ ID NO: 111393 - DNA, 851 bp, Zea Mays
cttcaccgcagggccatcggctttatctccagccgtggtgctcctctccctcgctgtggagctcccgcgcgagctcctctgctggccgctgctactcggcttctctggtgcgcgcccctcctccaccatcgcacacctctggtcgctcctgctccactccatggcctccatccatggccgctgtcgattgtccctggacggtctcaagcgccctcgtcttcctttggcttcagcttgccgtcgactttccttgccgcgcgtgccttggtccgagctcacccatgtcgagctccctcggcgtccctcccatgcccgcgctcgcccaggtcacgcgccgtcgcccagctcaccctcagccatggacgtgccaagccgcttcctccttggccggccgtcgtgagcccctgcgcggcctcctcccaattcaatttggagctgctgcgcctcagcctcgatctgtcgtgcccctgctcaccgtcaacccgcctcggccaagccttcctgttcctgccgtcgcgggttgtcgttcgtctttgcatcgtgtgtacagcaacgtcgttgattcctccatggtgcttgtcgtcaaacttcgcttcatcgattccctgccttcggttcgctcatgcccaaccattgatgccgttgttgttcgcctccacgttgtgtgcgacaacatcgtcgttttcccttcatgtgctcctcctcgatctctgcctcgccatcaccctctgtcgcagcaccgtgtcgacgacttgcgattctcgcctttgtgctcacacctcgcaagatgctgctctagtactcaccagttggatgctgaactgaagaaggcccctgtgcgacgccactaa

SEQ ID NO: 111394 - DNA, 2143 bp, Zea Mays
aaaagcagagccgtctgcgttgccgctaacaaggccgccgccgatggacgccttcgtcgccggttcgcgcggccgcccagccctcagcttcctttgccctaagatatcgctattctccccgccctcgcactcctggttccgctggctcgtcggtgcgcctcgcgttctccctcccttcaccgtcgctgctgtcttacgtcccattcacggcgaccatgacgccattgatcttcccagggaagcagacgaaatccgggggttgctgccacgcggtttcgacatcataggggtgctgctcgtggggggagagggttctgatgcggacgtcactcgcgcactggagcaggctcgggcgctgagggagctgctgtttggtgtggcagcgagccatggcttggtaggaggccacatggatgcagccactggggagattcgatttgttgtatctgagagtggatggacgaactcggtggaaggatctgtggttacatgggaggatgagcccgggaggttgttgtgggagaagggatgcctcctgcgctgcgaactgctgctgaagcttccactctatcttaggcctgacgtgaattctggcatcgaaggacagttttcttcacttattgaatctacagttgctaaactcagagatcctcatgtatattatttagttgaggggccaattacatctagtcaatcacatcgttctattatcttgcgtggcgatgatttaagctttgattcacatacacatggaaactcaagaacagacagttgtaccacaagtattgtaacttgttcagaattcttcacagaaaagaggtatgacctctcattgacaagagagactgcagatgcaattgcaataactgtcaaccaatcagcgcctagcttgaagcctggcggtacccctgtggtagagtattttcctgcctcagcacctgccagcctcatagtaatcaccttgaagcttgacatactatgctactcatcaatagactttccagtggcggctgctgtatctgaacttgttattccaggattagcagatcagatgattgtaatgaagagaattattgcttcagagataactcaacaagcacagcttcaaccattccattttattccttctggttggcatgttccagtaacagctatatacaatacaagatatggtgagactgaggagaggcaaagtgagctgcgaaaagaactgcatttaaggctaggacttcccttagatcggcctttgttgcgaatttctaatgcattgactttcggtggcatgggaaggaggaagaaaagcatgccaagaagtggttcttcgctgcttcgagacatccacagagaacttccatctagtggtgtatccggaggtgttatgtctttgattgatggttcatatgagtattatcattatcttcacgatggtattgatgacaatggatggggatgcgcatatcggtctctacaaacaattgtctcttggtacagattgcaacaatattcatcaatagatgttccttctcacagggagattcagcaagttcttgttgaaattggtgacaaggatccatcatttattggatcttgtgagtggatcggagccattgagttaagctttgtcctcgacaaactgctgggcgtgagttgtaaggttatcaatgtgaggtctggcgatgagcttcctgaaaagtgcagagaacttgccaggcattttgaaacccagggaactcctgtgatgattggtggtggagtcttggcttacacccttttgggagttgattataacggagccagtggagactgtgcatttcttatccttgatccgcactacactggtactgacgatctcaaaaagattgtaaatggcggatggtgcggatggaagaagtctgtcgacagcaaaggccgaagcttcttcttgaaagacaagttctacaaccttctactaccccaaaggccaaacatggtgtgaaacctatattgttcaatatgttaatagtgcagacgtgcaggttcacgaggcacagatatttatgcttgtgatagaggtttatggttgcgatagcagaagttatgatttgtaaaaaaaatttagtgagacattatattgtttttttaataaatttgtagtgagtaaatt

SEQ ID NO: 111395 - DNA, 2192 bp, Zea Mays
ccgccgatggacgccttcgtcgccggttcgcgcggccgcccagccctcagcttcctttgccctaagatatcgctattctccccgccctcgcactcctggttccgctggctcgtcggtgcgcctcgcgttctccctcccttcaccgtcgctgctgtcttacgtcccattcacggcgaccatgacgccattgatcttcccagggaagcaggcaagtctcaccaacccacttttcccaacaactcatgattccgcctgagtcctgacgatgtccctatacttctatgccttccgcagacgaaatccgggggttgctgccacgcggtttcgacatcataggggtgctgctcgtggggggagagggttctgatgcggacgtcactcgcgcactggagcaggctcgggcgctgagggagctgctgtttggtgtggcagcgagccatggcttggtaggaggccacatggatgcagccactggggagattcgatttgttgtatctgagagtggatggacgaactcggtggaaggatctgtggttacatgggaggatgagcccgggaggttgttgtgggagaagggatgcctcctgcgctgcgaactgctgctgaagcttccactctatcttaggcctgacgtgaattctggcatcgaaggacagttttcttcacttattgaatctacagttgctaaactcagagatcctcatgtatattatttagttgaggggccaattacatctagtcaatcacatcgttctattatcttgcgtggcgatgatttaagctttgattcacatacacatggaaactcaagaacagacagttgtaccacaagtattgtaacttgttcagaattcttcacagaaaagaggtatgacctctcattgacaagagagactgcagatgcaattgcaataactgtcaaccaatcagcgcctagcttgaagcctggcggtacccctgtggtagagtattttcctgcctcagcacctgccagcctcatagtaatcaccttgaagcttgacatactatgctactcatcaatagactttccagtggcggctgctgtatctgaacttgttattccaggattagcagatcagatgattgtaatgaagagaattattgcttcagagataactcaacaagcacagcttcaaccattccattttattccttctggttggcatgttccagtaacagctatatacaatacaagatatggtgagactgaggagaggcaaagtgagctgcgaaaagaactgcatttaaggctaggacttcccttagatcggcctttgttgcgaatttctaatgcattgactttcggtggcatgggaaggaggaagaaaagcatgccaagaagtggttcttcgctgcttcgagacatccacagagaacttccatctagtggtgtatccggaggtgttatgtctttgattgatggttcatatgagtattatcattatcttcacgatggtattgatgacaatggatggggatgcgcatatcggtctctacaaacaattgtctcttggtacagattgcaacaatattcatcaatagatgttccttctcacagggagattcagcaagttcttgttgaaattggtgacaaggatccatcatttattggatcttgtgagtggatcggagccattgagttaagctttgtcctcgacaaactgctgggcgtgagttgtaaggttatcaatgtgaggtctggcgatgagcttcctgaaaagtgcagagaacttgccaggcattttgaaacccagggaactcctgtgatgattggtggtggagtcttggcttacacccttttgggagttgattataacggagccagtggagactgtgcatttcttatccttgatccgcactacactggtactgacgatctcaaaaagattgtaaatggcggatggtgcggatggaagaagtctgtcgacagcaaaggccgaagcttcttcttgaaagacaagttctacaaccttctactaccccaaaggccaaacatggtgtgaaacctatattgttcaatatgttaatagtgcagacgtgcaggttcacgaggcacagatatttatgcttgtgatagaggtttatggttgcgatagcagaagttatgatttgtaaaaaaaatttagtgagacattatattgtttttttaataaatttgtagtgagtaaatt

SEQ ID NO: 111396 - DNA, 1654 bp, Zea Mays
attccatcctagttttttctctttcagttcactttaactgtggtaatatgggttctcatgttactgaaaatatcttcttttcttttttcaaagcctcagcacctgccagcctcatagtaatcaccttgaagcttgacatactatgctactcatcaatagactttccagtggcggctgctgtatctgaacttgttattccaggattagcagatcagatgattgtaatgaagagaattattgcttcagagataactcaacaagcacagcttcaaccattccattttattccttctggttggcatgttccagtaacagctatatacaatacaagatatggtgagactgaggagaggcaaagtgagctgcgaaaagaactgcatttaaggctaggacttcccttagatcggcctttgttgcgaatttctaatgcattgactttcggtggcatgggaaggaggaagaaaagcatgccaagaagtggtattcaccatgcatatgttgcgacatatgcttcattactctgttttccccctaaattacatgtgggatcttgtggtaactttgtgcaaaaaatgtttcaaagtataatatatataagaactgcaaaatatcatattatactatgtgagaagttaataacttcatctaacatgaagataagaacttatctttgtatatgtaattcctcaggaagtagaatttgttttcatccattgtggtatgttatcacattcaggttcttcgctgcttcgagacatccacagagaacttccatctagtggtgtatccggaggtgttatgtctttgattgatggttcatatgagtattatcattatcttcacgatggtattgatgacaatggatggggatgcgcatatcggtctctacaaacaattgtctcttggtacagattgcaacaatattcatcaatagatgttccttctcacagggagattcagcaagttcttgttgaaattggtgacaaggatccatcatttattggatcttgtgagtggatcggagccattgagttaagctttgtcctcgacaaactgctgggcgtgagttgtaaggttatcaatgtgaggtctggcgatgagcttcctgaaaagtgcagagaacttgccaggcattttgaaacccagggaactcctgtgatgattggtggtggagtcttggcttacacccttttgggagttgattataacggagccagtggagactgtgcatttcttatccttgatccgcactacactggtactgacgatctcaaaaagattgtaaatggcggatggtgcggatggaagaagtctgtcgacagcaaaggccgaagcttcttcttgaaagacaagttctacaaccttctactaccccaaaggccaaacatggtgtgaaacctatattgttcaatatgttaatagtgcagacgtgcaggttcacgaggcacagatatttatgcttgtgatagaggtttatggttgcgatagcagaagttatgatttgtaaaaaaaatttagtgagacattatattgtttttttaataaatttgtagtgagtaaattaaattaaattaacgaatgagagttttacaggcataacactaaaagcagacgttttgcttgagacgtcatgcttaacatgtggagtctgtgt

SEQ ID NO: 111397 - DNA, 165 bp, Zea Mays
atgggtggagagatcgatagaccgatcaacagacggagacgagcccataaggacgaactagggcaggagtgccgacgaggaccaggaggccagagccccgccaagccaagacttagctatgactccacctctcagcttctaagctccacttccaccccgatctag

SEQ ID NO: 111398 - DNA, 582 bp, Zea Mays
atggcgcccaggcctagccacggcgattccttgccggagaggggtcaacgactgcctagtgaacaaatcgtgttcggaaaacgtgtaaaacaaaattcaagcaccaacaaacttgatagcagagtcttaccatggcatagcttggtggtgaggccggtccatgccgcatggccatccgcagcggaggcgggtcaatggcgagctatcctaggcctccacggtgcccactcttctgaagagagctcaattcgccccagcgtgacccgacgtagctccctgaccatctcatgctctccaattgcagacgccggtggggttccatggtggtggccgccaactgctcttggctccctgtgttgtgctcccatcgcggtcgggttcccagcaatggggaagagggagggggtcctaggctcccacttatacgctggtaaggcagggaatcataacaacttcatcccatactggccggtgaagatcaaaagttgcggtgaactctgttgcaactgggaagaaggccctggtgtcggggtccacctactagagatcgaagcggggaagggtgcagaagagataaggtga

SEQ ID NO: 111399 - DNA, 1600 bp, Zea Mays
ctcacgcgcgcgcgactgccttctctgcttctctctccctcgcgtcttcttgttccccgagcttccatcgcccgcgccctggcatccgcctgctcctctcggccgaccggccctgctccactgcgccaagctcctccctcaccctggtcccggtcctcagcgtgcctgctccctggagctcgcccatgccgcgcgctcctccgtgccggcgttctctactcgaccatggcgtggacagccgccgagccccctccgcccgtcttccctctgttcagagcgccgtcacctggagtccctacgcgctccatctctgcctggccatggagctcgcccctggctcggattccagcgccccgctccctgtttgccccagctcgcctggccgctgcgcagccccctcggcttctcctccctcagctcgtctctcctgcccgtgcgcgtccttcccatggctgtctgttcgagctcctccctgcgtcgcgcgcgagctcggcgcccaactctcctgcgcactggtcgcccctccctctgttcgcttgcgcgcagtcatgcccctgcttcagctctggagcatccccacgcgcgcgttctgttcctcctgcgcgtgagctcagcgccccttccggcctcctgttcgccatcagcgcagtagtttctcttcaagtgcagcgccggttgtcctcgtgctcagctccaagctcgcccagctttggtggtcgtcgcctccacctcgacctgagcaccgccacggagttcgccccttccagacttccagttaccttgtcgcacctgcgttcttgcccctgcccatagcacagcagtggcgatgtgcttcatccagctcttccctagtcgtcgagctccgagcacaacccgagcaccacccttgtccgcgtgagctcgactggatccccaccttcgcgacctcgccatcgatttagctgctgcccatgtcatgctccctgcgcagcatcttccttagccatggcgagtccctcgctgccacgattgtccagtggttggcccacgccgtccctactcctctcagtctgctgctacttgtgtttgtgtccgagcccgcccggctgcaacctcgctttgctctgtttgtgtctgatcccgcccggctgcaaccttgctttgctctccgtgtcgctgctctccgaatccagcctcatgttgacgcgtccatatttcagcttgtcgtgccgcgtcgtcatcgcttcctatcacgagctcgatctccgttgtcatcgggcttcacacgttctcgcgtttgtcgtcgagctgttgaacccgtcctcccttgctcgtgacttcatcgtcgcctgagctcgcgctaacctgctcaaccccacctcgctagctcgctctagactcgatctcgtcgtcgttccgtgtgtcgtccagaaatcctaagcgttgggtgaagacgaagctagccgcgtgatatttaccaagtgctcgacaaaagacctgagcgagaatcagcaacgtttgcttggaattttaattaaatcggtaaccattctctagttcgctatttctttaattgattgagtcgatggatgaaataaattaatgtgctattgtgatgctc

SEQ ID NO: 111400 - DNA, 1024 bp, Zea Mays
agtataaactttcctccctccgtccctcctccttccccgtcttatcccctcgcccctcctcccctccgccgctccccccagtccccacctcacctcgtcaaccccctccttggatagggttagagttcccccggcacgagcgcgagccatggcctccttcacctgctcccaggtcggcgctgcggcagcgggcggagcctcgcccttcctcggctaccggcggcggagcggccccgggggcgccattccgtcgagctccctcttcgtgggccggcggttggcggcggtgcagatgcgcgcgccctctcgcggggtccgcgggggctccgcgctgcgggtcacgtgcgagaaggtggtggggatcgacctgggcaccaccaactccgcggtcgccgccatggagggcggcaagccgaccgtcgtcaccaacgctgagggtgcgcgcacgactccctccgtagtggcgtacaccaagacaggggagcgcctggtggggcagatcgctaagcgccaggcggtcgtgaaccccgagaacaccttcttctctgtcaagcgcttcatcggccgcaagatgtctgaggtcgacgacgaggccaagcaggtctcgtacggcgttgtcaaagacgacaacggcaacgtcaaactcgactgccccgctattggcaaacagtttgctgccgaggagatctctgcgcaggtaacttgttatgttagataggttttctactctcagctggtggatatgcattttacttttactgtatttttttcatgggacgacttgtacagaaattagagttctgaggatatgggtaaatgctactcttgttgtcattcaattgcagttttactagagaatagctcctggacctggcaaatcatttgttaaggtacaccagatccagatggatgctttttgtaatgcaagtggttacattgcgtttgaggtaaaaggtgtattttgccacataaacactgagtgaatttaaagtaagttgtttttgtgttactaggcacccagtct

SEQ ID NO: 111401 - DNA, 678 bp, Zea Mays
agattcgacaatgaaccaactgctgcatcattggcctatgggttcgagaagaaaaataatgaaacaattctagtgtttgatttgggaggtggtacctttgatgtctctgtattggaagttggagatggtgtgtttgaggtgctttccacatcaggtgatacacaccttggtggtgatgactttgataagagaatagtagattggcttgctagcaacttcaagaaagatgaaggtattgatcttctgaaggataaacaagcccttcagaggcttactgaggcatcagagaaagctaagatggaactgtcaacgctgacacaggcaaatattagcctgccattcattactgctactgctgatgggccaaaacacattgaggcaaccctctcgagagccaaattcgaggaactatgttcagaccttatagacaggcttaaaactcctgttaataatgccttaagagatgccaagttgtctgtcagtgatctagatgaagttattcttgtgggtggatccacccgaatccctgcagttcaagaacttgtgaggaagcttactgacaaagatcccaatgttacggtcaaccctgatgaggttgtttctcttggggcagctgtgcaggtgattttctttatcctcaaatgttgtttattgttgcagagcataatcctcacatgg

SEQ ID NO: 111402 - DNA, 318 bp, Zea Mays
atgcgcgagcgagcagagcacaggggaggaaaccagggtgcgcaggaaacagggcacaacgctgcacagaggagggagaggaaagagatgggcgccatgggagctggagcaggcgaccagagggggcgcgaccggatgcgcaaggaaagaacggaaagaaaagcaggggtagaagaggacgaccagcaagctagagcccgggcgagctccagagacgagcacgcaggggcggcgcttgagggatgccagggagctgtgcttggggaagagaaagagagcgacgcgacaggaactgagcgagcaggagggcgagcttga

SEQ ID NO: 111403 - DNA, 270 bp, Zea Mays
ggagacacagattgccttctacctctccaattcatgtccaatccactgaaagatgaaggagatccaccccttgaatgggatactagacgatctgacagagatgtgcgtagattcggaggcgaagttcctccttttctgtttaaaattgggtcacttgagccagtactcaacctccttgaagcaggacttggtgacctttgtggaggtgttgatgtcctagaagctggaggagtcgaagaccttcgtgatggtgccgctggttgcaaatga

SEQ ID NO: 111404 - DNA, 664 bp, Zea Mays
catctacagctccaatgaggttccacttatgcttgcaatggaacaattcacatcatcatctaagctccctgtaaaaccacaattcagtagcctcccattccgaatgctggcatcagatcagggcccatcgacggcatacccatcccggccatgggaggcatgcccattccacccatcggaggtggagggccacccatgccaggcattggcggcgccggcaaagcgagaggaagcagctgtgcatacatgttctgcacatcgcataagaatgcaacttgtcatgtcaatgcctcagcacgaaaacaaaacacacgcgagcgcggttttaggtttacctactgagccacaaggtctttctcctccttctccttagctctttcttccttctgcgactcgatcttgtccttcactaaatcatccaccttgctagtgtattcacgaatgaactgcgcacatagtagggatgttactatggtaaactgtatgtaaatagacgtcggcgcgaacatggacaaaaattactacgtacctgtaacaggtacgggaaggcaaagtccaccatgttgttcatccatgcaagctcaagagcgacatccggccggatcaggtcgtagcaaatgaagaggcaagaaacaaaacattctttcttaccctgcattacata

SEQ ID NO: 111405 - DNA, 158 bp, Zea Mays
ttatatttttatgttgtaccacataactatcgatgtactgcttatttatgagtatccctgctttatactcacatatgtactgcttatttatgagtatccctgctttatactcacatatgtactgcttatttataagtatttaaataaaaaacaaaaaa

SEQ ID NO: 111406 - DNA, 835 bp, Zea Mays
cgaccagtcgaccaccaccaccaccaccgccaccgttattcgctctgcagtctgcaccctcctcctcgctttccgacccccaaaccctagatccccttcgccgtggcggtggcgccgcggtgacccggcgcggcggcggcggcgatggcggccgtgccggaggacctccgctgcaagcgctccgacggcaagcagtggcgctgcagcgcgccctccatgcccgacaagaccgtctgcgagaagcactacgtccaggccaagaagcgctccgcctcctccgcgctccgcgcctcgctccgccgctcctcagcctcctccctcgcgcccgtcttcccattctcctcctccccctcctccgccgctcgcctccgcgccgccgacgaggacccgcccatggcggtcgcgaggcccctctacggcagggtcgccggggaggcggtgtacgtggctgaaccggtgccggcgcccgcgcggagggaggtcgcctacgaagggctgcctcggggcaatgcggctggtggcaggactgcggcggggctggtcggcagaggcccactatggtttcctggtggcggctctgaagggataaggagttgccaccagtgccggaaggctgggggtgtcatctggtgtaccagctgtgacaggagaggctactgtgccagatgcatctccagatggtactctgacattccgatggatgaagttcgaaatgtttgtccagcatgccgtggtatttgtaattgcaaagtttgcttacaaggagacaacttaataaaggctagggtgcaagaaatatcagctgttgataagttgagatatcttcattgccttt

SEQ ID NO: 111407 - DNA, 1962 bp, Zea Mays
cttgtagagttgaatctgcttcaaacaaataactacaaacctttaaataatattcaaggctgcaatgaatttgagctgtgcaattcacttgcagattatcgaagtgatttaatgataaccggtattatcacaaaggatattgagtctactgttttggctttggaactgaagcaacacaaactacagctgcaagagcaacgagttatgtttaccgatgtccttgaagaattgatggcactggcagaagcaactctatggaaagtgaaccagcatttggagaatattgcaatctgcactttacatgaggagaacaatgaggcaagggttgatttggagaacctgaagcaaaattgtgaagaaattatgaaaaaattgcatgccatgaacgaggaaaacacaacacttaaatgtttaatgtcctccttccaaacaaatttggatgcaaaaaacaaagctttgatggagttggaatgctctcatgcaaccatatgtacggagctggaactgacaattgatgccatgaatcgcagaagtactagagaaaattatttcatttctgaaaatgaaacgttgaagcaggaaattcggaatattttgtgcaaggatcagtgcatggttgaattaatggataacattgaagcagataagttattttccaccattgaaggtcgcttgcaattggttactgatcatgtgcacaattacattactgagcaaataaacacgatgagcaagttatccaatgacttagacattatcgaagtatcagcccaggagttaagcacacagaattcacttctcaagtccgaattaatcagaaaagaggaattaacaaagggcttatcatttgatcttagcctgttacaagagtctgcatctgtagcgaaagatcaagcagctgagattacagggttgagaaaagtaataaaatctttggaactagagcttgcatctaagtcgcttgaacttgatgatgttgtttctgataggcaacaattggaagcaatgattttgaagtgtaatcaaaatgttgctgccctagaggaggagctgggaaagaagattgatgaattaaacatagtttctatggagaatgctgaactaaaatcgcagatccagcatattgaagagattagttgcactatggaggagttagctgataaaagtgaagtaattagaagacttgaagaaaagttgattgaatcaagaactttaattgatgaaaggagtgtctgtcttcagagcttgcaaaatgatttctccaaactctcagatgaaaagacatcatgtgacactgagttgcttatcttgaaagagaagctggagatggctcaggcacttgcagaagaaagtgaagcaattgctacagaatctcggcagatagctgaggagcataaggcatatgccgaagggaaggatgaagaagtaaaggtattggagaggtcaattgaagaacttgagaatactgtggaaattgtcaaggaagaagcagagcggcaaagaatgcagcgagaagaactagaagtggagctgcagaaagttaggcaacaaatgctagctgtaccaccctctgggaaagcaaggagatatatggaagatggaatgattgatttagctgactcatccaggcacccagtagatatgcacaatgagctcctcagtgctcaagagactattagaatacttagaaaggaggtttctgagaaggaatcagagattgctcagtgcaatgcacatatctcagaactaaacattcatgctgaggcagcggcacaagaatacaagcacaagatattcatgttgaatgcgaaactagcaacaacagagagcatgacgcacgatgtgattcgagatatgcttggggttaaaatgaacatgacaacctgggcggctctagctgacaaccagcaaaagctggagacaaaagagcccatcacttctcaagcacaggaaatcaaagac

SEQ ID NO: 111408 - DNA, 925 bp, Zea Mays
acagctggcttgacgaaataaaccagaagcaatcagagcttggagctgcccgcattactatagagaagttacgacaacgggaacactttatggtagctgaaatagagttgctaaaggctgagaattcaaactacaaaaccatcatccttaaccttgaagccgaagtgaagaaccttaccagacaacagaacctccagctccgaataaatcaccacgttaaaacgaaggaagagaacatcctgctgaagaggcagaacgaagagctaagtgcaaagctgaaacagctggggggcatccttacccgtacgaaggaagagctcgcccgctacagggtttcaaatggaagagatccgcacgaactgatcgaggaggaggagcttctgaggaagaaactagacgagagcgaacgagatagaagccagctggcggaaaacctatcaagcctatgctccagcattctgaaggtcgctggagtttcggactcagaatctgacgctactcttttgaaagcatcggagtgcttggatcagctccagtgccgtatcgcttctttggaaggccaagttgaggatctaaatctaaagtgcaaactagtgcgtgaaaaggcccgcctgtgcgagctccggagcaactcgtcgtctctgcgcacaggggcgaagggcaatctgacatcgcccagtccggacacatcgccaagcatttcgtccttccgatgacacaagcggacggatacatcgccgagaagctagtgtacattagtacgtacataacacattccgtgtaactattctagtgcagccgggctgcttagggaggattagttcagtccaacaatctccctttgctgattttatatatatctgctgtacaatatatataccgtgtgtgtacttgatgcagttccattcaacacttgtcttctctc

SEQ ID NO: 111409 - DNA, 435 bp, Zea Mays
atggcggcggcggggccatggccgcgggacctcgcccccgtgtcccctacttggcttggccgccgcgcttggagccagatccgcgacggagatgtgtggatccggtgggctcgaggtcatacctggccatccctcggctcatggttgcggggttgggcgctccggtggcacacgtgctccgtgggctgtgggccacgccagagtgggagactgggagctgcctctattcgggggggggggcgtggtgcggcatggagaaggccgctgccggtggcccaggttggggcggttggtggccgcaacaggttggccttggggcggcagtcagatccggaggtccagtggctggatttgccgtccctgaggccgatgtcggttgtggagcgtcggcgggcgagctccccatggtggtgcggcggtgaggagcgtaggtga

SEQ ID NO: 111410 - DNA, 204 bp, Zea Mays
atgggcgatgagttagaagagtcaggtcaactaaaaagacaaaagaagaaggtgcagtcggccttgatgcaacgcgtgccgggccagggactgtcgctgtccaccatccctggcgaagaggtagagcaactggagccagaacggtcggcgaggcagcggcggccggcgggattcggcctttctgatgtggaatctaacgtctga

SEQ ID NO: 111411 - DNA, 1520 bp, Zea Mays
gatgcaacttggttggagctgcacatggcgtacacaacagtcatttgcattttagagtacaatcactgcaacagtgcaactatgagctaaagaatccagaattaggctctccgtgtatgtgtgtgtctatacataaattctgtaatacgtacgtatttacatggtgttccttagatgtttgccgaagcttcacgtgcttcagcaaaaaaggcctcctctgtacacccccatcaagctctaacaagttgaagctttgcacccatctggctatatcgcgttctttttctttgaccgcaacatggaaagttggtctctgtattgagctggaagaaaacaaacaacaagacgaaaaagatcagtccactcgaaggattagtcaaagtaaaactgagaagaagaaaaatcagtcgttagcattgcagctgtgcgagcccgcaggagctcaccagcatccttgtagcgttcttctacggcagcaatgagcatgttccggaccagatcgaactcttgggcctcgctgcaatgctggtcgtcaggcctgcaaaatggaacggttgcagctgcagagttcaagagagtcacctgtccctagggaaatactacctcgaatctagttcatttttgaactaaagcgtgataaataaaaaagaacggagggaatacttcatagaacaggatttgtatgtctacctgtcaagccttgtgatttgaatgtcgtcggagcctaaataactcccggccgcctttggctgtaggactttcaatccgttgttatacgcgatacgcctgttcacttgtatagggacctatgggtgaacaaacaaattggagtaagtaccatgcccaattatgaacaatagaaaagcttatacaatatgtccacatattatatataatccattgttataagtagcttacaaaaactgctccgtttggatgtcgatattggagatatggaattgaattgggttgaatatcaaatcatgcatggtattatgtttggatgtcactgaattggaatttggaattgtgtggtctaatttcacgtaatactaaagggtgaggctttgtattggaagagggggtttctagttatagtacaattccagggaattgagctctgattctaaatctcaatttcacatgcaaccaaacaacagaatttaggaaagctgattccaattactaattctgtgctacaatatctacgtccaaacggggttatatccgttgctttgattctccaattgaatggtttagtttatagtcatatgatgatatgaaatatatataatttacatggtgactaggccaagaagatacaagttatgccttcagtatcagcaatagaaatagccaataggtgtggtccggtcgacacacaaatattgtcctctgtactggaaaatgcaagaagcaaatgcataccttgcagcggaaagcaatgttgatagcatccgatggcttgaggtcgaaactgatagtgtcttggtcattcccaacctggtgtcatgttgcca

SEQ ID NO: 111412 - DNA, 1063 bp, Zea Mays
aatttgtgcctcccctaccgcgcccttccatccatggcgcgatccccgccaccccatcccccgcctcccttccatcctagcccgccccttccattccccgcatctccatcctcgtccgtcctccaccgatccacatgtgcgccccttccatccttgccgaaccacgcgcaggatgtgcccgctccggtggaggaggaagagacgatcgcgtcggcgcactatgccaggagccggtctgagacggcgcctactgcgcgggagggtgacagaaggccgactccgcccagggtaaagaagtcaacctcggaggtgaggaggtcgcaggtccgagccggcatgggagcagcaggacaagaaggagaagacgcagggggcaactcaacaagggccaagtcaagctcgggggctaggaagacgcctgctctgaggcaggcggaggtcggcgccgagtgcgtggacgcgagggcgaaggcattcattgacagcttcaggcagtagtagcaggtgcaccactaccaggaggaggaatacgtcccgcctccggcgcccgcgccgccgctgtcgcgcacgtcgtccgtcctagaccgcctccgctccttcgacctgtaccgcttccgctctggcgacctcggccccgaccttccctccgccgccgccgccacggagacggacaagaatgagaagcagcagtcggcgcactacgggcggagccagcgcgggagcagggcaagtcgcaggacgcaaggatgagcaagtcgagctcgagcggcgtcgtggcggaggcgcatcagtgcgtgaacgcgcgcgcggatgacttcatcaacaagttcaggcagcagctacagctgcagcactgaactcgctgctcaactacaaggaggtgctcgaccgcggcggtggcaagcagtagccgcagcgtgcaaggcggagggagaaaggtagctagctgtaggatccaatccaaaaccatactgcaaaaaaatcgatctttggtccatcaaccagtagacctcgagtatggattatgcagtgttgttcttattagcacagttatgtaagaatc

SEQ ID NO: 111413 - DNA, 450 bp, Zea Mays
atggcggagcggctggcactcccaacagcttatgaggccataataattgcacatcagaacctgcaaaatcccaagatacaaaaattgatagaaccaatatctcgccgtgcctccagacctgtggttgtcaatggtctcctgcaaagggaggactgggaaacagcaataacagtgccacttgggatcattccagcaggtactggaaatggaatggcacgatctctactgcatgctgctggtgaaccattctctatatctaatgttgtgttcgcaatcatcagaggtcataaacgtgcccttgatgttacttctgttgtgcagggaaaggcgaggttctttagtgtcctgatgcttacatggggtctggtggctgatgttgatattgaatctgagaagtataggtggatgggaagtgctcgccttgatttttatgtatactctctacactaa

SEQ ID NO: 111414 - DNA, 1497 bp, Zea Mays
atacaagaatgatatgccactcatgacctgatcactcgagtcgaccgcagccggccattgctacctctgtggcttactcttctgcaagctttcctcttcctcctcggctttgaacaaccaagaagctcagctctagcacaccgtcgtcgacgttgcaacaaaccccaaccgctaccatgatcacgacgacgaccacgacgatgacagcagctcctgatctctccctccacatcagccctccgtcgccaccggagccgaggctgctgctggggttggaactcgacgacgacacggcggcggaggcggcggccgcgacgaagaaggcggacgacgcggcggcgatgcgggagtacaacaacctccaggtgcagcggcgccagctgcaccagccaagccagacggcgggccacgggttcaagaggggcacgtcgggcagcgccgccgccggcgccggcgggaggagaagttccagggcgccgcggatgcggtggaccaccgcgctgcacgcgcacttcgtgcacgccgtcgagctccttggcggccacgagagagcaacaccaaagtcggtgctggagctgatgaacgtgaaggatcttacactggcacatgtgaagagccacctgcagatgtacagaacagtgaagcagcagggcgcagacagaccatgtgtagcagttgcaggccatgggcatgccagagacatggtcgtccttctcacaaccggtgtcggtgaaggggatgctggctttgttgacgacgtttccaacagcaacagcaacagcaacaactcagtcgtcgtcaacaacaccgtccctgctgccttcaacaacaaccatactgataggttggtctgtctgtgcacgtgcagcaggacgccacagtctccaggcggacgggagcagcagcagcaaccggcgccggcggtggatcgtcgtcgagacgacgccgccgccgccgcagccgcttgtgcttgggtcgtcggacggcaggtccagcatcagcggagctgcagcgaaggagtgaccaagctgcagggactcaaggtaggagatgagcgcgtcgaccgtcatcacggggacgacgccatcgcggcccatcgtctcgtggaggacgaggctcgcgacgaccacgcaggaagcggcggcggcttccaacaacggcggccgtcgccgaacaacacgagcggcacggtctccagctcggagtggctcaatcagcagcactgtagcggcgtgatgagcgtcagggtgcttggactgccgcctgcgacgccaccgagcctggagatgagcctgggccgccagggctggcagatggatcagcagtgcggcggcgagttcgagttcgacttcgagccctccccgccgtcggcggccaaagagctaactctgctcaggtgcttgtgaaacgacagacgatgcagtggtgttgctttaatctgttgcttcttaatcagactctaatcaagacaacagttagccacaaagccccagacaa

SEQ ID NO: 111415 - DNA, 765 bp, Zea Mays
atgatgttctcaccctcatatccagtggggaatagatgctgccagcgccgattggtgatggaggggtcggggttagcccgcgatctatcctcgagtaacagaggtgactgtcttcttcatggagaaggcgaggtccagcggggaggacacacaacacgcggagagaatgagccggctcatgtgaccatcgatgtcggccgtctcccacgagtctggcacgacagatgcggtgtcctcgactgtgggctccatggatttatgtgtgttttctatcttgagctagagggcggagagactggagctagggacgaaggcggccatggagccgaggcatcgggatctacaggaggaagcacaagaagggtttgtttgaatagggtgcggggtacggttaagcgagaggtgggggcagctgggcgatgtggagaagactttgaggaggagagaaataggcgcgtggccgatgcgctcgccgccgacatgccgtcgacaatcgcgtccctggtgcgtgtgctgcagagcgcgacctcgcgggaggcgcgtgtcggcgcgttgatgctggcggagtcgctgctacgcaatgcggtgccgggcgcgtgggcgatggtggaggattctgaggagctggtccccctcaagggccccgtgatgagaagaaaagtcggcctggacaggcttgacgtggcagcgggatgtagtgccttgccgccgtcgcggcgcgcccgcgccgagatggtccagttgggggcgtgggggagaacatag

SEQ ID NO: 111416 - DNA, 804 bp, Zea Mays
ctctctgtccctcatcttcttccccgcacggctcttcctcgcctcctctacaggtctcgcacccagccccagcgccggctccagcttggtccctcccatggcgccctcccctgcaagatccatctcccacgcgcgcccgccgaggtctttcccatggccgccgcgccttgccgagctcctcccccgcggcatctctccctcgcgacgctccctccatctcgctcgtcctccaccttgccgtggtcgcgccctcaccctctcggctccctgctcctctccattttcctcaaccgccgtgcgctcgcccctgcgcaggtgagtcaccccggtccggctaggacaccgaacgtcgtgcgcaagtcgagttcctcctcgagctcggcggcaggtcatggtgacgccctgctcctcccgacctcctcgccgtctcggccctccaccgtgtcataatcccctgtctggcgctggcggacggcgcgctgctcccgtggttccgcgacggccggcgcgggcctggtcgtggtggtcagcacggcagccgtccggccatgtggagacgagcgagggggagcagagcgtccttccctcgatttcctcctagagctcacttcgtcggccgccccgagctcgcccttgtgctcggaccttgcctcgcctctgacctccctcatccgtgcagcgtcgtctctgctcatccatgctgcgcgacccatctgcgtgtgatgctccctactcgcatccgtacagaaccgcgccagctcctgtactgagctctgcagccacgcttcctccaacagcagctgc

SEQ ID NO: 111417 - DNA, 407 bp, Zea Mays
ggtggacttccggatcgtacttagggatttgcccaaacttccggtgaaggcacctgatctttgctttgggaaagaagggatgtagcagcacgaccaccacacctttaaataaaggaaccactgcttaataatgatgttaaacagggagggtcatgtctaggggattattacattctaatctttcatggtagttgaactgtttagtttggtgggctgagttgtctatcttttgtctggtcatgaatgttcatttctaccattgcatttcaattatactatgtcaattatctttcttttatatcctgtatagactctatgtttcccttgttatgcttctttcaagggaggtgctgccggattttgcaatactttctttctctatgtgttgcataagttttgtaggaagg

SEQ ID NO: 111418 - DNA, 2520 bp, Zea Mays
ttgacacatggttcacaagctctgcctctcttgccatttccatctccgcatagcgtctcccctggtcccagacctgtgcccattccatctccgcatcgtctctcccaggtcctaagcctctgccatttacagccaactgcttcccacggtggtttccttcatagatctgaccaggattgtctccgtgaggtggaaggggttgtcaaggaggcaaacggatggcggctcagcgcctgctcttcctgaaatgttgtcgcggctactccacctctgctgaggacatggtcatctcctccctccgcctcatcccctccccttctgttagtgttaccaacccacctccactccctactattcttcattctactgactctcctcctgacccccatccaccgcttaccaccatgctcttatctgccgctgatcgtctccgcggggtcttcctccgcaagccctctggtcgcaacgtgcttcaccaggcgctatcctccacaggcattggcgctaccatggcactgtctccagaggtgcttgcgaatgtcgtcaataccagcaacctgagtggtgccgccactgtgacctactttgattgggcagtcactaactccaagcctcccccatctgtccacacctgcaacattgtcatcagggcattggggaggaagaaattttttgattatcttgatgacgcccttcagatcatgcgcagaaacaacatctttccagacctgaccacattggagatcatcatggatagcctagttgctgccaggcatgtcagtagggctgttgaggtgatcagtaccgatcaatttggatttgggattggaaaaacctgccacagaaaggatgcatttaccatcctcattaggtgtctttgccggaggtcacatgttggccttgctagctcgctcttgcaggctgctcgtaaggagttgtttggtcttgatagcaatgtgtacaatgatgtcatgggtggctgggcgaggtttgggagtgttgataaactgcaggaggtttggacaaagatgcaggaggatgggctggttccaaatgaggtttcacattgccatttaattgagggattgggtagagtcgggcagactgaggacgcactcaaggcgtttgagtatatggtacatgagagatatggtccaactacaatggcctacaatgtacttattttcaattttatccacattggggatttggacagttgcatcaagtattacaaggatatgttggataagaattgctccccaaacatcgaaacgtactccaagatgattaaagcctttttgagaggtcgcagggtagctgatgcgctccaaatgtttgatgacatgttgattcaaggagttctgccaaatactgggatgataacatcatttatcaatccactgtgtacatttggaccgcctcatgctgctttgatgatctacaaaaagagtaggaaggctggttgtgtaatatccttgaaagcttataagcttttgctggaaagactcgctaaatttgggaagagtggaatcgttttggacatttgggaagagatgcaggagtgtggatatcaacctgataaagagatttacgaatttattgtaaatgggctttgcaatgtgggtaaggtcgatgctgctgtgtctgtggtggaggaatcacttcggaatggcttctgtcttgggagagttgtttacagcaaactgaacaacaagctgttggaaatggacaaagttgagaccgcatataatttgttcaagaaagtcaaacatgcacgtgcacttacgaattcacgcaattattgccgtgctaatggttggcatttttgagcataaccagtttgtctgcagaagagccatggagtccattccgcatcggggaacactgtttacgtgcacccaggtcgtcctccaaccaacatctagcaattcaagtgggcagaacggcgatagaggatgtgagctacaacacttgaaggtcaaagtgacatctggtgatgatgctcaatgtaatcttctatatggacactttgtacgcatgaggaaaaattatgctgcactaatattcaagagagaaagctcgtggatgccagtaggtcttttgtacatactgcttgctcaacacatgtcatgtcgaggctgcccttttgtgtattgcttggtaaatgctgcgaaacgttcctgaatatatgggggccatggggtacatttcaccaatcagccattcatcatccacaggccacaggttcagtatacgggccactagctagtcagggggggggggggggggtatccaaaaaatggattgctacataggctagcttatcagatggatagcttctcggatcactaaaagtgcaagtagggtggtgtggtgctgataatgcaagtgctggccggaaaaaaatggcactgtgaagcatctgaaatgttgtttggctcttggttcataggaatggcagcttaggccttaggatagagcaaagcagcacgattacatgttaatatattgttcctgctt

SEQ ID NO: 111419 - DNA, 97 bp, Zea Mays
tatatcttccttgttctgtatgtcgatgacatactcttagctagtagcgataaggatctactagcggaaacaaaagggtttctttcctcgaattttg

SEQ ID NO: 111420 - DNA, 881 bp, Zea Mays
aaaaacaagatgaagtcagtaccatatgcttcagctatcggaagcattatgtatgctcaagtatgtactcgccctgacttagcttttaccaccgggatgcttggacgctatcagaagaatccaggcatagaacactggaaagcagtcaagaaggctctaaggtaccttcaaggtactaaaggtctcatgcttacgtacagaagatctaattccctacaaatagttggctatgcagatgccgactggggagggtgtagagatacactgaagtccacttcagggtatgtctttatgctctctgggggagctatttcttggaagagctgcaaacagacagcgagagcatcgtcgacaatgcacgctgagtttgtagctacgtatgaggcaactggacaggcaatatggataaagaaattcgtacccggattaagagtggttgatagcatagagtgaccactgagaatttactgcgacaatgagccagcggtatttttctcccataacaataagtcaagtggctctgccaagtatattgacattaagtgttatattgttaaggagaagattctggatcacaccattcaagttgagcatgtaagaatccatcagatgcttgtgggtccgctcacaaaaggtcttccacctagcgtgtttagtaagcacgcagccggcatgggattaagggagtacctatgatctagaatcgcaggggctatagattgcaacctagaaaaatctttcgttctaaagcaggggagcatgttgtagtcaatgagtgcgatgatacttaacagatcattgtcacgcattggtctctatgtgtaaacttgtcaaagaatggaattcataaaagtttgagtgtgaggtatgtagagaacaaa

SEQ ID NO: 111421 - DNA, 297 bp, Zea Mays
atgtcgtcctccatggtgtccaagaacgcgccgccgccggccgggtacggcgacggcgaaggcagcgtcgtcgaggccgcgccggtgacgagctgcctgtacctgcgccccggggcgggggcgctggacagggacgccgtgctgcgccgcatccgccaccggaggcgccacgaccgcctccacgacacgctgcgctccatggtgcaggcgccgccgcggtccgctgagccggacggcatggacggcaccgaacggcacctcccgtggccgctcgacgacgccttctcggcgccgtag

SEQ ID NO: 111422 - DNA, 535 bp, Zea Mays
atgaagcctgtgaagagcaagacacccaaggaaaacgcactccacatcactgttcctacatccatccatccatctgcaagaagagaagcagaggaggaggagaagaagatgtgctacaaggtggagtgcagcaagtgcggcaagttcagctggaacggctgcggcaagcacgtcgcgtccgtgtacgaagggatcgagaaggggaagcactgcagctgcaagccgtggccaggcgtcgtcgacgacgccaagccagaggggtccacgtcggctgccaaggaaggtgaagcgaaagcttgagttcgatggagtggaagagatcgctggtcttgccgccgttggattgaaggagctttatttaccctttgagagaataatgttttttcttcttcttcttcttccatatattgatgtgcgtgtgtactggttttctgggtttctacacaagtactgtactacaaataaaacgatgttaagctactccaaatcgatggagtgcagcaaacgcggagacattgagcttgaaaagccgtgt

SEQ ID NO: 111423 - DNA, 597 bp, Zea Mays
taaccctaaccctctctcgctcctgcgtcctctccgtgcggcggctcccggatctagctctcgctctcagtctctctcgctcctgtgtgcggctcctgtgctccggtgctctcggtctgtgcgcgactgcctccggtgctccctgcttcttctccggctcgagagctccggtactctctggtccctcctcccggcgcgagaggattcttcttcgggtaccggcagctggtggcggcggtgataggcacggcgaaggcgtcgggcaaccgggcgctgttcgtgccggcagaggggatggatccgctcgcccaaatgttcctggagccgccatactacccagcctggacaccgccaagacgtttctagcggattactgggtacaacagatagcgtagttttgcaggatttaaaatactatgcatgcatcgtaatttcgttggggccttttgccctttagtgatagagcgattcatttctataagcgatcatgtactggtgttctacgtagatagattgattcagttagataacagtaagatctctttatctctgaggattttttgtgatgtcagttttaggtttttgtgctaaatatga

SEQ ID NO: 111424 - DNA, 113 bp, Zea Mays
tttttgtttgttttttctcttattcgggtgtcgcgctttggggatttagaatttgtggaaaacattcaccagtatagcagtagagtggttggtcgggagctgtcgtgcaagcg

SEQ ID NO: 111425 - DNA, 1395 bp, Zea Mays
gctgcgccgtagcgctagtgccgccgcccgctcaccctcatcccctaggcctccacttctctgattggggcgacttcatggcgagcgggcacaaatccgacatgggcgcctctgctccgacgaccgctctctcctctgcgcctccactgcccctctccctgttaggcggcgacagcaaggaggaggaggaggaagggttggctgggccaccgtcggcaccacgcgaggcacgagcgcaaccgcgcctatgagttccatagctccgagccgtcgacgctaggcggcagtgccctcgtctggacctgcccgcgcccaggcggagccgccgccgacccgagatctgcctaggtcgcccgcctgctctggatgaccaaggtcacctccgcggacgctgagcagctgagctcctcccgcgaaggcgtgaacccgcccccagccgaggcactgagctccgccctgccccgctcgggcgtgcccctgcacaggcccagccgcctcgctcctgtttgccgccacggttccagtaacgacgaggctgagcgacaactccagtgtcccgatgttgaataagtgaagtggatgagtcagatggtggaggagacagtgtgtaggagcagcctgtttatgtggccgtagtggatctcgcatgttccgaagagttcctggaactcatcaagagtgcacttcttacagccctagaagcctgtttgtgagcttggtattcctcctgaaaacatcactgcaaaccaattgttatttggcacattgagggagtacgccggatttgatcccacagagcccacttcacgcagtgggggtaaagcaaaagcagtgcagcaaataaaataggaccatggctacaagacaattgttacaattggtgatggcgcaactgatctggaggctcggcaacctggcggagcagactgtgtgccgccagagctagtggagggaggcgggtcattcgattcgccatgcttaggattggagaatcaatagagtaatagtatatacatggtggggagtgaaaccaacagaggaagaatccgttcttgatcaaaattagtcgactgcttggttcgtcgtctgcgtgttcgatcggaggttggcgacgccttggcgtgggcgctttccgcaagaaagcaaggaaattggtcggcttctacgctaccagtccggtccacttcgttcacctttccctttcggtgccaccaacatctaactgtacatgcatgcttgcttagtgctgaccgccgctaatgcgctggatatttctgggagtggaaacgaaagtgtactctgaatttcaagttcctgtcaaaagtaagatcctctgacgaaggtgtgtactctgaatttcaagtgccaacaatctatgttttccagtcaaaaagt

SEQ ID NO: 111426 - DNA, 810 bp, Zea Mays
cagagctagtggagggaggcgggtcattcgattcgccatgcttaggattggagaatcaatagagtaatagtatatacatggtggggagtgaaaccaacagaggaagaatccgttcttgatcaaaattagtcgactgcttggttcgtcgtctgcgtgttcgatcggaggttggcgacgccttggcgtgggcgctttccgcaagaaagcaaggaaattgtgctgaccgccgctaatgcgctggatatttctgggagtggaaacgaaagtgtactctgaatttcaagttcctgtcaaaagtaagatcctctgacgaagtaggtgtggttgtgatcatgcataaactaactgttgctgccacatggattggagagggagatcgatccacagaaaatggtatcatttgtcaagtgcatgttaggacttgatgctgttgtttgggacattattgggtcgtcattgttggagaaagttgtgtatctacttacagaattggatgttaatataacatgggaagatattcttcaagatgaacacaacaaaggtatatttgacatggagcttgaggatttggctgaggatgaacataaccttggccgcacaagtgtagagacttgaattcatatatacttagttaggctcaatgttagcataaacagttgatgagcaagttttcccattagtattttagtttgaatttagagtacaattatgtatgagttatttgataatgcttatttatgagatattgaatggtgtttatctatattgtattaattatagtgttattaaatatatgtgtttgtatttttc

SEQ ID NO: 111427 - DNA, 807 bp, Zea Mays
cagagctagtggagggaggcgggtcattcgattcgccatgcttaggattggagaatcaatagagtaatagtatatacatggtggggagtgaaaccaacagaggaagaatccgttcttgatcaaaattagtcgactgcttggttcgtcgtctgcgtgttcgatcggaggttggcgacgccttggcgtgggcgctttccgcaagaaagcaaggaaattgtgctgaccgccgctaatgcgctggatatttctgggagtggaaacgaaagtgtactctgaatttcaagttcctgtcaaaagtaagatcctctgacgaaggtgtggttgtgatcatgcataaactaactgttgctgccacatggattggagagggagatcgatccacagaaaatggtatcatttgtcaagtgcatgttaggacttgatgctgttgtttgggacattattgggtcgtcattgttggagaaagttgtgtatctacttacagaattggatgttaatataacatgggaagatattcttcaagatgaacacaacaaaggtatatttgacatggagcttgaggatttggctgaggatgaacataaccttggccgcacaagtgtagagacttgaattcatatatacttagttaggctcaatgttagcataaacagttgatgagcaagttttcccattagtattttagtttgaatttagagtacaattatgtatgagttatttgataatgcttatttatgagatattgaatggtgtttatctatattgtattaattatagtgttattaaatatatgtgtttgtatttttc

SEQ ID NO: 111428 - DNA, 815 bp, Zea Mays
cagagctagtggagggaggcgggtcattcgattcgccatgcttaggattggagaatcaatagagtaatagtatatacatggtggggagtgaaaccaacagaggaagaatccgttcttgatcaaaattagtcgactgcttggttcgtcgtctgcgtgttcgatcggaggttggcgacgccttggcgtgggcgctttccgcaagaaagcaaggaaattgtgctgaccgccgctaatgcgctggatatttctgggagtggaaacgaaagtgtactctgaatttcaagttcctgtcaaaagtaagatcctctgacgaagtagtaggtgtggttgtgatcatgcataaactaactgttgctgccacatggattggagagggagatcgatccacagaaaatggtatcatttgtcaagtgcatgttaggacttgatgctgttgtttgggacattattgggtcgtcattgttggagaaagttgtgtatctacttacagaattggatgttaatataacatgggaagatattcttcaagatgaacacaacaaaggtatatttgacatggagcttgaggatttggctgaggatgaacataaccttggccgcacaagtgtagagacttgaattcatatatacttagttaggctcaatgttagcataaacagttgatgagcaagttttcccattagtattttagtttgaatttagagtacaattatgtatgagttatttgataatgcttatttatgagatattgaatggtgtttatctatattgtattaattatagtgttattaaatatatgtgtttgtatttttctc

SEQ ID NO: 111429 - DNA, 1186 bp, Zea Mays
gttgaacgtgctgggggacattccaatcttacgcagcatggaatttgtgcgctcttatcatcctctgctcggcctccatccatcatgaaggcacgcaagatcacctcaccgaaatccaggaccagatgctcctcaactggctgcctacgtatagaagggaatgtcgtgcgggattaccagctagctggcctccaactccaatacaaacatttgcctctctctctctctcgcccacagccacccccgcagccagaaatgaggtacggcgagctggcgcacctgagccacccgcagcaccgtctccggctggagcacgcggagacgccgttccggtgcgatgggtgcggcgaggtgggcatcggggcgcgtttccgctgcccgcacccgggctgcgaccacgacctgcaccggcagtgcgcgctgccggcgccggcgccgctgcggcacccgttctacccgcgctgcgcgttcgtgttcctggcgcgcgcgccggggggcgcgggggcgcgctactgcaacgcgtgcggccgcgacgtggccggctacgtctaccactgccgcgcctgcggcttcgacctgcacccgtgctgcgccgcgctgccgcacgcgctggacgccggcgccggggtcaggctgcacctgcacccggacaccggctctggcgccgcgtgccaccgctgcgggcaccgcggccgcggctggagctaccggagccagtgcaggtgctacagcctccacgtggcgtgcgtcatggacatgctcgtcgagagctggcactccgtcgggcgccaaaagggcgaccaggggatggcgggccacgtggtggtgcccggcagcggcgggtactgggtgccggcgatgatcaggggcgcggcgaagagcagccacgccagcgggggagggaggtactcgtactggggcaagcacaagggcaaggccaagcgctgctgcgagatcgccgggttcgccgcgcaggtcgtcatctccgcggtgctcggcgatcccaccgcgctcatcgccggcgccataggctcgctcatcgcgcggtgacacgcggacgccggcataatatgtagtccttttttttctctcttttagaccagtggcaaacatgtttgttccttgcatctttcgcgagcgtgaggctcagcgctacccctacccgcttccgtggcgtgctggctgc

SEQ ID NO: 111430 - DNA, 1467 bp, Zea Mays
gagagccccgcccccgggaggccgggagagaagagaacacgcgcgtcaggagcgcacaccgcacggcgcacacacacacgcctcccgcggcaagcagcgcaggacaccgacgacgaagcgaggagaggggaggaggcggagccgagcgcccgagcccaaccccgcaaccacgacccacttccccgtcgcgattcgcattgcccttccctcgggttctacccccagcctcgcgccgccgccgccgccgccgcccttgccagagagatcaccccccattcccacaatcccgtccctccctccgtccctcgaggagccgagccctccgcgcggccgtgggatggggcagtgaccggtgagtggcgtggggagccggtgggcggtggcgagggcatatcatggtgcagtgcctggacggggtgaggcagctgctcgcggtcctgctcaattgctgcgacgtcgagctcaagcagccgcgggggctccaagacccccaggtcctcgcgagggagaccgtcttcagcgtgagtgaggtcgaggcgctgtacgagctgtttaagaggatcagcagcgccgtcattgatgatgggctgattaacaaggaggaatttcagttggcgctatttaagaccaacaagaaggagagcctgttcgcggatcgcgtatttgatttatttgacacaaagcacagtggaattttgggatttgaagaatttgctcgtgctctctcagtatttcatcctaatgctccccttgatgagaaaattgatttttcattccggctgtatgatctcaagcagcaaggctatattgagagacaagaggttaagcagatggttgttgcaacacttgccgagtcaggaatgaatctttcggatgaaattgtagagagtataattgacaagacatttgaggaggcagacacaaagcatgatggaagaattgacaaggaagagtggcgcaatctagtcattcggcatccttctttgctgaagaacatgactcttcagtacctcaaggacatcaccactacatttccaagctttgtctttcactctcaggttgatgataactgaaattgatggggttactttgaaaagaaacattagaagatattctcatgggttctgatatggttttcatttttcaaaattgggttgttggattgaaagattgtagtgttgtgaagtacgtgcatgttggattcgaggactcgattttttttgtcaaccttgtttctttcatttgcatgtctggatgcgcatgaataagatatgaagtttatgtctaaagttttcttttttttccttgttttctttggctggccggcaatcggatccagtttttagaagcttgtctttctgtacaggatagaaacagcgttttaaggatttatattgtccttgtacttttttctgctgtagctagagcagaatattttttggttgaaggtggcgtgcttccattttt

SEQ ID NO: 111431 - DNA, 1528 bp, Zea Mays
gagagccccgcccccgggaggccgggagagaagagaacacgcgcgtcaggagcgcacaccgcacggcgcacacacacacgcctcccgcggcaagcagcgcaggacaccgacgacgaagcgaggagaggggaggaggcggagccgagcgcccgagcccaaccccgcaaccacgacccacttccccgtcgcgattcgcattgcccttccctcgggttctacccccagcctcgcgccgccgccgccgccgccgcccttgccagagagatcaccccccattcccacaatcccgtccctccctccgtccctcgaggagccgagccctccgcgcggccgtgggatggggcagtgaccggtgagtggcgtggggagccggtgggcggtggcgagggcatatcatggtgcagtgcctggacggggtgaggcagctgctcgcggtcctgctcaattgctgcgacgtcgagctcaagcagccgcgggggctccaagacccccaggtcctcgcgagggagaccgtcttcagcgtgagtgaggtcgaggcgctgtacgagctgtttaagaggatcagcagcgccgtcattgatgatgggctgattaacaaggtcggcaatgggtgtctggttcactacttggttcttatgtaatctcttattaatctttgtggaggaatttcagttggcgctatttaagaccaacaagaaggagagcctgttcgcggatcgcgtatttgatttatttgacacaaagcacagtggaattttgggatttgaagaatttgctcgtgctctctcagtatttcatcctaatgctccccttgatgagaaaattgatttttcattccggctgtatgatctcaagcagcaaggctatattgagagacaagaggttaagcagatggttgttgcaacacttgccgagtcaggaatgaatctttcggatgaaattgtagagagtataattgacaagacatttgaggaggcagacacaaagcatgatggaagaattgacaaggaagagtggcgcaatctagtcattcggcatccttctttgctgaagaacatgactcttcagtacctcaaggacatcaccactacatttccaagctttgtctttcactctcaggttgatgataactgaaattgatggggttactttgaaaagaaacattagaagatattctcatgggttctgatatggttttcatttttcaaaattgggttgttggattgaaagattgtagtgttgtgaagtacgtgcatgttggattcgaggactcgattttttttgtcaaccttgtttctttcatttgcatgtctggatgcgcatgaataagatatgaagtttatgtctaaagttttcttttttttccttgttttctttggctggccggcaatcggatccagtttttagaagcttgtctttctgtacaggatagaaacagcgttttaaggatttatattgtccttgtacttttttctgctgtagctagagcagaatattttttggttgaaggtggcgtgcttccattttt

SEQ ID NO: 111432 - DNA, 3926 bp, Zea Mays
cgcagccgacgacgacgagcggaagggaagagggtcaactctcgatctccgcacggtccgtggggacgcacgcacggcgcgcgtggcggtctacccggtcgggggtcggatcctagctgaatcggggagatttgccggccaggtgatcggataatggctagtgatcggataatggttgacactttgaccgaggacaatggtggtgatgctagatcctcatcatctgaagagatgccaagtgaccaacagagtcatcctggggattctttagctgagtggaggtcaagtgagcaagttgagaatggaacaccatccacttcaccagcatactcagacaatgatgatgatgactgtggacctaggccttctgatctttatgggaagtttacatggagaattgataatttctcccaaatcaacaagagagagctaagaagtaattcctttgatgttggtggatttaagtggtatatcttaatttacccacaaggatgtgatgtatgcaatcacctctcactctttctttgtgttgccaaccatgataagctactcccaggatggagtcactttgcgcaatttacaatagctgtaattaatagagaccctaagaaatctaagtattctgatacactgcatcggttttggaagaaagagcatgattgggggtggaaaaagtttatggaactgtcaaaattacatgatggctttattgttgaggatgttcttaccatcaaagcccaagttcaagttatcagggagaagacagaccgtccatttcgttgccttgatggccattaccgaagggaactaattagggtgtatctatcaaatgttgaacaagtttgccggcgctttattgatgaaagaagaagcaagcttagcaggttgattgaggataaactggggtggtccagtttcagtggattctggctagcaatggatccaagtgtgcgtcgacacatgacaagggaaaagactgaaactatattgaaagttatagtgaaacaattctttatagagaaagaagttacatcaaccttggtaattgactctctatatagtggacttaaggcacttgaataccagagcaagaacaaaaaggcgatacctaaactaacagagacagatgctcggagcactccaatggtacttattgatcaggacatgtttgttttggctgatgatgtaatatttctgcttgaaagagctgcattggacacactgccacaccaacatttgcccacaaaagatgataaaagttcgcaaaaccgcacaaaggatggcaactcaggtcaggagttcagcaaagattctattgagcgtgatgatagacgacttatagagctaggctggaagacattggagcttttttccttagctcatatattcagccgaatacaagtggcacatcaagaggctgtggctttgaagcgccaagaggaacttattcgtgaagaagaagaagctgggctagctgaaattgaactcaaggcaaagcgtagtgccgctgaaaaggaaaaacgtgccaagaaaaaacaggcaaaacagaagaaaaatagtcgaaaaggtaataaggggaaaagtggcaagtccaacatcaataaggaaataattatggaccacagtcattcagatgatagaatattggatgatttttgtggacaaattgaagagatgcccttaaatgctgacaaccctgaagaagtttctgatatatctgacagtagagacgataattcagacatgcttcatgttgatattgaagaccgtgaatctagccctgttaattgggagatagatgcttcagaaactcaaactactattcctggaagtagtgaggtgcaaaatgaccatgcaggaaagaggacctctactgtggatgatagctcatcgtcttgttcatctgactcagtgccttcagttactgtgaatggatcatataaaggaggtgcctggacaagcgtcagatcctcatccaataggggaaacaacaggaggaataaggatactgaagcacgggcaggatttgcacaaggtggatcatgttcatcgcataatggttttataggctctggcagcaatgcctctggccactcaaaggaaagacacgaacctgaggatgataaagttgtcttgcagaggaagcaacatgcacaatggaacattgatatcattagctcctccaagtcaagaatggcagagtcttcattttcttctgtgagctctattaagaagcaacctcaaccaaattttttgctagaaagcaccaatagtttgaatcaccgtggaagcgaagcttctggcactgtgacttccactacaacagcgggtgcctcttcaaccccggccactcagttagttttgaataaaggacctgtatccagtgctgcaacccagaatgagaagccactacctctgcaggtgcttgtaccatccaaatctgaagtgcagaagcaggcttccctaactggcagtgcaactaccgaggccgtttcagtatcaaggcccttgactgccccacaagtccctgcagcaaaacaaagtgcaccagtcacttcaacagctcagaatgcaccttttctttctcgttcaatgagtgctgttgggcggttggggaatgaaccatctgccaatgctcctagtttcgttccccgttcacgaacatatcgcaatgccatgatggagaaaagttctggtggtggaagctgtttcacacatcagcaaggttcatcggagcaagcagttgcaccatggcaatcgatgtttacatcgcaacctttcattcggccatcagagaccttgtcttggaaagaggaaacattattgagatctgggtttacatttggaactgtgaagcccgagtcactgaacccatatcagggcagagaagagaactcacagcaagcgagcagcaacagcagtgattgtgcgccatcgagttcaaacatcagaagcgagatcgagaagctgaatttgagcggaagaccacgaagcaagcaactgttgtcagaaatttcgaccagatttactccctatcagccacaaggcttggtcgctgatgagttcccacacctagacatcatcaacgacttgctggatgaggagcagagtgacagaagaagggttcttcaacctgattttgttcaacagtcctatatgcctcatggtgccagcacacctgattatggtgagccatacttgtttgaccagtccgagcaatacttcgatgaggagcctccaaggttttatagtccattgagcagtgctcctcggaggttgagggacctgagctattcgcactttgatctcccatcacactccagcagcagccagtttgatgatctgatgatgagtcagtggccatacagccgcactgacatctccatgcctagttttgggtcagacacaagtggctacccctatcaggtgtgggatctcgcgaatggatcaagcaggtacccatcgtatcgccctgccaatgggcattgagagttttaatgattgcattgacaataatgtgtggttaagtccatgatgttcgcttctgagctgagtgtaattgtaatagttccccatagcagtgatataaagaattgttcctcagtttccttgttcaatcaatagttatatgacccccctcctccctcttttctctagttcagttttgcccagtggtaataaatctaagtcggctaaaatgatctggctaatcgtgttgtgaaatgtgtatgatgcaagcaaatggtagggtgtttttaagccatgccagtgcttcagctgatactacattaaactgggagtattctttgtttctccctctgacgagtgacgacgtgttattgatcgtctcatgttctctttgtatatttcagagtaaattctggatatagcccatggacataaactaattatttgatgcacactct

SEQ ID NO: 111433 - DNA, 2835 bp, Zea Mays
ccgcccccgtcttccaccattgcccctcgcctcgacttcccccaatttctttccacgcctcttcctctctttgccctcgagccccctgcccctgcgcggccttcaaatcatcccgctgtttccccgccctctccttggcgcgcagctccggagcgccgggcgccgggtgggtccagcttcttggatctcgtgcgggactgattggcccgtcagtcccggcaggtggtgctctcgtgccgattccgagtttccaattgcttgcttggtgatggctgtagcttgtcccggtgcgccggctgcgtgaaggttggattgggtctgtcggcgacagaattggatctggcgagcttcccgaagcccggagcggcgtgtctgtcgggactgatagccgccggcgccgcggcgatttcctatccggcactctgtttcttgtgatagggcggcgatggcgaaccacgagctagtccttggacacgggcaggatgcggagctggcgctggggccgaaccaccacgacttcggccaagaccacgggctgggtctcggacacagccacgacctcggcctcggcggccacgcacacgaccacgagctcgtgctgggccagtcgcacgagcacgaccaccagctcgtcctcgggcaccaccacgatgacgatcaccagctggttctcgggcacgacgaccaccaccaccaccatgttcaccacgccggtgagctagttctgaggcagggccacgatggggactctgagactctggaagtgcagggccaccaccatgacgagcttgacttgtcggagagccacgagctgacgcttgccgagacacaccacctgggcgttgatcagaatttcgatcagctctcgctggagcaggctcatgagctcgcgctgcagccgcatgatctctcccaggctcctcttgcagtcgctcctgttgtccagtcacggaccatggttgtgagccctgagtttcagctcgcagtgggacagcagtttcccgatgttgtcagctgccgcagggccatccgcaacactgccatcgcctgccactttgagatacagacggtgaagtctgacaagtcccgcttcaccgctaagtgtgctgccgagagctgcccgtggcgcatacatgcagcaaagctccccggtgtgcccaccttctccattagaaccatacatgacaaccacagctgtgtcgggatcaaccatcttggccatcagcaggcatctgttcagtgggttgcgaacactgtcgaagagaggctacgtgagaacccagaatacaagcctaaggaaattttggaagaaatccacaaggcccatggcatcaccctatcctacaagcaagcttggagaggtaaggagcggatcatggctgcggttcgagggtcttttgaggaaggataccgtctcctgcctgagtactgtaggcaggtggaaagaacaaatccaggaagtatagctcgagtgtatggaaacccagatgacaattgctttcggcgactcttcatatcattcagtgcatcaatatttggctttgtcaatgcatgccgtccacttattgggcttgataggacccttctgaaaaacaagtatcttggcaccttgtttcttgccactggttttgatggggatggtgctctctttcctctggcatttggcgtggttgatgaggaaactgacgagaactgggtatggttcttgtctgagctgcatgagttgctggagaagaacacagagaacatgccaaggctgaccatcttgtccgatagacggaagggcattactgatggagttgaattcaacttcccaactgcattccacgggtactgcatgcgccatgttagtgaagccttcaaaaaggagttcaacaatcctgtgcttgccaaccttctctgggaagctgctcatgcgctgactgtgattgagtttgaaactaagctgctagagatagaggacgcttcaccagaagctgttgtttggataaggcacctaccttcacgtctttgggccacggcttactttgaggggacaaggtacggtcatctaacagcaaacatcgcggagtcgctgaattcctggatactggatgcctctggccttcctatagttcagatgatggaatgcatccgtcgccagctgatgacttggttcaacgagcgacgcgaagcaagcatgcagtggaacacaatcctcgtgcctgcagccgagcgtcgtgttcaggaggccattgagcgtgcacggggttaccaggtggcccgggccaacgaggcggaattcgaggtcatctcagctcacgagggaacaaacgttgtggacatccgcaacaggtgctgtctgtgccgggggtggcagctctatggcgtgccgtgtgctcatggtgtggcagctctcctctcctgcaggcagaacgtccaccgctacactgagagctgcttcaccgtggcaacataccgcaagacttattcgcagaccatacacccaatccctgacaggaccctctgggatgaaacagcagatcaaggccaggtcaaggtggagatgatcatcaatccaccgaagtcactgaggcccgcagcacagccaaggaagaagagggttagagcggaggaccgtgggcgagtcaagcgggttgttcattgcagccgctgcaaccagactggacacttcagaaccacatgtgctgctccaatatgaacaacggccaaccgaactgggcacttcagtccagaacttgttggttattaattagagctgcagcattcctgtgacaagttagcgtctacttgtgcaagcttcttgcttgcagatgggtcttttccttccgtttt

SEQ ID NO: 111434 - DNA, 2869 bp, Zea Mays
ccgcccccgtcttccaccattgcccctcgcctcgacttcccccaatttctttccacgcctcttcctctctttgccctcgagccccctgcccctgcgcggccttcaaatcatcccgctgtttccccgccctctccttggcgcgcagctccggagcgccgggcgccgggtgggtccagcttcttggatctcgtgcgggactgattggcccgtcagtcccggcaggtggtgctctcgtgccgattccgagtttccaattgcttgcttggtgatggctgtagcttgtcccggtgcgccggctgcgtgaaggttggattgggtctgtcggcgacagaattggatctggcgagcttcccgaagcccggagcggcgtgtctgtcgggactgatagccgccggcgccgcggcgatttcctatccgggcggcgatggcgaaccacgagctagtccttggacacgggcaggatgcggagctggcgctggggccgaaccaccacgacttcggccaagaccacgggctgggtctcggacacagccacgacctcggcctcggcggccacgcacacgaccacgagctcgtgctgggccagtcgcacgagcacgaccaccagctcgtcctcgggcaccaccacgatgacgatcaccagctggttctcgggcacgacgaccaccaccaccaccatgttcaccacgccggtgagctagttctgaggcagggccacgatggggactctgagactctggaagtgcagggccaccaccatgacgagcttgacttgtcggagagccacgagctgacgcttgccgagacacaccacctgggcgttgatcagaatttcgatcagctctcgctggagcaggctcatgagctcgcgctgcagccgcatgatctctcccaggctcctcttgcagtcgctcctgttgtccagtcacggaccatggttgtgagccctgagtttcagctcgcagtgggacagcagtttcccgatgttgtcagctgccgcagggccatccgcaacactgccatcgcctgccactttgagatacagacggtgaagtctgacaagtcccgcttcaccgctaagtgtgctgccgagagctgcccgtggcgcatacatgcagcaaagctccccggtgtgcccaccttctccattagaaccatacatgacaaccacagctgtgtcgggatcaaccatcttggccatcagcaggcatctgttcagtgggttgcgaacactgtcgaagagaggctacgtgagaacccagaatacaagcctaaggaaattttggaagaaatccacaaggcccatggcatcaccctatcctacaagcaagcttggagaggtaaggagcggatcatggctgcggttcgagggtcttttgaggaaggataccgtctcctgcctgagtactgtaggcaggtggaaagaacaaatccaggaagtatagctcgagtgtatggaaacccagatgacaattgctttcggcgactcttcatatcattcagtgcatcaatatttggctttgtcaatgcatgccgtccacttattgggcttgataggacccttctgaaaaacaagtatcttggcaccttgtttcttgccactggttttgatggggatggtgctctctttcctctggcatttggcgtggttgatgaggaaactgacgagaactgggtatggttcttgtctgagctgcatgagttgctggagaagaacacagagaacatgccaaggctgaccatcttgtccgatagacggaagggcattactgatggagttgaattcaacttcccaactgcattccacgggtactgcatgcgccatgttagtgaagccttcaaaaaggagttcaacaatcctgtgcttgccaaccttctctgggaagctgctcatgcgctgactgtgattgagtttgaaactaagctgctagagatagaggacgcttcaccagaagctgttgtttggataaggcacctaccttcacgtctttgggccacggcttactttgaggggacaaggtacggtcatctaacagcaaacatcgcggagtcgctgaattcctggatactggatgcctctggccttcctatagttcagatgatggaatgcatccgtcgccagctgatgacttggttcaacgagcgacgcgaagcaagcatgcagtggaacacaatcctcgtgcctgcagccgagcgtcgtgttcaggaggccattgagcgtgcacggggttaccaggtggcccgggccaacgaggcggaattcgaggtcatctcagctcacgagggaacaaacgttgtggacatccgcaacaggtgctgtctgtgccgggggtggcagctctatggcgtgccgtgtgctcatggtgtggcagctctcctctcctgcaggcagaacgtccaccgctacactgagagctgcttcaccgtggcaacataccgcaagacttattcgcagaccatacacccaatccctgacaggaccctctgggatgaaacagcagatcaaggccaggtcaaggtggagatgatcatcaatccaccgaagtcactgaggcccgcagcacagccaaggaagaagagggttagagcggaggaccgtgggcgagtcaagcgggttgttcattgcagccgctgcaaccagactggacacttcagaaccacatgtgctgctccaatatgaacaacggccaaccgaactgggcacttcagtccagaacttgttggttattaattagagctgcagcattcctgtgacaagttagcgtctacttgtgcaagcttcttgcttgcagatgggtcttttccttccgttttcggaaattcagtgttaaatggaaatggttaccggaaatacggaaacgaaatcagt

SEQ ID NO: 111435 - DNA, 381 bp, Zea Mays
atggagctcggcgagctcacccaccaggggcgcgacggccaagaagacgagcaacggcggtcagctatggccggacccggagaagatgagggaggccgtggtgagcgaacaccagaggaggacgacggcggccagcgctatggcgagcaggagcgcggcgctgggtgcgcaaggaggagctcacggagaagagaaaccgtgagggagagagaaaggcagggcgcaactggaggagcagataagaagcagcgcgcgcagggagcttcgaaggcggtgacttgggcgagcttgcaggggatctggcgccatggaggggcaagcttcggggaggagcaggggctagggcgcggcatggggaagccgccatggggagctcggtag

SEQ ID NO: 111436 - DNA, 1392 bp, Zea Mays
ggtggagcagcggataacgaggccccgaccatgtacatcatatataggtgctacagctgggtagtagaacgatccatatatcccttcctcgtatatcctttcctgagtaggagagagagttgagttaggagttgttgtgctgatcatctcggtcgaccgagagatggaccaccacttcactgagatagaggggaagatggcgcacgagccactggcacacagctccaccttctccgatgagacgaaagacaaaatggagcacgattcactggtgtacagtccacgcagcatcgcgagggccacaaccaccggcatccctgtcggcgatcaaggcgtggccgtgctacgtgggccgcttatcgtgggtgcagggccggcgggtctggcatgcgcggcgttgctcaccatgttatacattccctacgtgctcctagagcgcgacgtgtgcgtagcctcaatgtggcaccgccgcacgtaccgcaggttgtgtctgcacctacccaagcgctactgtgagctcccgctcatgcacttcccacgcacctaccccacatatccaacccggcagcagttccttgtctacctcaatgagtacatgcgcgcatttggcatccgcccatttttcagcctcgaggttgtcgctgccgagtacaacggtgaatactggtgtgtccgcaccaaagatgtcatccccactggcactctcaacggccaaagcggcgaggagtctatccgagagtaccgctccaaatggctgatcgttgccacaggagagaacgccgagcctgttgtgcctgacatgccgggaatccataacttcaagggtcaagtaatgcactcatgtgactaccgtagcggcgagtccttccaaggcaagaaggtgctagtcgttggctgcggtaactctggcatggaggtgtctctcgacctcgctaaccacaacgtgcacacctcgatggctgttcgtcgttcggggcacgtacttccaagagaggtcatggggatctcaacttttagtttgtctgtgtggctcctcaagtttctacgtgtccaaatagtggaccggattcttcttctactcgcttggttcattttaggagacactgcacaaattggtattcctcggcctagcatgggtccaatggagctcaaacaagtgtctggtaagacaccggtgcttgacgtggggacgatagcacagattaagtccggcaacattaaagtatttcctgcaattcgaagtttccaagaatatggtgtagagtttacaaatggtaggattgaatcatttgatgttgtgattcttgccacaggttataagagtaatgttccttattggttgaaggtgataatataattcttttgctatcttatacttgtttttattattat

SEQ ID NO: 111437 - DNA, 1882 bp, Zea Mays
ggtggagcagcggataacgaggccccgaccatgtacatcatatataggtgctacagctgggtagtagaacgatccatatatcccttcctcgtatatcctttcctgagtaggagagagagttgagttaggagttgttgtgctgatcatctcggtcgaccgagagatggaccaccacttcactgagatagaggggaagatggcgcacgagccactggcacacagctccaccttctccgatgagacgaaagacaaaatggagcacgattcactggtgtacagtccacgcagcatcgcgagggccacaaccaccggcatccctgtcggcgatcaaggcgtggccgtgctacgtgggccgcttatcgtgggtgcagggccggcgggtctggcatgcgcggcgttgctcaccatgttatacattccctacgtgctcctagagcgcgacgtgtgcgtagcctcaatgtggcaccgccgcacgtaccgcaggttgtgtctgcacctacccaagcgctactgtgagctcccgctcatgcacttcccacgcacctaccccacatatccaacccggcagcagttccttgtctacctcaatgagtacatgcgcgcatttggcatccgcccatttttcagcctcgaggttgtcgctgccgagtacaacggtgaatactggtgtgtccgcaccaaagatgtcatccccactggcactctcaacggccaaagcggcgaggagtctatccgagagtaccgctccaaatggctgatcgttgccacaggagagaacgccgagcctgttgtgcctgacatgccgggaatccataacttcaagggtcaagtaatgcactcatgtgactaccgtagcggcgagtccttccaaggcaagaaggtgctagtcgttggctgcggtaactctggcatggaggtgtctctcgacctcgctaaccacaacgtgcacacctcgatggctgttcgtcgttcggggcacgtacttccaagagaggtcatggggatctcaacttttagtttgtctgtgtggctcctcaagtttctacgtgtccaaatagtggaccggattcttcttctactcgcttggttcattttaggagacactgcacaaattggtattcctcggcctagcatgggtccaatggagctcaaacaagtgtctggtaagacaccggtgcttgacgtggggacgatagcacagattaagtccggcaacattaaagtatttcctgcaattcgaagtttccaagaatatggtgtagagtttacaaatggtaggattgaatcatttgatgttgtgattcttgccacaggttataagagtaatgttccttattggttgaaggagaatgaatttttttcacagcaaagtggatttccaaacaaaccaaatgaatggaaaggaaaggatggactctatgctgctgggttctcaaggcgtggtctacttggtgtgtctatggatgccaccaaaattgcagaggatattgcgcagtcttataataatatatataagctacaaagatcataagaacaaatgatatttaactatttatcaataatttagctatcatcatttgagagttttgtaaatatatgtactagtctatttgcataaattataagagatggatatgctagataacaaatactaggctagcttatctatcaacgcactcattatataattgacataggctagtacatgtcacattttagaggtccaacaaaatagttgataggattgatttattgcatgcttttatttctttttaatttggcaaatattgtaagtcatttttgttattatcaatcaattgtaatgggtaatgtatggacgttttcattcttatggctatattatttgtttattgcaaaataa

SEQ ID NO: 111438 - DNA, 699 bp, Zea Mays
aaaaaattctagtatgggatcaaccaacaatagcatgcataaaaacaaaggattggaggaggtcgtcgctggaggacgccaccaaggccaccagatcggaggagttggtcaccgaaggatgtctgaacagccatgcggaccgctgtccctcgtagcccgcgcctcgtgcaaccgccgacgctgctggagccatccgcgcctcatgtggccaccgccgctggagacgatcatgcctcgcgcgatcgccggatggggccgtcgctgccgtgcgcgctcggggaacctccgccatcgcgcacgcctttggtcgtcgccgccacacgagcctatggccccttgcggctccctaggccatggacggtgctcgcgccttcggggtcaccgtcgccgctcgctcctcggggaaccgccactaccgagcgaattgggcgtcgtcgctcgctcgcgccttccagaccaccatcgccgctcgtgcctcgggtaaccaccgctaccgcgcggacgggggtgtcgtcactcatgaggttggatagggagcatcaaaaaataaaccctagcggcatgtggttccttttatagacgcccggacgtggggcggctaaaccggatggcaccattggaccaaggcttcctctagttattggaaacccatgtctcataatatatatatatatatatattctttgaacgggcacaaca

SEQ ID NO: 111439 - DNA, 1144 bp, Zea Mays
ctccaagaacatccggaccctgtgactgtgactgtgcgtctgtgcctgcgctagctagccgttagtacaacagcaccaaaccggagacgagcagcggtaatggcggccgggtcgtcatcgtgctctccggtcctcctcctcctactactcttcctcgcctcgtccggcgccggcgcaggcgcaggagaggcttcaacgacgtcgacgtcggccccggtgccagcccctgcctcggcactggaccaggtgtgcggaaggctgggcagctactacgtgacgccgtccctctgcgagtccgcgctctgcgccgacccgtccgcgccgtgccgcgcggcgcgggacgcgcccaccgtggcggcgctcgcggccaggctggcggccgacaacgccacggcggccagggacagtatcgaggccgttttcttcccatcttcgtcctcgtcctccgccgccgcggccgcgcaatcgtgcctgcagctgtacgcgggcgcggtgccggcgctgcggtgggcggctcgggccgtggccgcggggcggtaccgcggcgcgcgggaggtgctgcaggcggcgcagtacgtcgccgcgggatgcgagggcatcgcgggcgacgcggccgccccgctgccccgcgagaacggcggattcgccgacatggccttcgtcgcgcacgccgtcgtcgcctccatgtccgccgactgatccaatccaacccgccaccgctcggcttaatgcgagaatggcgaagctcgttgtactgcagtgataatcattgcgctgccgctaccatcctgccatgtcctgtccatcggttaataacctctgaatgcgtggtgtttgtgtttcccctgtgtaaaattcagttttccgcttcatcgatctgatctcctgcacctaaaccaagcaagtggatggattggattctcttcgagacaaaatcgatcatcgatctttgtttcgaaatttggatgtactgtgaaaattactgacgcacttgcagtgcaataatggactgctaacataatacgtaagcatgcttcagtcagtcaatcctattctcctgaatcctcaatgtgatttttagtttttaccaccagtagatctcacgacgaaggtaattctaaaataccagagaaggaaaaaaaaa

SEQ ID NO: 111440 - DNA, 913 bp, Zea Mays
caccgttcgtgcattgataaaaccacgcttgcggatcgctcagacgcacagcaaatgcccaccagaaagcaagccatgggcaggaggatcaccaccaccacgctcctcgccgtggccgcttccgcgctctgcttctcatcctgctgcggcgtcgacgtcaacggcgcggcggacaccgtggccggctcgtgcgacgcgatccgcgacttcgtcgacgtggccttctgcgcgtcgcggctggggtccgtgccgggcgccgcctccgcggacctgcacggccacctcctgatggcggcggacctggcggccgcgagcggggtctcggcgcgtgacgccgcggcggggatggcgcggcgcgagggcgacggcgggcacccggccgcgcgggacgcgctggaggcgtgcggcatcctgtacggcgcggcgtccgtgcccgcgctgcgcctcatgcgcggctacgcggcggcgcgcgcctggggcgccgcgcgcgcgctgctgccgctcacgggccaggccgggatcgggtgcgacgccgcgctcacgggctccgcgccggccaaggcccggatggccgccgccaaccgcgagttcgaccagctctccaccatggccacggcgctcctcaataagctcgcctagatccggcgccgcgctatggcactcctgcgcccctccgtggcatactggcatgcgtactgcggtgacgatcatgtggaaactgatgtttcttgtgtcgggtcaatagtgcaatcaaccactgatttcttgtttgtgtgtgtttggttgcgtcgtaagtagcctgtacaatgtacaatgccgttggttgggctctccggctcacaatggcatggtgttgggttctgtgtaaagccacgtttggttcctctaagtcaccttcaaaactttagagact

SEQ ID NO: 111441 - DNA, 1655 bp, Zea Mays
atcgccatccaccactggtcggtccactccaccgcccgtcccccgtgccgttccgtgcgtcgcatgactgtcgccgcactccgcttgccgccgcccgccgcagctccctccggccgcgcgcgcctcgtgggggccgccgcgcaccgctgctcccccagggaggcgtttgggtggtggtgctcccagctgctgctgacgcggagcggccggacgaggacgacggcggcggcggcgtacccgaagatggcgcggccgccgatcctatccgtcgcgctgccgtctgacaccggccgtgtgctcagcatccagtcccacaccgtccaggggtatgttggcaacaaatcggccgtctttcccctgcagctccttggctttgatgtggatccaataaactctgtacagttttctaatcatacaggatacccaacatttagaggtcaggttcttaatggcaaacagctctgggaccttattgaaggactggaggaaaatcagttgcttcattatacccatttattaacaggttatataggctcagtttcctttttagatactgtgctacaagttgttgagaaattgcgatcagttaatcctgatcttgtatatgtttgtgacccagttctaggtgatgaaggaaaactatatgttcctcaggagctaatatctgtttatcaacagaaggttgttccagttgcttcaatgcttacacctaaccaatttgaagttgaactacttactggattgaggatcacctccgaagaagatggtttgacagcttgtaataccctccacagtgccggaccacagaaggtggttataactagtgctcttattgaaggtaagctgctccttatcggaagtcacaaaaaaacagaggaacaacagccagaacaatttaagattgagataccaaagatacctgcatatttcacgggaactggagatttgacaactgctctcctactaggatggagtaataaatatcctgatagcctcgagaaagcagcagaactggcagtttccagtttgcaggcacttctgaaaagaactgtggaagactataaaatggccggcttcgacccatcgaccagcagcttagagatccggttgatccaaagccaggacgagatccgaaacccaactgttacatgcaaggctgtgaagtatggaagctgaatccatagtacccccactgacaaaggtgccaacaataatgagcagtgcctgcaccgccgataagcgggtgcacctacttccatgactcttggtcctcagttttgggatgctgattctgttacaccttagctccaaaatgagaaacaatcatatttctgaaaaaagggttatagacttatagggttatattcaggctgtgcgattgctgcagtctttgggaatgcgtggtggcctgagtgagattgtaaatggtccttatcattgttgtcttcctcgttgtgttgttgttgttgctgctcccgctgagttgtggtggttggttggaaactctaggtatgctttgtttgaggcacattacgaacatatggtgttgagatgtgctcataatgcttattatgataagtgattattgaaaagatagttataatttaatattgaccttagtgtgagtgtagtgttgtgcaacatgtcttttgagt

SEQ ID NO: 111442 - DNA, 1700 bp, Zea Mays
actccaccgcccgtcccccgtgccgttccgtgcgtcgcatgactgtcgccgcactccgcttgccgccgcccgccgcagctccctccggccgcgcgcgcctcgtgggggccgccgcgcaccgctgctcccccaggtgaggtgaggtcagtggtggattgagaagggaggctatcggattcggttgcttctcttctcctcttcctggaggcgtttgggtggtggtgctcccagctgctgctgacgcggagcggccggacgaggacgacggcggcggcggcgtacccgaagatggcgcggccgccgatcctatccgtcgcgctgccgtctgacaccggccgtgtgctcagcatccagtcccacaccgtccaggggtatgttggcaacaaatcggccgtctttcccctgcagctccttggctttgatgtggatccaataaactctgtacagttttctaatcatacaggatacccaacatttagaggtcaggttcttaatggcaaacagctctgggaccttattgaaggactggaggaaaatcagttgcttcattatacccatttattaacaggttatataggctcagtttcctttttagatactgtgctacaagttgttgagaaattgcgatcagttaatcctgatcttgtatatgtttgtgacccagttctaggtgatgaaggaaaactatatgttcctcaggagctaatatctgtttatcaacagaaggttgttccagttgcttcaatgcttacacctaaccaatttgaagttgaactacttactggattgaggatcacctccgaagaagatggtttgacagcttgtaataccctccacagtgccggaccacagaaggtggttataactagtgctcttattgaaggtaagctgctccttatcggaagtcacaaaaaaacagaggaacaacagccagaacaatttaagattgagataccaaagatacctgcatatttcacgggaactggagatttgacaactgctctcctactaggatggagtaataaatatcctgatagcctcgagaaagcagcagaactggcagtttccagtttgcaggcacttctgaaaagaactgtggaagactataaaatggccggcttcgacccatcgaccagcagcttagagatccggttgatccaaagccaggacgagatccgaaacccaactgttacatgcaaggctgtgaagtatggaagctgaatccatagtacccccactgacaaaggtgccaacaataatgagcagtgcctgcaccgccgataagcgggtgcacctacttccatgactcttggtcctcagttttgggatgctgattctgttacaccttagctccaaaatgagaaacaatcatatttctgaaaaaagggttatagacttatagggttatattcaggctgtgcgattgctgcagtctttgggaatgcgtggtggcctgagtgagattgtaaatggtccttatcattgttgtcttcctcgttgtgttgttgttgttgctgctcccgctgagttgtggtggttggttggaaactctaggtatgctttgtttgaggcacattacgaacatatggtgttgagatgtgctcataatgcttattatgataagtgattattgaaaagatagttataatttaatattgaccttagtgtgagtgtagtgttgtgcaacatgtcttttgagt

SEQ ID NO: 111443 - DNA, 1605 bp, Zea Mays
aagatcattatcgaacaagcaatcgcctcactggtcaacctgactgaataggtgaggtgaggtgaggtgaggtcagtggtggattgagaagggaggctatcggattcgggaggcgtttgggtggtggtgctcccagctgctgctgacgcggagcggccggacgaggacgacggcggcggcggcgtacccgaagatggcgcggccgccgatcctatccgtcgcgctgccgtctgacaccggccgtgtgctcagcatccagtcccacaccgtccaggggtatgttggcaacaaatcggccgtctttcccctgcagctccttggctttgatgtggatccaataaactctgtacagttttctaatcatacaggatacccaacatttagaggtcaggttcttaatggcaaacagctctgggaccttattgaaggactggaggaaaatcagttgcttcattatacccatttattaacaggttatataggctcagtttcctttttagatactgtgctacaagttgttgagaaattgcgatcagttaatcctgatcttgtatatgtttgtgacccagttctaggtgatgaaggaaaactatatgttcctcaggagctaatatctgtttatcaacagaaggttgttccagttgcttcaatgcttacacctaaccaatttgaagttgaactacttactggattgaggatcacctccgaagaagatggtttgacagcttgtaataccctccacagtgccggaccacagaaggtggttataactagtgctcttattgaaggtaagctgctccttatcggaagtcacaaaaaaacagaggaacaacagccagaacaatttaagattgagataccaaagatacctgcatatttcacgggaactggagatttgacaactgctctcctactaggatggagtaataaatatcctgatagcctcgagaaagcagcagaactggcagtttccagtttgcaggcacttctgaaaagaactgtggaagactataaaatggccggcttcgacccatcgaccagcagcttagagatccggttgatccaaagccaggacgagatccgaaacccaactgttacatgcaaggctgtgaagtatggaagctgaatccatagtacccccactgacaaaggtgccaacaataatgagcagtgcctgcaccgccgataagcgggtgcacctacttccatgactcttggtcctcagttttgggatgctgattctgttacaccttagctccaaaatgagaaacaatcatatttctgaaaaaagggttatagacttatagggttatattcaggctgtgcgattgctgcagtctttgggaatgcgtggtggcctgagtgagattgtaaatggtccttatcattgttgtcttcctcgttgtgttgttgttgttgctgctcccgctgagttgtggtggttggttggaaactctaggtatgctttgtttgaggcacattacgaacatatggtgttgagatgtgctcataatgcttattatgataagtgattattgaaaagatagttataatttaatattgaccttagtgtgagtgtagtgttgtgcaacatgtcttttgagt

SEQ ID NO: 111444 - DNA, 1530 bp, Zea Mays
aagatcattatcgaacaagcaatcgcctcactggtcaacctgactgaataggtgaggtgaggtgaggtgagggaggcgtttgggtggtggtgctcccagctgctgctgacgcggagcggccggacgaggacgacggcggcggcggcgtacccgaagatggcgcggccgccgatcctatccgtcgcgctgccgtctgacaccggccgtgtgctcagcatccagtcccacaccgtccaggggtatgttggcaacaaatcggccgtctttcccctgcagctccttggctttgatgtggatccaataaactctgtacagttttctaatcatacaggatacccaacatttagaggtcaggttcttaatggcaaacagctctgggaccttattgaaggactggaggaaaatcagttgcttcattatacccatttattaacaggttatataggctcagtttcctttttagatactgtgctacaagttgttgagaaattgcgatcagttaatcctgatcttgtatatgtttgtgacccagttctaggtgatgaaggaaaactatatgttcctcaggagctaatatctgtttatcaacagaaggttgttccagttgcttcaatgcttacacctaaccaatttgaagttgaactacttactggattgaggatcacctccgaagaagatggtttgacagcttgtaataccctccacagtgccggaccacagaaggtggttataactagtgctcttattgaaggaacaacagccagaacaatttaagattgagataccaaagatacctgcatatttcacgggaactggagatttgacaactgctctcctactaggatggagtaataaatatcctgatagcctcgagaaagcagcagaactggcagtttccagtttgcaggcacttctgaaaagaactgtggaagactataaaatggccggcttcgacccatcgaccagcagcttagagatccggttgatccaaagccaggacgagatccgaaacccaactgttacatgcaaggctgtgaagtatggaagctgaatccatagtacccccactgacaaaggtgccaacaataatgagcagtgcctgcaccgccgataagcgggtgcacctacttccatgactcttggtcctcagttttgggatgctgattctgttacaccttagctccaaaatgagaaacaatcatatttctgaaaaaagggttatagacttatagggttatattcaggctgtgcgattgctgcagtctttgggaatgcgtggtggcctgagtgagattgtaaatggtccttatcattgttgtcttcctcgttgtgttgttgttgttgctgctcccgctgagttgtggtggttggttggaaactctaggtatgctttgtttgaggcacattacgaacatatggtgttgagatgtgctcataatgcttattatgataagtgattattgaaaagatagttataatttaatattgaccttagtgtgagtgtagtgttgtgcaacatgtcttttgagt

SEQ ID NO: 111445 - DNA, 1427 bp, Zea Mays
agcaatcgcctcactggtcaacctgactgaataggtgaggtgaggtgaggtgaggtcagtggtggattgagaagggaggctatcggattcggttgcttctcttctcctcttcctggaggcgtttgggtggtggtgctcccagctgctgctgacgcggagcggccggacgaggacgacggcggcggcggcgtacccgaagatggcgcggccgccgatcctatccgtcgcgctgccgtctgacaccggccgtgtgctcagcatccagtcccacaccgtccaggggtatgttggcaacaaatcggccgtctttcccctgcagctccttggctttgatgtggatccaataaactctgtacagttttctaatcatacaggatacccaacatttagaggtcaggttcttaatggcaaacagctctgggaccttattgaaggactggaggaaaatcagttgcttcattatacccatttattaacaggttatataggctcagtttcctttttagatactgtgctacaagttgttgagaaattgcgatcagttaatcctgatcttgtatatgtttgtgacccagttctaggtgatgaaggaaaactatatgttcctcaggagctaatatctgtttatcaacagaaggttgttccagttgcttcaatgcttacacctaaccaatttgaagttgaactacttactggattgaggatcacctccgaagaagatggtttgacagcttgtaataccctccacagtgccggaccacagaaggtggttataactagtgctcttattgaaggtaagctgctccttatcggaagtcacaaaaaaacagaggaacaacagccagaacaatttaagattgagataccaaagatacctgcatatttcacgggaactggagatttgacaactgctctcctactaggatggagtaataaatatcctgatagcctcgagaaagcagcagaactggcagtttccagtttgcaggcacttctgaaaagaactgtggaagactataaaatggccggcttcgacccatcgaccagcagcttagagatccggttgatccaaagccaggacgagatccgaaacccaactgttacatgcaaggctgtgaagtatggaagctgaatccatagtacccccactgacaaaggtgccaacaataatgagcagtgcctgcaccgccgataagcgggtgcacctacttccatgactcttggtcctcagttttgggatgctgattctgttacaccttagctccaaaatgagaaacaatcatatttctgaaaaaagggttatagacttatagggttatattcaggctgtgcgattgctgcagtctttgggaatgcgtggtggcctgagtgagattgtaaatggtccttatcattgttgtcttcctcgttgtgttgttgttgttgct

SEQ ID NO: 111446 - DNA, 2345 bp, Zea Mays
accgcggccccggccccgcccccggaaacaaaataggcagggccgcgcgcaggaggaaatggcgccaactgccaagctcgcgcgcgccaatctcgcgccttcttctccctccatctatttccctagtcaagccctcatccgaatccccatccccgatccatccctaccccagctcagctcagctgcccctcccctctttccactcaccagcgccagatctcccgccaccatcatggcctctgacgccaccgacgccccggcgcagcccgtgcccgccaagcgtcgcggaagctacaactgcggtcggtgcgggctgcccaagaagggccacgtctgctccgtcccgggtcccgcctcctccgccgccgctgggggcggcgacaaagcgggggagccgcagccacagaccaagccgcggcgcgcgctgcatttcgacgacccggcggcgtcggccgtggtgctggacgccgtgccactggcggtctcggcgccgccgctgcaggcggggtcgaagaaggcggtggacgtggaggaggacggcgacggcgacaacgacccgccggcggagcggtgggtcgaggttggcgcgggccggcgggcgcccggggttgtgttggtcgaggtgctacggcgcctgtccccacgctccgtggcggccgcggccggggtcagccgcggctggcacgagtgcgcgcgccgcgtctggagggccgccgaggaggttcgcctttgcgccgccggtgtcagttccgtcggtgcgctcatggcgcggtgccccgcgctcgcgaggctcgtgctccgcatggactgtgatgttgatgccacaacgctggcatgtattgcattttcctgtcccaatttacagtccctggatatcagcatggccaatagcgccgccaacaggatatctggggatgagctatctaggtttgtttcggagaagcgatctctgtcagttcttaaattagatggctgcagcagtcttggttttatcaatatcagctcttcaagcctttcaagactttggatgtcaggtctttcttcccttaccaaagcggtcatgaactgccccaatttgaatgagctctccctggactttcccaaacaaaataatgattctactgacctggttgctctaatggatagcctaggccgcacctgcccgaacttgaggaacatgcacatctcatcagaccgcttgtgcaacgaagctgtgtttgctctagagagtgctaacctcaggggcatgtgcatgctctccttggttctaggttcaaaaataacagatgcagctgtcgcatcgattgttcgttcttacgcgagcttggagctgctcgatttaagcgggtctggcatcactgacaatgggcttgggatgatcagcaacacgttccctaacaccctaacacgtctgctccttgctctgtgcccaaacatcaccccatgcgggattcaggtggctgcagcacagctgccgctccttcgcctcatggactgtggcaagagcatatgtgctaacccccagcctgaagctgggagatcatactctggcgatctaactgatgggatcaaattctgctccaaattacctgtccagagaaagcagcaggctacttgccagaagctgatcataaagcatagcgccctgaagaagctcagcctgtggggctgttcagggatcgatgccctgtacgtgagctgcccggagctggtcgagctgaacctcaactcctgcacgaaccttcatccagagcggctgctgatccagtgccccaagctggaagacgtgcacgtcaacgggtgccgtgacatgctggtcggagccatcaggaaccaggtccttaacgagttcgcggccgcggcgccccgggtgccctgcaagcggctggccgacgggtccaagcgcgtgcacgtgccccactacatggtagagcagctggaggaacatgagaaatggggcagcaggccgcggaagagccagtgcaccgttcatctcacctaggctaggcgcctgttaagtgagaggccctggtgatcgccggcgtcaggagcttgcggcgtcgatacagcgagactagatggaaatggtacggatatttttcgatatccgtcggttatgaaatggtcaaaactttatatggataatctatatctaaatccaaatatttgaaatctgactttctgaatccagctactcaaaatcgtcagatttgaagacaaatatagacatgtcacatatgttcccgcatcaaatttcacacatatgatgatttatttagtgtacagaaagtaatgtcaatctttattatgtaatgaagcatctatacaaaataactaaataaaaa

SEQ ID NO: 111447 - DNA, 1499 bp, Zea Mays
ccctaaaaaaacactcgtattccgtccctgctcgagctcccgatttctgaatttgttcctcgtttcgttgccagcccaatcggttcagtttcggcggtaacaagatcaactgcggtcgccagtcgattctgtgagcctgccagccatggagttgtccagttccgtctcgtccacggcggcggcggcggcgcaggcgcggctgctccggccgccgtcgtttcgccagccggggccggcgggattcgtgtcctgtaggagttacgctataaggagcaaactggtgagggcgatgcctccgatccttgctagcttccagcctgcatctcctcggtacccaagctttcaagacgcaaatggcaaaagacgaaatgttccttgttatcagagacaacaaaccccgcaggtagaagccaggtcgatggaggaggtatatgacactttggctgaacaccttctttcggtcttgaagaatattgaacatcttgattcaaaatacattgttggtctagctggcccacctggtgctggcaagtccacagttgcctctgaagttgttcgacgtgttaatacattttggtcccagaagcacacaaagggtagtggagcaccgcttcctaccaaggaaattgctgcaatgcttccaatggatggtttccacctttatcgtgcccagcttgatgcaatggaggatccaaaagaagcacatgcaagaagaggagcaccctggacattcaatccatcactgtttctgaaatgtctacatacactaagaacagagggttcagtttatgctccatcatttgatcatggtgttggcgacccagttgagaatgacatatttgtaaagccacagcacaaaatagtgatagttgaagggaactatctgttactggaagaagatgtttggaccgaaattagagacttgtttgatgagaaatggttcattgacattgacattgatatctccatgcaaagagtgctcaagagacatattgcaaccggaaaagagccagatgtagcagcatggaggatctcctacaacgaccgaccgaatgcagagcttatcctggaatcaaggaagaatgctgaccttgtgatcagatcagtagacttctcaagctagtgttcaattctttcaataggaaatagcattgtggttctagagttggaggttgttgtgggctgtttccgtggagattcctgtacatataataagctgaatgcctgtttcaaattttcatggtgattgtgttgcatgtaataagatattccttcactatgtaccgtggaggattgttaagtaatttattgacattttttaatagaaacacccttcagatttgtgtccaatgtcatatttttgttcctgtagaagatattaggagctttattgttgtatcgaaggagcaaaatgtctaggatcacaggccagagcagctccaagaggcgaccaaaacatatcccaaaactcgttttaggcttcaaaacataaaaatata

SEQ ID NO: 111448 - DNA, 107 bp, Zea Mays
aaataacatgtgtatcatttttgcatgcatgattatccaagtttcgagtgacttgcagttcaaatctaaattttctgaagaaattcaaataaacgaactaaatctac

SEQ ID NO: 111449 - DNA, 821 bp, Zea Mays
gcggtagaggtcgaccaaacttgacatgggaggaggcaatcaaaagggacttgaaggaatggaatatcctaatggagttgtgtttggatagaagtgcatggaaagaagctatccacgtgcccaaacagtgattaggcttttttcttttagtgctctcaaaagcttttcccctccccctttctctctttctccttttggtgacatcttgttgggtttcaactctagtctaccccaacttgcttgggactaaaaggctatgttgctattgttatatatatgttgataccatgatgcatcttagtgattcttgaattggaaggatcatcgtttccatgtttagttcttacccatagttttttgtcgtgttgatagcagattctttgtgttagtcatcactattgtgatccacgagtcacccgtaagcattagcagttaatttttgttgacttttggatgtcaacatgagccatcctttctatttaggggggggcattgtccatgtgttaacaatcttcattaaatataacagttctagatggaatgaaagatatgtctaaatgatatcacaaaatctcatggagactttttgtgtttttattttacgtctattcaattttgatctcacttgcaaaagagcttcatgttactagttatcaccaattacaaatcaaggactgaattttgttagtttcgtgatcaaaacacatctgggtatgaattgtaacattctttatattcttataatctaatttggcaaactgttgccgtatttaggaacttcacctagcagtgtattccttattctgttttttgttttctct

SEQ ID NO: 111450 - DNA, 210 bp, Zea Mays
atggcgccgacgaagagaaagcacacaacaggtgccaacgtggtcgagaccgtggccaagtggaagcactcccaagaatttcatgctagagttcctatcagacccgttctcttcatcggttgttctcaaagggggcttatgcttactgaggactctacaattaaggatttggattatgcttttcaagatgctgacaatattatcaagtaa

SEQ ID NO: 111451 - DNA, 346 bp, Zea Mays
tctaccttagtcatggcgtacaacaggtacagagcggggaagaggcgatggcgtggtcgtcgtcagtgatttccaacgagcaacgcgtgcggcgcaaataactccaggctcggtggaacggcggtgagcgaagtccaaggatgagtcggcgcgagcaacaacacgtagatggcttcgaatggaacggaatcagcggcggcggtcgggaacgtccggcgaggtgctggcacggtggcgagatgtgggcgaacagcggcatagagagctcggtgcggtcagggagagagaggagagcgtgtgagagagagctcggggaggaagagagggaggcagtctgggcgctttt

SEQ ID NO: 111452 - DNA, 615 bp, Zea Mays
tcttttggcataagacaacaacaaaaatgcattccgaaaaaattgtccaccttccctagcgaagctgatgaagtccctgataccgtcactggagatattgtattgtttctccagtaaaaggatcactcaagttcaaaagaaagggtcaagatctcttttatgaacacaccttgtctctgaccgaagctctatgtcggttccaatttgttcttacacatctagacaactagcagcttctaatcaaatcaattcctcgcgaagttgtgaaacccgataggccctttcacatgtagatctcaaatttttactcttcttctgcagttgtatttatttctcatccttgtttgataaatctgagcaggacgattcaaggtgataaacgacgacgggatgtcgatcatgaaggggaagctatacattcatttcacggtggagttctctgactctctggtactggagcagtgcaaggctatcgagtcggtacttccaccaaagctttcatccaatctgatagacatggagatagatgaagtgaggagacaaccatgcattaatgtgaacaacatcgaggaatagatgcgcatgaatcaggctcatggtgctcaggaggtgtat

SEQ ID NO: 111453 - DNA, 175 bp, Zea Mays
cttgcaagcggggaatgtatcgtttttggtgcaactaaaatatgtggtgttattttttatgcactaacattttattgaatattttgtataccgttgcaacgcacgggcatctacctagtatatatatctctactacttattaaggctgcaagagtagtctgccattccgtgttcc

SEQ ID NO: 111454 - DNA, 105 bp, Zea Mays
tgcaattttgctgctcctttctattttgccatataaaaggcatttctccttattactatttactataactttgttgatttgctaggtgataacaaaattcagctc

SEQ ID NO: 111455 - DNA, 917 bp, Zea Mays
agctcctcctgtcccctcccacctataaaatcgcccgcccaccgcatcccctccgctgcaccaaaaacccaagcctcctctgccacacacacacctcgccagcaccacagccatcgccacagtcacagtcagcgagagagagagagcatggacctgctgaaccccgagcagatctccgagttccgggaggcgttcgcgttcttcgacaaggacggcgacgggtgcatcacggtggaggagctggcgacggtgatggggtcgctgcaggggcagcggcccagcgcggaggagctgcgcgagatgatccgcgacgccgacgccgacggcaacggcgccatcgacttcgccgagttcctgggcctcatggcacgcaagaccgcggggggcggcgccggcggcggcgccgaccccgacgaggagctgcgcgaggcgttcaaggtgttcgacaaggaccagaacgggtacatctccgccaccgagctccgccacgtcatgatcaacctcggcgagaagctcacggacgaggaggtggagcagatgatccgcgaggccgacctcgacggcgacggccaggtcaactacgacgagttcgtcaggatgatgatgctctccgacggcgccggcgccggcgccgcagccacgggccaccaccaatgaacccatctccacctttcatcagcctagcgcttcccatcacgtcccttgccgatggagtggcggatcactccatccgtctctgcttcccttttctttttcaccccctcaaaaaaaaaaaaagatcagcgtccgtctctctaatgtaacgtacgtaatgtaatgtaactgatcaaatattcaacaagaaatttaattaccgaatggacggatgaattcgtgccatcgtacgtacctacgtgaaccatctacattcaaaaatc

SEQ ID NO: 111456 - DNA, 1427 bp, Zea Mays
gcccattacaacagtactctttaaataataaaaggcataaagccatagttattgatctaaatgaaaacaacgatacaaggcacaaagccattgttattgaattacatgaaaatgttgaaagaaggcacgcagccataattggaactttggtaaatagatgaaaatgatgaaagaaggcacacaaccataattagaactttggtaaataggagtagccatccgatttgcatcaaccagcagtcactcgataaaaggaaacagaaccaaggttaaataactaatatgtagccaaggataatcatgagataagttataataaaatatagtggctttcagaagaggttcaaattaaataattcatacctggaaggatggaagtagaacagcagcatcaccacatcaaaagcattatattgttctgaaataaaattcatgtgtatgagctcaatgtatagtggaaataaaatagaaacaagcaattttagtatcctaccatgtataattatgatttctacctccaaacctatgccaaatgtgctcaaccaaatcattttttagttgtgtatgctgtggacgatcacggatagaagcctttctaagcagcacatcagcgaaacacaagttatcaccaacgttaacttcaggaggtagaccataatttcaggaaagaccagattaaatgcattgtaatcaaataaaatcggactattgactgagcagaccacaatttcaggaaagaccagattaaattggactattgactgaacaggccacaattttcagaaagaccagattaaatgcacagtaacttggttaaatggaaataccttagccatttttaaaatagcttttgccttaaacacctcaatgccagaacgtgctcaaggattaaatctttccaacaaggtatacaaggatttttacatagtaataggattatatgaacagacgacttaccatgcttgtacatcagtgtcagcaacattctcagccaaagaacgaggaactgcagagcctccattgctgcctgatggtacagaagagctcaccatggactgcggtggacgtggggcaaaccaagtgccgggtccaaccatggacgggaagccaggcgggaggatgggctgagcccttggtggttgaacgggcggagccccttgcggcgggatctccagaggcgttggtgcagaggtcctcttggattgacgcctcaacgcgttttgcttctagggtttgggatttgggggcgatttaggatggtggcttggatttggcgcgcagcgaatggatttggagactaaatggcgcgatttggcgggagggacggaaggatttagcgggagggacggaagaagcgcgggtgtgcgggggcagcgacgagcgaggtcgtgagggccgaggaagacgcacgggatcaggatggagtc

SEQ ID NO: 111457 - DNA, 1907 bp, Zea Mays
ccttcagtttcacctcaatcggcaagcgtagactgacgaagagacaagggccagtacgtagtcacccaagccatggcccgtgcgcgctgccgcggtgcccgacggtgctcgaagacccgcactcgctgccggggaccgacgacatcgtggtcgcgcgcgcccgcgacgcgcaccgctccatgcgccttgacggcgcgccgccgggcaggtccagcgggtccagcgacgccctgcgccgcgcgctgcccccgccctggctaggcggacggtcgcagcacgacggagacagcacggccgtggccgccggcgccgtctcgggcgccgatgagaggcgctgcctcggcgcgctctgcgaccgcgccttggcgcgcgacgactccgtgttggccatgtaggacggcggggccgcgcgcaggctcggcatcggctccgacgtggaggtgaaggacgcgtcgtccaagcggccgctgggcgtccgcgcgctcccgtccgtcagcgccgacggcgacggtgacggcgagaccttctggcgcggctcggccttcggcatgggcgtgcggctcggcgtcgtcgacgccgagcagtggccgcagctgttgcgccgcgcgcccgccctcggcgcgccgtcgtccacctccacggtccggacgttctcctctagacgcctctccaccgcctcctgcacagcacagcgaaggcaagaccgcaagagcaacccaccgcgcgcatttgtcagtttcttcctcgtcggaagaagggcagtgccacagtgctctgctcaccagtggcttccaggaccgcgggtgctgcggcgacggcgagcgccgcctcggcggcgtggctgaggcggcctgctgcctggaggcgtcgtcctcgacgacatcgaggaggcgcagccgctcggcgcgcgcgcggcgctgggcgtagacgagcgcctgcatgcgccggagcgtcaggctggcctggcgccgcaccagctgtcccctcacaatcgcctgcagcatcaccatccctcgcagcgcgcatagcgccttcctcgcctgccgtcgcaaaccatttcactgttcacacttgacatttacacttgccgcgtggagaatcgccggagccgagaactgcacgcggccggccggcgggcccaagaacgcacgtaccaggtacgatcggaaggccgactggatcttgaccgccgccgcggcggcctccccgccacgaccaccgccgcgggcgttcctcctcctcgtcctcctccccgacgccggaagcgcgacgaccgtgcccgaggtggacgccgcctcagggacggcggcggccgcggcctgctgctgtccctgctcctgctgcaccacgacgacatgcagctccgcctccgagaagcagtgcgacgacgaggacgcgagcgggccctgggagctggacgctgccgcgcccggccgccggaagctccaccgcctcttctccctcccgtgcggtgtcgccgccgcctgcgcgtgcgagggcagcggcgcggacagcaccgactggcagtcggcttcagccctgtccttggccttcctccctttcctgccggacagcaacaagtttctgagccactggctcgccttgcccatctgcgcaagacgcactactccaagaatgaaggagcagaggcccggtggccactcattgctctctggaactggaactggaactgctctcacgtctcgcctcaagattgttccattgcctcacacgtctgcgatctgcccccactgcaccggccatgtgagggtgaggaagaggaagtcctccccgcaacagctagcaccttcaattttgtacccaccgccagaaatgactgctagcttcaattgcatgaacacaggcatgactcattggctcatgatttatgaaacaaaagggaacaa

SEQ ID NO: 111458 - DNA, 2547 bp, Zea Mays
atggaggagagcgacgcggcggagggggtggcggtgcagctgatcgatggcgagggcgagttcgcggccgcggcggcggagcgattcatggcagccgcgggagtcgccggatgcgggctctcctacgccgtcgtctccatcatggggccacagagcagcggaaagagtaccttattgaaccaactatttggaaccaattttagggagatggatgcattcaggggaaggagccaaactactaaaggtatctggatagcacgttgtgttggtgttgaaccttgtactgttgtattggatctggagggtactgatggaagagagagaggagaggatgacactgcatttgagaagcaaagttcgttatttgcacttgcaatttcagacatagttctaattaacatgtggtgccatgatattggccgtgaacaagctgccaataaaccacttctaaagactgtatttcaggtcatgatgcgtttgtttagtcctcggaagacaacactactatttgttatacgtgataaaaccaggactccacttgaacatctagaaccagttctaagggaggatattcaaaagatatggaattctgttgccaagccagaggcacacaaagacacccctatcagtgaatttttcaatgtacaagttactgcattgtccagttttgaagaaaaagaggagcagtttagagaacaggttcaacaacttaggcagagattttcaaattcaattgcaccaggaggtcttgcaggtgatagaagaggagtagttcctgcttcaggttttctgtttagttcacaacagatttggaaagttatccgagagaacaaggatcttgatcttcctgctcacaaggtaatggttgctacggttaggtgtgatgaaattgcaaacgagaagtttggatgcataacctcggacacagaatggttagatgtggagagtgctgtccaatctggtccagtacctggttttgggaaaaaacttagcaatatcgtggaagttcacttgcaagagtatgacaaagaagctttctattttgatgaagctgttaggaaaggaaaacgacaacatttggagtccagaatactgaatcttgtccaacctgcattccagaaaatgttgactcatctgcgcatgaaggctttagaaaaatttaaagctggtcttaattcatctttggagagtggaaaagaattcgcgatatctgcaagagacaatactgaatgctctctcaaagactttgaacaaggatgtgctgatgctataatcaagcaggcgaactgggactgctctaaaatactagagaaagtacggcgtgatattgaagatcatgcactttcaattcgtgaaagaaagctatcagaattgacaacccatgctaaggagaaactaagaaaagcactagctgaacctgtggagtctctatttgatgctgcagaccaaacaacctggacatcaataagaaacatttacaaacgcgagacagaggccatcctaccggagtttctgaaaaccatttgtggctttgaaatggaatatgctcaagcagaagaaatggtatccaaattaagggattatgcccggagtgttgtgcaaagtaaagctaaagaggaatctagcaaagtattgatccatatgaaagagaggttcacaacagtgtttagccatgacaaggattcaattccaagggtctggacaggaaaggaagatgttcatgcgatagcaaaggaagctcgagctgcggctctcaaacttctgtctgtaatggcggccattcgctgggatgatgagccagataggattgaaagcatcatcacttcaacacttctggaaggctctgttgtatcaaagattgcaagtgctgcttctgctgacccacttgcttctaccacttgggaacagattcctccagagcatacaatgattactccttctcagtgcaagttactgtggaagcaattcaaatcagaaactgagttcaccattacacaagcagtatccacacagcaagctcacaggcgtggtaatagtaagctgcctcctccttgggcaattgtggccattgctattcttggtttcaatgagatcatgacgcttcttaggaatcccatttatgtgtttttgctatttgtgggctacttgatggtcaaagctttggcagtacaactagatgtcagcagagaattccaaaatggagtggttcctgggataatctctgtgtcagcgaagctcctgccgacgatacagaacctggtgaacaaagtggcagccgagcagcaggatgagcaccggcaccctcaccagcagcaccctcaggtagcagaacccctacagccacagatgcagccgccgccgctgctcctgagcccgagaagccccatgagcgagctgcggaggctgcacatgccgtcaagcccgcgcaaggtagcgtcttcctcctcgtcgccgtcgtcgtcctcctcgtctgccgtatcgtcccctaggcacgttggcgaggatcagaagccaagaccaggggcagctgcgcctgagaaccagtcc

SEQ ID NO: 111459 - DNA, 270 bp, Zea Mays
ctggtggatctccattccaaaccctccaatttagtactacatgcatcagcatcattgcaggtgacacaggattatgttacagcaaggtttcagtatcctaggctcagctttctagtcctaatgctaccatcgattgctcagtttcctactggtaaaccggagaatggctaaacaacatgggaacttcttttaagttagggcaacactgagctggtgttgccttccttccagcacctacacctggggggtcctaacatagcttaaactacc

SEQ ID NO: 111460 - DNA, 177 bp, Zea Mays
gggtgcagctccagcggcagcaggaatttcgtttttgtggactccaaagcacacgactgggctattattaccaggtatcaaaagaggactcgaatctccatctacatggacgtctccttggtatatcgatatgcgcaagcactttcaggaaattctgattcatgtcatggtaggtaa

SEQ ID NO: 111461 - DNA, 148 bp, Zea Mays
cgagtatttttttaaactgattctcatatggagccgaaagattgggagtcgtttttgtgaagaaaggtgggatctaaaaaaacctgctccaccctcccttaaaacagctcctcaaccaaccaaatgtggacctccccttaaagtttga

SEQ ID NO: 111462 - DNA, 1140 bp, Zea Mays
atgtgtagaccgcccccgcccccgaaaaccacgcgcctgctccatggcagcccgaccccggccgccgcaaaccccgctgcgccgcaaaccgcccgctcgaccccggccgctgcaaaccccgcccgactccggccgccgcaaaccacgcgcctgctccacggcagcccgaccccgaccgccgcaaaccccgctgcgccgcaaaccgcccgctcgaccccggccgctgcaaaccccgcccgactccggccgccgcaaaccctgccgcaccgcaaaccgccgcgcccgcaaacccaccgcacaaagtctgcgcccgatgccctgcaaaccccgcaaaccaagccgcgagttcccgtgcccaaggagggtcttgcgatggtgaacagcacggccgtgggctccggtctcgcctccactgtgctcttcgaggctaacatccttgccatcctcgctgaggtcctgtccgctgtgttctgcgaggtcatgaacggcaagccggagtacatcgaccacctgacccacaagctcaagcaccacccgggacatatcgaggctgctgccatcatggagcacatcttggagggcaactccttcatgaagcttgccaagaagctcggcgagctcgaccccttgatgaagcccaagcaggaccaaagcaagaccaacttacagcaaataggtctcaagggaaaagcaaaatcaccgaaacaaccatataactcttttaagcatgcaccagctcctgaagtaactagcttggtatctgttttgcagtcgttgatgagtgcagcaattccaaacgtcattggttggattgcgatctcctttgcaaaaggaacaaaaatggtctacaagcatttggccacactatactttgtttttgtctttgatagctctgagaatgagcttgccatgctcgacctcgtacaagtgtttgttgaaacattggacagatgcttcaagaatgtatgcgagcttgacatcatatttaacttcaacaaggcagcaaaaaaggtgggacacagaagctgcatcaccatttttgacagcagttgggttatctatttcaaattacgcctttttatgcacatgccatatgcaatactgtgcaaatctgaaagtttgagtataacaaatgcctga

SEQ ID NO: 111463 - DNA, 2886 bp, Zea Mays
cccacgcggtttttgtgtttgctgccgccgcggtttccattgcttctcccgtcgctagggcgctcgtgaatacgtgatccatcgtctccatctccgtctggtgtggtgaggtttgagagactcgaggtgtgagcgtcgcttcgtctggaatcggctctctcatttgttagatagatccttctatctccccacgtttgggcgtcgcttcgtcggctgcgacttgcgagacgccggcgccgccggcgccggtggacgaaggcgatcaaggattaggcgatccgatccgatccgaaccaattctccattcttcgattccttccttgggtgggcggctgccctcagattccttccacatggctcgttccccgccgccgccacccccttccccggcgcaagggaacgggaacgggagtgggagcgggagcctcaccgccagagacgccctcgcctacatcaaggccgtcaaggacaacttccaggaaaagcggcacacgtacgaacagttcctccaggtcatgcgtgattttaagagcaacaggctcgacagcgccggcctgatcgcccgtgtcaagaccctcttccacggctacccggacctagtcctcggcatcaacgccttcctgcccaaggggcatgccatcaggcctcaggacctcagcgaggacaaggagcccgtcgattatcccagggccatcaaccttgtcaacaggattaagatacgattccagcaggaggaacatgtctacaagtcattcctgggaatcctcagtatgtaccgcatggataacaagcccattcaagatgtttacgacgaggtcaccttgctgttccacggccatccagatttactcgaggagttcactcatttcttgcctgatacgcccatacctcctccggaggcaggcactacctctaaagttaggaatgatgacaagaatgctataacgcattctgccatgagagctcagacagttcagagtgagagagctcttccatcagctgctgattcggactccagtgttgatcgccttgatcttgagcatgatattcaaaaagagtgtattgaaaaggacaaagtccgtaatgcctgccacgatcagcatagaggagattataaaaggaacaggatgaatgacgaatatgaaaacgaagatttggatgcagaacaatctggtcccaaatctcaaagaaaggtggagggtactggtgatgatacaccaggggttgttaccatgtcctcattcaattgtaacgagggggacaacgatcctgaggaagagtctaaagttaggaatgataacaagaatgctataatgcattctgccatgagagctcagacagttcagagggagagagctcttctatcagctgctgattcggactccagtgttgatcgccttgatcttgagcatgatattcgaaaagggtgtattgagaaggacaaagtccgtaatgcctgccacggtcagcatagaagggattataaaagaaataggaagaatgacgaatatgaaaatgaagatttggatgcagaacgatctggtcccaaatctcaaagaaaggtggagggtactggtgatgattcaccagggattgctgccatgtcctcattcaattgtaacgagggggacagcgatcctgagaaagagagatataatgaaaggggaaaatctgaaagagtattgaccttcaattctaaggaaggagcagctcatgaagctagtacattccctagcaaagagaagtataacttatgcaaaccaatatcagagcttgatctgtcaaattgtcagtggtgcactccaagttaccgacttttgcctaaaaacgtttgagctggacgtgctgttggaatctgttagtgttacaattaagcgtgttgaggagttggtggaaagtatggaaggcaactcactgaaacctgatagctctatccacctcgatgaacatttgactagtttgaatatgaggtgcattgagtggctatatggtgaccatggacttgatgttgtggatgttcttcaaaaaaatgctggtgtgacattaccagttattttaaccaggctgaaacaaaagcaggaggagtggtcaatgtgccagtcagattttaataaagtttgggctgaagtatattcaaaaaattatcacaagtctcttgactacggcagtttctattccaaacaacaaaacacaagaatctgaacacaaaagattaacgaaatcagtgagaagaatagaaagggggatgatgtgttacttgctatttctgctgggaataggtggccactagtaggcaagaagcagaggactgctggaaagcgttgggctctgaagaagcacaggcacccgcccgcctgggcttctggtaccatgccgccgcccttgcttgcgtcgagggcctccaagaaccgcaccacctcgtccatgtcagggcgcttctccgggctcgcgtcccagcacttgtgcatgatgttcgccatcgggcttgggcagcagcgacaggccgcaggttctgcacacacagaatgtcaggccgcaggttctggcacatgcatgttcagttcagtatgtggacgattaccagcagtgaatccaggaactgagaacaaacctgatgaacaacggcggatgatacgtctgcaaagctgaggtctgcatgtcacagatttcccacaagcatatgccaaagctgtacacatggcacttcctgttgtacggcttgccttcaagaacctgcagacgccgacagaaaaagaccaaacagttgctcaaaacacttgtcctggtacagaacggaaacacagcaacagtgattgctttttttttgtacagatctaaaacagtagcggaagtatagattatagtgaccccatttttttaaaagaa

SEQ ID NO: 111464 - DNA, 298 bp, Zea Mays
attaggtttgtggttatttttcattatgtcatgtatgcaatggaattgatggaatgtcatagaattgttctacatgatgtcttggttgtataatctcacttttgtgcctttgtgattgctgatggcagaagatgagaagcactcataccatgccttttattttcctatacaactgatggaattgattttgtataatttttttctatagtatgtcgtggacctatcatttgtatttgagaaaacaaaaataccggtatgttctattctctattatgttctggttatttgtatagatagt

SEQ ID NO: 111465 - DNA, 1928 bp, Zea Mays
aaaaaaaaatagagtagactcgccagccaggcagccaccctcaccctggtctggtctcctctccaagcgggcagcgctcctccaaactgaaccctatcctagcacgagtgcacgtcggtggcagcaggagatggtggggacggcggaaggcggcgcggagagggcggtgcggcggtgggtggacgccgccggcgggcgcctggtcctggacggcgggctggccacggagctcgaggccaacggcgccgacctcaacgacccgctctggagcgccaagtgcctcctctcctccccgcacctcatccgcaaggtccatatggactacctagaagctggggcgaacattataatcacagcatcgtatcaggccactatccaagggtttgaatcaaagggcttttcaaaagaacaaagtgaaaacttgttaacaaagagtgttcagattgcactggaagcccgtgagatgttcttgaaggaacatttggagaaatccactcctatacagcatcctattctggttgcagcagctctagggagttatggggcttatcttgctgatggctctgagtacagtggggattatggtgaagctggtacgaaagagttcctgaaggactttcatcggcggaggcttcaggttcttgctgaagcaggcccggatttgattgcttttgaaacgatccccaacaaattggaagctcaggcatatgttgaactccttgaggaatgtaacatcaatatcccttcatggctttccttcaactcaaaagatggagtgcatgttgtgagtggtgattcgttaattgaatgcgctactattgctgacaagtgtgcaaaggttggtgcagtcgggataaattgcacacctccaagatttattcatggactgatactctccattcgaaaggtcacagacaagcctattctgatatatcccaacagtggtgaaagatatgatggtgaaaaaaaggagtgggtggaatccactggtgtgtcagatggtgattttgtttcgtacgtaaatgaatggtgcaaagatggggctgcgcttatcgggggctgctgcaggacaactccaaacactatcagggccatacacagaactcttaaccaaggctgccacaagcatcagttacctgtagcatagatctgtgctccactcctgatgctctcctcccagcagtaccttgagctgtatccccgagattccttaaccagcgcgaaccaatatactgttgcgtgttctcctgcaaatgagatgttctgcacctatgtttgtaatgttgtatttctgggtttttaagctatccaacttggagatacaaccggtgaggaagcagcaacaataggtagttctacttctgagtgaggaaaaacaacttgcggctgagttaatgaagcttagtagctaccaccgttgtatgacagttgctcagagatgttatcttcattaagtgcttatattaccgctagttcgctgtgaaatttgttaaaccattatatgtaagttttgtttgacaagactgcatctcctgaaactaagatcttagtttcctgctatttccctgtgaactgtgttaaattgtatgcaagttttctttgacgcatctcctgaaacgaaggtcttaatatatttctgctacccgccgtgtattgtattaaataatactccctgtgtttcaaaatatagttctttctatcttatttttttttcatccacattcatttaaatgataatatagatatagttgtaaattgcattcatatgttacttaatggatgtgtaattagaccaaaacgaattatattttaggtgcaattacttaatatatgtataattagtcaaaacgaattatattttgggacggaggaagtaagttttatttgacaaaccagcatctcctgaaatgaagatcttgctctacctg

SEQ ID NO: 111466 - DNA, 1032 bp, Zea Mays
aaaaaaatagagtagactcgccagccaggcagccaccctcaccctggtctggtctcctctccaagcgggcagcgctcctccaaactgaaccctatcctagcacgagtgcacgtcggtggcagcaggagatggtggggacggcggaaggcggcgcggagagggcggtgcggcggtgggtggacgccgccggcgggcgcctggtcctggacggcgggctggccacggagctcgaggccaacggcgccgacctcaacgacccgctctggagcgccaagtgcctcctctcctccccgcacctcatccgcaaggtccatatggactacctagaagctggggcgaacattataatcacagcatcgtatcaggccactatccaagggtttgaatcaaagggcttttcaaaagaacaaagtgaaaacttgttaacaaagagtgttcagattgcactggaagcccgtgagatgttcttgaaggaacatttggagaaatccactcctatacagcatcctattctggttgcagcagctctagggagttatggggcttatcttgctgatggctctgagtacagtggggattatggtgaagctggtacgaaagagttcctgaaggactttcatcggcggaggcttcaggttcttgctgaagcaggcccggatttgattgcttttgaaacgatccccaacaaattggaagctcaggcatatgttgaactccttgaggaatgtaacatcaatatcccttcatggctttccttcaactcaaaagatggagtgcatgttgtgagtggtgattcgttaattgaatgcgctactattgctgacaagtgtgcaaaggttggtgcagtcgggataaattgcacacctccaagatttattcatggactgatactctccattcgaaaggtcacagacaagcctattctgatatatcccaacagtggtgaaagatatgatggtgaaaaaaaggagtgggtggtaagttcattgagcaaagctgggcttattcatatatagaagctatcttctttgg

SEQ ID NO: 111467 - DNA, 1943 bp, Zea Mays
aaaaaaatagagtagactcgccagccaggcagccaccctcaccctggtctggtctcctctccaagcgggcagcgctcctccaaactgaaccctatcctagcacgagtgcacgtcggtggcagcaggagatggtggggacggcggaaggcggcgcggagagggcggtgcggcggtgggtggacgccgccggcgggcgcctggtcctggacggcgggctggccacggagctcgaggccaacggcgccgacctcaacgacccgctctggagcgccaagtgcctcctctcctccccgcacctcatccgcaaggtccatatggactacctagaagctggggcgaacattataatcacagcatcgtatcaggccactatccaagggtttgaatcaaagggcttttcaaaagaacaaagtgaaaacttgttaacaaagagtgttcagattgcactggaagcccgtgagatgttcttgaaggaacatttggagaaatccactcctatacagcatcctattctggttgcagcagctctagggagttatggggcttatcttgctgatggctctgagtacagtggggattatggtgaagctggtacgaaagagttcctgaaggactttcatcggcggaggcttcaggttcttgctgaagcaggcccggatttgattgcttttgaaacgatccccaacaaattggaagctcaggcatatgttgaactccttgaggaatgtaacatcaatatcccttcatggctttccttcaactcaaaagatggagtgcatgttgtgagtggtgattcgttaattgaatgcgctactattgctgacaagtgtgcaaaggttggtgcagtcgggataaattgcacacctccaagatttattcatggactgatactctccattcgaaaggtcacagacaagcctattctgatatatcccaacagtggtgaaagatatgatggtgaaaaaaaggagtgggtgtttcatgtgctgtgcaggaatccactggtgtgtcagatggtgattttgtttcgtacgtaaatgaatggtgcaaagatggggctgcgcttatcgggggctgctgcaggacaactccaaacactatcagggccatacacagaactcttaaccaaggctgccacaagcatcagttacctgtagcatagatctgtgctccactcctgatgctctcctcccagcagtaccttgagctgtatccccgagattccttaaccagcgcgaaccaatatactgttgcgtgttctcctgcaaatgagatgttctgcacctatgtttgtaatgttgtatttctgggtttttaagctatccaacttggagatacaaccggtgaggaagcagcaacaataggtagttctacttctgagtgaggaaaaacaacttgcggctgagttaatgaagcttagtagctaccaccgttgtatgacagttgctcagagatgttatcttcattaagtgcttatattaccgctagttcgctgtgaaatttgttaaaccattatatgtaagttttgtttgacaagactgcatctcctgaaactaagatcttagtttcctgctatttccctgtgaactgtgttaaattgtatgcaagttttctttgacgcatctcctgaaacgaaggtcttaatatatttctgctacccgccgtgtattgtattaaataatactccctgtgtttcaaaatatagttctttctatcttatttttttttcatccacattcatttaaatgataatatagatatagttgtaaattgcattcatatgttacttaatggatgtgtaattagaccaaaacgaattatattttaggtgcaattacttaatatatgtataattagtcaaaacgaattatattttgggacggaggaagtaagttttatttgacaaaccagcatctcctgaaatgaagatcttgctctacctg

SEQ ID NO: 111468 - DNA, 133 bp, Zea Mays
aaataacataaagtataaaaacatcatagccttaacagtacttccatcaaacagaaacatgagtattcatgagcaacatgagcaaattgtaacgcaaacagtctgccacccaaaaccacaaataaaaaaaaaa

SEQ ID NO: 111469 - DNA, 2886 bp, Zea Mays
cgcccagagtcgtcaacctccctgcgattccagcgcggtcagggggcgaacccgcccgatttctacggtgcggccttggaccaaattcttctctggcgtataaatccccaatcgtgcccgcctcttgctcaaccacctcgcaccgccaccaggggaccctcgtcaccgagaaagagagagccacgagggagagagggagtcttcttcgccgatctgcgctcatcggcgacgacaagggaaggaagggcaccggctctgtgtcagtatcccttcatcagtcactggaggtcaggcagagcatgttcgaggagatgcagcagataatgaagctacaaggctcgcaggccaagcaccaaggtttataggccagaatgggctaaatagttgctaggccggcctgtgtgccggagtataatatataagccaaacttagggcagagaaggggatgaaatgaacctgactctgaattctactatctactatcgtctccctgttcttcacctctattcatcttctttgtgttgtctgtctgtatctctccactcctgctattctattagtgatctattaggatagctaacaattggtatcagatatccaccgatcctcgaattccatcgttcctcgaccggaaaacatccatggcgtcttcttcaccggtccatactcagctcattcaagcgttggagcttcagacgcgcgccctcctctcggagttagacaagcgtctcgactccaagtgggggaccaaatgggaatcccgtgttggagcgatcgaatcgcgttccgccgattcgactcgcgccatgtccgatttctcctctgctcttcactccgacgtggaagcgcacctcacagcagctgacgccgccaccgactccaaccttctccagatcgaagccgagctggacccccgcgtgtcggcgctcaaatcctcagtgcacgccctcgatctgtggtgtcctcgcgtggattcatcgatcgaggggctccacgcgtcggtggatttcatcagcaccgaagtgtccaagatggggattctatggaaccacgacgtgtgtgtcgacgacttagccaggccgggcttgttcggagcacacagatcggcggcgtgcttcgacgcgtccgccagcgcgccgtccatcccagcctcggtcatcgccgacaactggggagggttcttcgacgatggcgagcagtactgcgcggcgctggacgcgctgcccaacagcatccactcagacctcctcaacacattcgcgcgtcacagccacgaccatctcttcgtcctcaaccccgtggccgcccaggattcctctgccgaggaggccatggccacgatggaagcagccgcggacgcgggggatcccgcgaggctcgtccagtcctctccgtccccttccctactcatcgcggggaacctgctgccaccctccctcacgatgccgcagctgcaagctgaggtggtggacaagcagtaccgcgtcgcgatgagtccaccgcctcctcttcccgtcgtcgacgagctgtaccgcgaagaggcaagtcctccgcctcccatccacgacgacgctgcaggggtgatgtccttggactcgagcgcgttcaaggtgctcgaccaaatgtccaagagcgcaagagccgacggtctagtggtgaacccgttcgaggagctggaaagcggctcgatggcacttctcgcggaggcgacgggcgaaaaggtgatcgtcgttgggtctgtcttgctatgccgctcaccaagtctctaccctcaatccatgtcgtgtgacacgaggcgatgcatggcgtggctggatgccaaggcgcccaagtctgtggtgtacgtgagcttcggcagtgccaaatgcatgccacccattcagctcaggcagctcggcatggcgtttgcctcatgcccctcgcctgtgctctggctcatcaaggacgctgactccctgcccaacaacatcaaggatttgctacacgagcacactgttgcagacgatgtcgcaggaagcaagtgcctggtggtgcgcggttgggcgctacacgtggccatcctggcccatcctgccagtgacggcttcatggcgctctgtggatggggctccactctggaggttgttgcagccggtcttcccatggctgcctggccctttttcgccgaacaatttatcaacgagcagctcatcatggacgtgcttggtattggattgtctgtcgctgtgatgaagccaattgaaaatgttttgattgccagtaacatgggtggtgctgttgtgatgatatatgctcctgttttttggtcttgcctgacaagcttcacacttggaatccatggtcagatagttggggttctatgtttgccatttctggtaattcaactgaatatcagtatagctgtccagcaaaggttcttgtgggatccaggtggtgatcagtgttgcttactgaatttgtttattcatggcttgggggacttgcagatgcaacaagctagtctgtcttttgtcacgaagacaggatggctggtgattatcctttccttgctgctactccaatgggacaagccaaaccttcggggtcttaacaaatccaagtgcattcagcgtggcttccgtcgatgctatgtacatgcttgtccaagcaggtggtctgactggcttccgtcggccgagttttggtataatagctcgttccattctgctaccggtcgatctccttttgaggacttatatggttatgcacctcgccatttctgtattacttcatgtgatggtccctcagctggcctaaatgcattcttgcaagacaaactggttatgaccaaactgttacagcaacatcttttgcgcgccaagcaatagatgaagtctatggatgat

SEQ ID NO: 111470 - DNA, 1291 bp, Zea Mays
aaatacacagcacatccaaaccgggcatgcagccatagccactctcctctcctgcagctatagctagagagcaagagagagaggggtagatctatctgtaccgggcgggcggcgcgatgatgccctacggcacggcggcggaggcagaggcggcgctggggcgctccatgacctgggcagaggccctgtggttccggtactcggcggggatgccggacctgtggctgacgtggcacgtctccctcgtctacctcgtcttgtacgcgttggttccgctgccggtcatggttatccagaagctcgcgccggggtacgccctgcggcacaagctgcagcccggggtgccggagccctcgccggtttccacctacgtcgaatacataagggacagcaggggcgtcaccctggccgccttgggcccgttcccgctcatctactccatcgcattcaagctgttcggggtccggacgggactccctttgccgtcggtctgggagactgcgacgcacctggtggtgtattcgctggtggaggactacacgtcgtactggctccaccgcttcctgcacaccaggtgggggtacgagaagatccaccgcgtccaccacgagaagacggcgccgtccgggttcgccgccgcctacgccacgggcactgagctcagcttgtacctcaccacgctcttccttgggccggcgatcgtgcccagccacgtcaccacgcactggctcttgttctccatccgcataatggaggccttcgacacacacagcgggtaccacttcccgttcagcctcgcgaggttcatcccgttctacggtggcgcggaattccacgactaccatcactacgccggagagaagaccaggagcaatttcagttccgtgttcacgtactgtgattatatatatgggacaaacaaaggctacatgtaccacaagagaagcctagccgagctgaagacgaaggaggccgaacacagcgggaaagaagactgagattacgtactcgctctcaatattttatgcacgaataagtggcatatactgaaagcgtccatcatatacagttgctcgctccgttctgttccgttgcctagagattgagatgtccagcaaataatagtccatatgtgtactacaccacagggtttgtcgtcccccatgtgtaccctcagtcctacatcgatttgattagtggagaccggagtggatttgaacaggtcgtcctcatgtggacgtacacctgaacgtaatatatatatatatatatatatatatatatatatata

SEQ ID NO: 111471 - DNA, 642 bp, Zea Mays
gatctcaagaagcatgtgttttgcactatcatagacctcaatcactgcacaacaacaataatcattcttacatatcttcctccatagcctgggatcagatcctgtaacttcttttgcctgaccaagtgcaagtgacagctcattacagagcaagaaacaaggccaacggattacacacacattccacagctcaggtggcagctcaagaagctcaacctcacagtcactagcaatgtcttcctcccggaacttgcttattaactcattccaaataagtgcaaaccattgtgcctccaccaaatttgactcaatcttctgaaaggatctgctgaaaccataccttagctgtaatcattgccagaaattgtgaaaaaggttgggcaagaagctctcattcacctgctgctcctctggcatgatgttgaatgacatggcacttgcaaagaactagaacctaagtcacagttgtttcatgtccctgatctctcccaaatgcgcaaaaagccccacaaatgcacccgacaaagaagaaaatatagcataccaaatctggatatccatgaggctttgttcggttattgatattacatgtgtattggagtgtattgggtgggattgggttggattttgacttgttatgga

SEQ ID NO: 111472 - DNA, 2362 bp, Zea Mays
cgaactgctgaggtcatccagtgcgtccgagcgagcggctgacgccggccggcactcgctcccgcccatggccgccgcggcagctaccaaggtcaccgcggcggcagcagcctccgcagtgttccgtagcaacaaggagctcacccgcctcgcgcggtcgggccagctggcggcggcgcgccgcctcttcgacgccatgcctctccgcaacaccgtcacctacaacgccatgctctccgcgctcgcgcgccacgggcgtatcgacgaggctcgggctctcttcgacgggatgcccggcagaaacactgtctcctggaacgcgatgatcgcggccctctcggatcacggccgcgtcgcggacgcccggagcctcttcgaccggatgcctgtccgggacgagttctcgtggacggtgatggtctcctgctacgcgcgcgggggggatctcgagctcgcccgggacgtgctggaccgaatgcctggtgacaagtgcacggcctgctacaacgccatgatctccgggtacgccaagaacggcaggttcgacgatgcaatgaagctgctgcgggagatgccggctccggaccttgtttcatggaattcagcactagcggggctcactcagagtggggaaatggtgcgggcagttcaattcttcgacgaaatggtgaaggacatgacgtcctggaatttgatgctggcgggttttgtgcgaactggagatttgaatgcggcctctagcttctttgcaaagattgaatcacctaatgtcatctcttgggtgaccttgctcaatgggtattgccgtgcggggaggattgctgatgctagggacctgttcgacagaatgcctgagcgaaatgttgtggcttggaacgtgatgcttgatgggtatgtgcatctctcgcccatagaagaggcctgtaaactgttcgatgagatgccaattaagaactcaatctcatggacaacaataataagcggattagcacgagctgggaaactccaggaagcgaaggatcttctcgacaagatgtctttcaactgtgtggcagcaaagactgcgttgatgcatggttatttacaacgcaacatggctgatgatgctcgtcggatttttgatggaatggaggtgcatgacacagtgtgttggaataccatgatctctggttatgtccaatgtggaatacttgaagaggcaatgttgttattccagcgaatgccgaataaggatatggtttcctggaacaccatgattgctggctatgctcaggatggccaaatgcacaaggcaatcggtattttcaggaggatgaacaggagaaatacggtatcttggaactcagttatctctggatttgttcagaatgatcgctttgttgatgcactccatcatttcatgcttatgagaaggggcacaaatagggctgactggtctacctatgcaagctgtctcagagcatgtgcaaacctggctgttttgcatgttgggaggcaactccacaatcttcttgttaggagtggccatatcaacgattcatttgctggaaatgccttgatttccacatatgcgaagtgtggaaggatattggaagcaaagcaaatctttgatgagatggtatacaaggatattgtttcatggaatgcgttgattgatggctatgcttctaacggtcaagggactgaagcaatcgcagtcttcagggaaatggaagccaatggtgtgagacctgatgaagtcacatttgttggtatcttgtcagcttgcagtcatgccgggttgattgatgaaggattgttttttttctactcaatgacaaaagagtacttactgaagccagtcgctgagcactatgcttgcatggtagacttgcttggaagggctgggaaactgaacgaggcatttgaacttgtgcaaggaatgcagatccaaccaaatgctggcgtctggggtgcattgcttggagcatgccacatgcacaagaaccatgaacttgcacagctggcagctgagaggttgtctgaattggaacctcgcaaggcctcaaattatgtgctgctgtcaaacatcagtgccgaagcaggtaagtgggacgaatctgaaaaggctcgggcttcaatcaaagagaagggagtaaataagccaccaggtttagctggatcaacataggtcttatagtccaatgatttggctcagtgatgccagtgcaggttttcactcatagtgcattggtacgaaatttagggttgttgtctgaatttgtagcaccccgtccaattcctagaccggcggtactcactcctggcagctctttaggatcatatatcgtccctacagaccaacacgagtttttttgtgcgc

SEQ ID NO: 111473 - DNA, 2065 bp, Zea Mays
ctttttggaagtttggctctgttttctctcaccgcctgttctcccccgcgcgcgatggcggcggctccggcgagcgtcggctgcggcggcgcgtactcttgcgagacggcggagcgtacccgcgagtggatgcaggccctggccactttcctcggccgccaccgtccgctcctcgaggcccacgtcgtcaactttttcaaggacaggctgtgggagctagtggacgccgagtggatggagtgcctccggcgggagcccgtcgagagcttgctcaagctgccatctggatgcgtccaggagcactggcctgctacactgcgagagtttgtgcttactgctaggtcgcttgtgattccacgggagcagaaggctccgcaatcgcttgtatctgacattcatgtagccccagttggcactgttctcgctcagggcatgaactcaaagaagaagcacgaaattgaaaatctagctgctgtggttcatgcaattgcaaagaggtgtggagccaagacagtggttgatgtaggttctggccagggttatctcgcacaggccttatcttttgagtaccaactccgtgttgtagcaatagatgcttcatcacaccatgcatcagttacaattgctcgtgcagaaagaataaagaagcactatgctgctaaatgtgtggagaagcaactgctcatggtacctagggcagtcacctgtcatgttctttctagtgacacattggcagcagtcacattagatgcatgtaaggatgacaatggagaacatgtgagagatactaaaacatctactaagaaaatcactcaaatccaggaatcaactcagggcacccctccattaatcctggctggtcttcatgcatgtggtgatctttcagttaacatgctaagagtttttgtgtcctgtgaacaagtaaaagcattggtaagcattggctgctgttacaacttgctttctgaggatacttatgaggacacagatacctgccctggttttcctatgagcaaggctgccaaacattctgaattggtacttgggaaaagcatccgtgaccttgcatgtcagagcgcagagagatggagaaatctcaccatggacattgcattgcaaaattttgatgtacatgccttccgagctgcatttcaaatggtacttgagaaatattttccagaagtgtcaaggttgagtccatcaattggaaggcaaggaaaagctcttcgacgtcagaggcttcgaaaagttgtggaatcacaaatgactacaaagaaaaatgatgatttctcctgttcaactttaaaggaacaaaacaagaacacaaacgatgttcatccagtcatacatgaagttgacacagggccagatgacatccatcagaacgcacatcaaaagttcatcctgttcaaagatttcacattatctggattaggtcgccttggctgtggctcagtggaagacacgagtcttcttgaaatatggaaggacgtgcaacccttctctgtcccttttggtgccttcgagctgctttaggtccactggtggaaacatatattttacttgatcggttattgtatcttcaagagcgaagcaacctagttgaagcattgctgtttcctctgtttgatcctaccatttctccaaggaacatggccgtaattgcttggaagttatgtgcaaattcttcagaagcatgacatggtaaatcttctgatgataggatatgcagttgatgggatggtgtgttggtaccaaactataagccagactattgtcttatggcagaacttcttcgatttagatacagttattgtattgctgtcccttttagaagggcaggcctgatacagaggtgagagctgtctcactgaatcaccaggtcacggtttcgaagcagcctctccgcatttgcgtgggaggcttgcctcggtttatcccttatccaagcctctagcactgggtgtgctttattttaattgtattgctgtcctcccatataaaaaaaacctgaagatagtattgtctttgaaattgtgagggcaatgcatttccctttcaaatc

SEQ ID NO: 111474 - DNA, 1989 bp, Zea Mays
cccgcgcgcgatggcggcggctccggcgagcgtcggctgcggcggcgcgtactcttgcgagacggcggagcgtacccgcgagtggatgcaggcccacgtcgtcaactttttcaaggacaggctgtgggagctagtggacgccgagtggatggagtgcctccggcgggagcccgtcgagagcttgctcaagctgccatctggatgcgtccaggagcactggcctgctacactgcgagagtttgtgcttactgctaggtcgcttgtgattccacgggagcagaaggctccgcaatcgcttgtatctgacattcatgtagccccagttggcactgttctcgctcagggcatgaactcaaagaagaagcacgaaattgaaaatctagctgctgtggttcatgcaattgcaaagaggtgtggagccaagacagtggttgatgtaggttctggccagggttatctcgcacaggccttatcttttgagtaccaactccgtgttgtagcaatagatgcttcatcacaccatgcatcagttacaattgctcgtgcagaaagaataaagaagcactatgctgctaaatgtgtggagaagcaactgctcatggtacctagggcagtcacctgtcatgttctttctagtgacacattggcagcagtcacattagatgcatgtaaggatgacaatggagaacatgtgagagatactaaaacatctactaagaaaatcactcaaatccaggaatcaactcagggcacccctccattaatcctggctggtcttcatgcatgtggtgatctttcagttaacatgctaagagtttttgtgtcctgtgaacaagtaaaagcattggtaagcattggctgctgttacaacttgctttctgaggatacttatgaggacacagatacctgccctggttttcctatgagcaaggctgccaaacattctgaattggtacttgggaaaagcatccgtgaccttgcatgtcagagcgcagagagatggagaaatctcaccatggacattgcattgcaaaattttgatgtacatgccttccgagctgcatttcaaatggtacttgagaaatattttccagaagtgtcaaggttgagtccatcaattggaaggcaaggaaaagctcttcgacgtcagaggcttcgaaaagttgtggaatcacaaatgactacaaagaaaaatgatgatttctcctgttcaactttaaaggaacaaaacaagaacacaaacgatgttcatccagtcatacatgaagttgacacagggccagatgacatccatcagaacgcacatcaaaagttcatcctgttcaaagatttcacattatctggattaggtcgccttggctgtggctcagtggaagacacgagtcttcttgaaatatggaaggacgtgcaacccttctctgaatatataggtcccttttggtgccttcgagctgctttaggtccactggtggaaacatatattttacttgatcggttattgtatcttcaagagcgaagcaacctagttgaagcattgctgtttcctctgtttgatcctaccatttctccaaggaacatggccgtaattgcttggaagttatgtgcaaattcttcagaagcatgacatggtaaatcttctgatgataggatatgcagttgatgggatggtgtgttggtaccaaactataagccagactattgtcttatggcagaacttcttcgatttagatacagttattgtattgctgtcccttttagaagggcaggcctgatacagaggtgagagctgtctcactgaatcaccaggtcacggtttcgaagcagcctctccgcatttgcgtgggaggcttgcctcggtttatcccttatccaagcctctagcactgggtgtgctttattttaattgtattgctgtcctcccatataaaaaaaacctgaagatagtattgtctttgaaattgtgagggcaatgcatttccctttcaaatc

SEQ ID NO: 111475 - DNA, 546 bp, Zea Mays
tgaactatttacctgcaaacctactgtgacgtgtcataaaagaaataaaatctaaccacgttgactacttacatgcaaatctacaaaaaaaatcaaaccctgcaggatctctgatgtgatgccatgccatgccaccaatgtgggtaggctggctgaaagacggaccagcagaagaggttgacttggaatttattgagcatgtgccgccgcccacgtggtttcatttcatcagcatggtttgtggttccgggcttggcaccgtaaagaagaaaaaaaaaggagtttggtgaaatcactgccccaggaaaaccttccaggcgcaaaaatcctccatgttgaccgaccagccgtttatttgggcttattcaccactcgtggtcaagactcaataggaaggagggcatatgtgtcttcagaataattcctggaccaccggtagaccgataaaggccctgtactgaccgtgctctcaccatggtggtagctcatgagcaccaatctgtcatttgttctatcaactctgggcaatgattgattggttggttt

SEQ ID NO: 111476 - DNA, 1796 bp, Zea Mays
gttgcacacatatatgtattccagggaaatttcccttggtgtgtgccatatacatgcatgtggaggagacggggatggagagctgtgagctagtcccctttgtactacagaaagaaagtgcgtgctgcccttatttctggaatgaaaaggcagaatgggaagaggggggaaaaaggggatagatagatgtggaggttgagggagacccacaccaccatataaacccccctcttccaaactagtcacacatggcacaagcacacagctcatcagttcttcttcgtcgtcttggctagctgcctagctagctagctagttcctcactcctctccgagaaccccctttttcatctctctctctctctctctcggtctcgcccagctcctttcgatgttatcgtctctgctggcctcgcaactcgtcgagagagactcgtgaaaaagaatccagatatagctagagagaccgagagggcagctagcatgtcgatgagcttcttgagcatggtggaggcggagctgccgccggggttccggttccacccgagggacgacgagctcatctgcgactacctcgcgcccaagctcggcgccaagcccggcttctccggctgccgcccgcccatggtcgacgtcgacctcaacaaggtcgagccatgggacctccccgtggcggcgtcggtggggccgcgggagtggtacttcttcagcctcaaggaccgcaagtacgcgacggggcagcggacgaaccgggccacggtgtccgggtactggaaggcgacggggaaggaccgacccgtggtggcggcgcggcgaggcgcgctggtggggatgcgcaagacgctcgtgttctaccaggggagggcgcccaagggcaggaagacggagtgggtgatgcacgagtacaggatggagccagctgctcctcttcttgatcaccaaccctcctcatccaactccaaggatgaagattgggtgctgtgcagagtcatctgcaagaagaaactggcagcaggaggccgcgcaggagggggcagctcgaggagcctggtcgccagcaacggcggccgcgagaccgcgccagccaccccgccgccgccgccgctgccacctcgcatggacacggacgccaccctagcacagctccaggccgccatgcacgccaccgccggcgcgctcgagcaggtgccctgcttctccagcttcaacaacaacactgccagctctagagctgctgccgcagcagcagcagcgcagccatgctacctgcccagcatggccacaggcggcagccacggcacgacgagctactacctagaccacgcgatgctgccgcctgagctgggtggctgcttcgatcctctccacggcgacaagaagctgctcaaggcggtgctgggccagctcggcggcgacgcggtggcgccgggcctgagcctgcagcacgagatggccgcgggcgctgtcgtcgcttcatccgcttggatgaatcacttctaggggacattagttcagcagcgaacctaagtatgtgattggttgcgtatattatgggaaatacatacatatatacataattgtgtggtgaaacatttgtgtgtgaggcaaggagtagagcatgcgtcatttttttggttgctgccgatcgatttggacgaaggccatgaggcaaggagtagaactctgtaatataatgatggctgctcaagtgtgtgtacacattcagatgcagaggtcgtatgtcatgagcgatgatcaggagaatttcagattggttattttactgtgcctgaactc

SEQ ID NO: 111477 - DNA, 3181 bp, Zea Mays
cgaacacacccagtcagccgccaggccgccgctgtgccttccgccgtccgccgaggcaccgagccgctgtccctccccgtccgccgagccgttgcccctgtggctgtgctgtgcctccgttcgccggccgagccgctgtccgcctgtcactgtccctcagtccgccgagctgctgtgctttccggcttcgccgtccgccgaacaggttcgtccgcgagcgcgacgcgccgagcttccgccgtccgccgagcaggtccgtccgccaagccatacctaaatttttttccgtcctccgccactgagggcaggggagcggagagccgccgccatggcggaggaggcggaggggatggaccggttcgatatggagggggacttcgagggcgggcggttcggccgcgacggggagttttactaccggagccggcgggagcgggcgccgcagacccgggatgacgccatctacggggtcttcgcggagggcgactccgactacgattcggaggacgacgaaggtacccgccgccgccgccggaagcgccgcaaggacggcggcggggaggccgacctcaccaagcccgtccagttcgtctccaccggtaagttcatgcccacccaggagcccgagcctgaggagaggccggggctcgggcgcgccgccgccgctgctgccgataaggaggaggaggaggaggaggaggatcaggacgatgagggggacaccgagatgctgccggcgatgttcggcaagatcagggacggcgcgcgcgcgaggcgggaggagaaggagcgggagcgggagatggcggcccgtcggcgacaggcagcgggtctcggggccggggagccatccgccgctcctgggagcctggagtccaactccaaggtggccaagatgatgcggatgatggggtacaagaaaggcatgggccttggcaagaatcagcaggggatcactgcgccggttgagtccactctgcgacccaagaacgctggcctggggagcgttgaggggttcagggagcccaagatcatgtctgctaaggagaatgtgccagccccaccacctccaccggcatcagcgaagaagaagcgttggtccaagaaggctaccacaaagaaggctccaatcttgacgaaaaatgagctcctggctatgcgtgctgagcaggaacaggaggaacagcccgctgttgtccagaaggtgattgacatgcgagggccacaggcgcgggtgctgacagacttgaagggtctcaatgaagaacaagagatggaggcgaatgacgtgcccatgccagagctgcagtacaatgtccgcatgcttgttgatgaggctagggctgatattgtgaggttggacgcccagctgcggcgggagcaggagaaggtggctagcttggtgcgggagaaggaaaaagtggctaagcaagaggcatcgcagaaacgccagttgcttgtgatggagagaattgcagagacactggagaaggtccaggacgatgatgcatccggcatgctcactctggatgggttgattcagacattccacggattgaaggtgcagtttgaggaggagttcaagatgtgtagcatcgcatggattgcttgcagatacgctcatccgctcctaatccgcgtcttccaggggtggcagcccctgcatgatccaaaatttgggttagaagtcatgaaaaaatggaaggacctgctgcagggggaccaaccatatgacttctcagatagtgccgcatcaatgacaccatatgtgcagcttgttagtgaagtcatcctaccggctgtgaggatatcaggaaccaattcgtgggaggctagggaaccggaaccaatgctccactttcttgagttatgggataataagaagttgctgccgcctgttttgcttcaatcattactagagcatgtgatcatgccaaagctctcagctgccgtggattcttgggatcctcgcagggaaagcataccgatccatgtctgggtgcatccatggctgccaatgctaagggaaaggatagagaccttgtgccattctattcgatacaagttgagcactgtcctccatgtatggcaagcacatgatgcttcagcatatgcagtgttgtctccgtggaaagacgtgtttgattcggcaagctgggaagacctgattgtgcggtatatcattcctaaactgagattggcgttgcaagactttcagatcaacccagcaaaccagaagctcgatcagttcaactgggtgatgttgtggacatctgcaatcccagtacagctcatggtccatatgttggaagtcgatttcttcagcaagtggcagcaggttctttaccactggttgtgctcaccaaatcctgatttcaatgagataatgaactggtataagggatggaagggccttttcccaccagagttacttgccaatgagcgcatacggatgcttctaactgctggtcttgacatgatgaaccaagctgctgaaggacttgaggtggtgcaacctggggctagggagaatgtgggctacttgagggcaacggagaagcgacaatttgatgcagcacagcaagcttaccatgctgtgccaggagcagccatggcggatttgagcttcaaggagtctatacaggcatatgcaatggaacaaggtttgctatttatgcctagagttggcaagttctataatggcatgccagtgtatgagttcggcacagttagtatttgcatagactctgtgaagcgactactctatgcacaacttcaagagggaatcgacagatggagtcctgtaactcttacacaattgatggacatgaaccgaattggaagaccacactagtagatcgctcctagcctttgacttgcatgatgtttttactttcttccctgttgtgtaaaacttttcagagatgtcaattcattagctcttttgaacaatatctccgttaaagaagaaaggggttagatctatatctaaatgtgctggataatgttgtatgtctcattgtgctgctggtatttacggtggtgctgtcaatatgacgtggctctttggtaattttgatccgtaagatctgttgtaactgctgaaggacttatgctttatgcagttgctggcaatcctaattaacctgaacacttctggttgtacactgaaatgcttttg

SEQ ID NO: 111478 - DNA, 820 bp, Zea Mays
cgaacacacccagtcagccgccaggccgccgctgtgccttccgccgtccgccgaggcaccgagccgctgtccctccccgtccgccgagccgttgcccctgtggctgtgctgtgcctccgttcgccggccgagccgctgtccgcctgtcactgtccctcagtccgccgagctgctgtgctttccggcttcgccgtccgccgaacaggttcgtccgcgagcgcgacgcgccgagcttccgccgtccgccgagcagggtcatctgcacaccaacagggtctacgacaatgtctggaccttcattctaacagatgcaaccttcaagagcgctgagattcaagaaacactgagcaaggtgaatttgttgtcccctctaagctttgtttgtgtgaatctaaacaatcggccatgcaattgactagagtaccatggctgccaacatgttatccgtattgaatatggaatatggtttgctcttttctgttgatagtttcacatgaatgactagatgaaccgatcatttgacatgaattcttggtgccttacatagttgtgctttgctttaggtgaacaggtcaaactagaagtaatatagaagatagatgtgtaaattccttgttccatcctctgctactttgatgcagatgggtctcaatgccgtggtggccgcctgctacgtctttccattacttgtctttgtgctcacagtccgcttcttctacgtactgtggcacagtggccaaccagagtcaaggttgtgcgccaccagattgcgttgtctcattgtccttggctccggtgagtacgtattgcagtcttgcct

SEQ ID NO: 111479 - DNA, 909 bp, Zea Mays
gagaagcgacaatttgatgcagcacagcaagcttaccatgctgtgccaggagcagccatggcggatttgagcttcaaggagtctatacaggcatatgcaatggaacaagggtcatctgcacaccaacagggtctacgacaatgtctggaccttcattctaacagatgcaaccttcaagagcgctgagattcaagaaacactgagcaagatgggtctcaatgccgtggtggccgcctgctacgtctttccattacttgtctttgtgctcacagtccgcttcttctacgtactgtggcacagtggccaaccagagtcaaggttgtgcgccaccagattgcgttgtctcattgtccttggctccgaaaaggtccagattaccagctccgggtgatgctgatgagctatctgtcattgaagaccaaattgcatggatagttcacataattgcatccattgtcaagtaaggcaggtaacaggtgttaggaagagcccgtagagaggtcgaggagcagcactggctgtttctctggcattgatcaaggcgagcacatcaaggggtctcaggcacctccctctcattggtgtcgtcgttgaaccagttatggtacattggaatggctgcaaattgagggagaaagacctggaaacagtgatgcagcatgttcacacgaagatggcaacaatggtaacatttgcattggtcctgtaaataaggtattgaatatgcttgcttgatggattgaagatccaaattcgaatataacttcataagttcatatcccacgagtctaattacttgtggcttgctgaagatggcatgaagatgcaggtgattattgcttgttctgtggcttatttccttttacttagttaacttcctattaggcagctactgcaccagcaaacctg

SEQ ID NO: 111480 - DNA, 310 bp, Zea Mays
gttcacaaagaccacaagttcacaattcatgacataacaagttcacaaggatcataaatttataatataaaaagtttacaatgatcacaagttcacaatataacaagttcacagtataacaagttcataaagatcacaacttcagaattcacaatatacactcgatctagctgacatgacatgcttacttatgaaatatttttttcctcacataaagagtttttcacaacctcacaggaaaaccctaaaacctagtgtgtggaaaagaccaaatcgttaatctcaaatgccttccaacaccatctatccc

SEQ ID NO: 111481 - DNA, 272 bp, Zea Mays
tttcattgttatactaccatgtccgtgcacacaattatatttgatacccataaaaaaatatatgttctatacacatttggatcttctatacacatttagatctcgagatgtcccattccctccatcaacaaaaaaagtccaagaaattttgtttgaggcctaaatgaccttagaacaaatgtctacattctgacaaatattttttaagaccaaatattttttaagatcctggaacatattcgatctttaaaaagaaccacagattccaatct

SEQ ID NO: 111482 - DNA, 98 bp, Zea Mays
atgtagttcaaatttcaggtcaatttaaatgcacaaaccaaaatctcggcatggatgcaaagtttcttttacttctttatttattgcttactttaata

SEQ ID NO: 111483 - DNA, 881 bp, Zea Mays
aggatgtccataattctatagctgttattagttataggtctatcgtgagtccttgtcgccaaagccaccaaaactacctgagcgagaactaccaaaaccgccaccgaaacgacctgaaccagaatcactgaatcctccaccgctgccaccagaccggccaaatcctgagtcactgaatcctccgccaccacctgacctgccaaatcctgagtcaccaaaccctccacccccggagcggccaaatcccgagtcaccaaatccaccacttgagcggccaaacccagaattgccaaatcctccaccgcctgatcggccaaaaccaccaccaccgccacgtccaccaaagccccctcgtgagcgcccatagtttgagccaccatacccaccacctccacccccgaaggagtcaaatccaccacccagcaagtcggatccctcaacattaatttttggaagctgcaaggcaaacgaaaaccaagtgaacataatgcagtgggaacagcccaaaaaaagcaatgtacaacacaaaccacaagcccccacctccgtaaacttgcatcctacgtcacgttcaatgacccgcacagctctactttgttcatagttgtacatcacaattgcagtgcccttcttcccagcacggccagttcggccagatctgtgaacgaatatctctgacgaatttggcaattcgaaatgtatcacctgaacaaggagaaccgcatgagggtacacaacagatgatgcacatggtgattgcaacaaaaaataatggagatagcttagagaaggggaagcacaaaccagatctacatttgggatatccaatccacgagaagcgacatcagtagcaatcaatatattaaaccgcccatcccgaa

SEQ ID NO: 111484 - DNA, 882 bp, Zea Mays
aggatgtccataattctatagctgttattagttataggtctatcgtgagtccttgtcgccaaagccaccaaaactacctgagcgagaactaccaaaaccgccaccgaaacgacctgaaccagaatcactgaatcctccaccgctgccaccagaccggccaaatcctgagtcactgaatcctccgccaccacctgacctgccaaatcctgagtcaccaaaccctccacccccggagcggccaaatcccgagtcaccaaatccaccacttgagcggccaaacccagaattgccaaatcctccaccgcctgatcggccaaaaccaccaccaccgccacgtccaccaaagccccctcgtgagcgcccatagtttgagccaccatacccaccacctccacccccgaaggagtcaaatccaccacccagcaagtcggatccctcaacattaatttttggaagctgcaaggcaaacgaaaaccaagtgaacataatgcagtgggaacagcccaaaaaaagcaatgtacaacacaaaccacaagcccccacctccgtaaacttgcatcctacgtcacgttcaatgacccgcacagctctactttgttcatagttgtacatcacaattgcagtgcccttcttcccagcacggccagttcggccagatctgtgaacgaatatctctgacgaatttggcaattcgaaatgtatcacctgaacaaggagaaccgcatgagggtacacaacagatgatgcacatggtgattgcaacaaaaaataatggagatagcttagagaaggggaagcacaaaccagatctacatttgggatatccaatccacgagaagcgacatcagtagcaatcaatatattaaaccgcccatcccgaaa

SEQ ID NO: 111485 - DNA, 277 bp, Zea Mays
ccgccacgacgccgccgggccgcttctcgccgcccccacgccgccaccacgccgtcgggccgcttcccgccgcccccacgccgccaccacgccgccgggcgccgcgccccgcccccacgccgccgggccgcgccccgccgcgcccacgccgccaagcgccgccgcccacactgccaccaagcgccgccgcccccctgccaccaagcgccaccgcccctgcagtgccatctacgccactccccgctccggccatcgacatcttccctgcgcagaccga

SEQ ID NO: 111486 - DNA, 1991 bp, Zea Mays
aaaggctcgccgaacgagtagacgagcactggtcaaaagcctaaacgagcagccgggtactgcagtgcagcagtggagtggcaaaagcccaaatccaatcgcatatcccaccaggccccaagatcaaatccacccagttcatcactttctctcccgtacgtaaaagcgaaaaaccctcccaaaaagcaaattccgcaggtgcccaggggcctaaatttagcagcagctgctcctcatgctcccccacggaggctattggatcggaggggagggcgggaggaggaggacgggacagaaataggcgggcggctggagagagattggcggaggagtccaggagggtgcgcgcacaagcaaggcaggaccggaggaaacgaggagcggaggtcagggttaaatgagacaggactgggggaggagcaggagggagcggaggcgcgtcaggttgtccagagatgggaggagctccccggcgtccccgccttctactcctctcggctcgttgagattacattcagattcggatttttgccacaccctcggcaagatagagaatctggagcactcttgaatgctaatcagacaccctgcccatttctttctctgtcttagacacaaggccttctcatggccagagacttgcctcatctgcccgtaactagacggaaaatcctgcaattcaagttcctgataccgtttgttcttgttctttctgtgtctgttattgctgtcacccagtacttccaaagtatctcctaccttctacgcccactgtgggacacgccgcctaaaccattcacccgcatcccacactactatgcacccaacatctccatggcccagctgtgccaactccatggctgggacatcctccccgcccctcgccgcgtcttcgacgctgtcctcttcagcaacgagcttgatattctagaaatccgctaccacgagctccttccacatgttgacaggtttgtcatccttgaggccaattccaccttcaccggcatccccaagtcactctccttttacgaaaacttcagccgttttgggtttgctggatcaaagattgtctacgacatgctttctattggagagctggataccggttctcgtcgccaaccattccatgtcgaggcctatcaccgtcgctcactcaatatgctgatacgaagatcgggtattgctgccggtgatatcctgatcatggctgatgctgacgagatccctacccccgagaccgtgcagttgctcaagtggtgcgacgggataccaccggtaatgcaccttgggatgaagaactatatgtactccttcgaatttcctgtggacgacaacagctggagggcgacggcacacgtgtacaacgagcacacatcgtaccgccattcccgccagagcaacttcatcctggccgacgccggctggcactgcagcttctgcttcagggagatcaaggagtttgttttcaagatgaaggcgtacagccatgcagaccgagtgaagcagaaaagcttcctgaacccagacagaatccagaagatcatatgcaacggggacgacctgttcgacatgctgcctgaagagtacacattcgccgacctcttcaagaagatggggccgatacccaagtcagggtccgccgtgcatctgccttcccatctgatcaagaatgcagacaagttcaggttcttgcttcccggtgggtgcttgagatcggagtagatcagagattagctttttttttgttagccgacagtatttcttttagctgcaatactgttgttcctggagaaacgatttcttttgggagtttcgtatgatatggtattgttactttttagatagggtgctaggagctgttttggtgtgggcttgaggaagttttcatgttgtatctgtagcggtgggcttatcagcccctgaatttacagcaagtaacgtacaggtcaaattgctatagtaaattggtaccttttgggtgcatcctgatc

SEQ ID NO: 111487 - DNA, 2349 bp, Zea Mays
cggtcggaaagctggggcctattctttaggattaggaggagccgtatgaagcaagcttggttcctctagattcagtttggtggcaatccgtgccggcggcagagcgcggcagctggttttttcgttagattcctcccaccttgtttgcattgcccctgacgcgtgcagtaatgcttacctagccttccgatcgttcagctcaagagaagaatgagagatccgttcttcagtggggagatatccaatcatcgatatgcgctccaaaatgtggcagattggtgaagacaaatgccgtgtttggatttagcctaggcgatgatttggttcgggtagcacagggttgcctgcttgctttgtgctgctggaacggaaatgcgtttttcgtagtggtccgttgatctttcaccagtgtacatgtacggcccatctcgctaggcctgattgctgatttcccttaattatttatttatgctgttggaattggaacctgggagtactcagaagtaaggacaatcacatggctaggtcatggcttgtgttagggatttttgtggttctctgataaactttgctggccttagtgcatgctgttcttttgtatcctttattattggaatgattggtagaacggtagtggaccatttgtcttagtgtgtatcaatccatggttccgtgttgtactctccttttagatgtttattaaagaacatgtcagttgtattgcaaatttacaagcgcgcatgaacctgtctgtaactcatatcattattcctgtatatgcatagtttaataatctgcatagttcagttcttatgccactactgctatttttcttattattttctgccttctcttgcaaaatgcagattacattcagattcggatttttgccacaccctcggcaagatagagaatctggagcactcttgaatgctaatcagacaccctgcccatttctttctctgtcttagacacaaggccttctcatggccagagacttgcctcatctgcccgtaactagacggaaaatcctgcaattcaagttcctgataccgtttgttcttgttctttctgtgtctgttattgctgtcacccagtacttccaaagtatctcctaccttctacgcccactgtgggacacgccgcctaaaccattcacccgcatcccacactactatgcacccaacatctccatggcccagctgtgccaactccatggctgggacatcctccccgcccctcgccgcgtcttcgacgctgtcctcttcagcaacgagcttgatattctagaaatccgctaccacgagctccttccacatgttgacaggtttgtcatccttgaggccaattccaccttcaccggcatccccaagtcactctccttttacgaaaacttcagccgttttgggtttgctggatcaaagattgtctacgacatgctttctattggagagctggataccggttctcgtcgccaaccattccatgtcgaggcctatcaccgtcgctcactcaatatgctgatacgaagatcgggtattgctgccggtgatatcctgatcatggctgatgctgacgagatccctacccccgagaccgtgcagttgctcaagtggtgcgacgggataccaccggtaatgcaccttgggatgaagaactatatgtactccttcgaatttcctgtggacgacaacagctggagggcgacggcacacgtgtacaacgagcacacatcgtaccgccattcccgccagagcaacttcatcctggccgacgccggctggcactgcagcttctgcttcagggagatcaaggagtttgttttcaagatgaaggcgtacagccatgcagaccgagtgaagcagaaaagcttcctgaacccagacagaatccagaagatcatatgcaacggggacgacctgttcgacatgctgcctgaagagtacacattcgccgacctcttcaagaagatggggccgatacccaagtcagggtccgccgtgcatctgccttcccatctgatcaagaatgcagacaagttcaggttcttgcttcccggtgggtgcttgagatcggagtagatcagagattagctttttttttgttagccgacagtatttcttttagctgcaatactgttgttcctggagaaacgatttcttttgggagtttcgtatgatatggtattgttactttttagatagggtgctaggagctgttttggtgtgggcttgaggaagttttcatgttgtatctgtagcggtgggcttatcagcccctgaatttacagcaagtaacgtacaggtcaaattgctatagtaaattggtaccttttgggtgcatcctgat

SEQ ID NO: 111488 - DNA, 246 bp, Zea Mays
gaatgccgccatgaaattgatcaatcctacatggaaggacgatatttatatgtggcgtcgtatagtaccatcatgggttccaaaaatattaaactgataatttcttataccttgaagacaactaaataattttggatatatatacgtaagaacgagttattttaatttgtagggatttgacaggctttcatgttatcaattttatgcactcgtggaatagtaaaaggttaccctgcattttcatta

SEQ ID NO: 111489 - DNA, 215 bp, Zea Mays
tgacagacgtacaaatctggtatttacgaacataaatgatttgatttttatgataattacgaacaacataaatcaagaaattgtctttccaatgtgcatgcaaaaaatatgcatgcagtaaactaatatacgaactccgtgttcaagcataaaatcgtacagtttttagcgtaaataatatatgtggtaggcataaaacacaataaccgaaaaga

SEQ ID NO: 111490 - DNA, 2109 bp, Zea Mays
tcactgtaccatgccactccaccgttccgacatccaaggctccaagtataaaccccgcggctgcaaaccctagccgcccgatgctcttcgtcccgcgccaagtcgtactcgccgcctcatcacagccccgcgccgccgcctcttccgccatggccaaggaggaatccaagaaggagaagaagaaggccaaggccaaggtggccaatggagccgccgccgccgccgccgccccggtccctggcgcgagggccgcggtggtcgcctccgtcgccgccttcctcgagtccgctgggctctcgcgcacgctcgtcgccctccaatccgaggccggcctcgaggccggtgcgtgggggtcgtcacaggtgaacttggaggagctggttgccagattcttagagtcgagcaattcaactcgggcggctgccattctgggaagcgatgagcaagacaaggaaaatgatgatatagcaggagaagttggcaaggaaaaaaagaggagcggcacagaagccggtgagcctgagagcaaggcgatcgagcctttagctgaggaaaagccgactgaaaatatggacggtgaggctaaagagaagaaacaaaagaagaagaaagacaagggtgacccttcagctgcgaatgctgctagcgagggaacaactgaaattgtgaagaacgccgaccagaaggacgatgaggccaaggagaagaaacagaagaagaagaaggacaagggtgacccctcagctgcgggcgctggcagcggcgaaacaactgaaacagtgaaggaggatgatcataagcttgatggcaagaagaagaagaaaaacaagaagcagggaaaggatgatgatgtcgaagctaggctggaaaaggcagaattagcaatacttaacaagtttgaggcagcagaaaagctcaatggaagagaggtagaaccaaaaggtcagaatgacagtgctgatgactgcagtggtgctgtggaaaggaaaaagaagaagaaagagaaatcatctgccgggacttcagagaagactgatgcaggaagtgcacctgctgaggctgatggtgccaagggaaagaatggtgctgtagaaacagtcaaggatgataatgagaaaaaggccaaaaaaaagcggaagaagtctaaccctgaagaaactgttcaggtggaaggtaaagaggctgcagggaaagattcagtcccaaaacaagatgatgcgaacaagagtgtaatggagattgaagaaggtaaccaagggaagtcgtcaaatgaaaatgcagttgctggcaaaaaacggaagctagaagaagttgaaggaagcattccccctgtgactgggaaagaagattgcacagccaacgaaagtctaagcaatggttttgcagaggataaaaaagaagaaagcaacacaaaaccaagcaaaaggcagaaacattcatctgagcccaagactgtgaccccatttcaacgtattaaggtggacgacgtcagatttgcagatgacaggcttcaggataactcgtattgggctaagggtggcgcagacaccggttacggcgcaaaggcacaggagatccttggccaagtcaagggaagggggtttaggcacgagaaaaccaagaagaagcgtggcacctacaggggcgggcaaatcgacctgcaaacccactcgatcaagttcgagaattcagacgacgagtgaaatggtgagacctgggcttccccataagatggaagcctatacagtgttttagcagttgacccatttctaccgccgttattgcctgatcaggcctggtgctggtgggaagaagcgatgcgatggatggtgcatgcaatacaacacggtaccagctggattaaatcagttgcggtgtgccattatttgttagattgagcgacgtgagaaatcgtcgaaattttgtttgcttgttgggctcactgatttgctgattttgctacagcttatgcgacgttaacgttgctactctgcgtgttatgagtttgcccgtgctcttgattcctttcgaaatgactaccttggagccgctgatggaagtgcagtgagctaggcccagcgtagaactgggctctttctatcgacccac

SEQ ID NO: 111491 - DNA, 1858 bp, Zea Mays
cgcggctgcaaaccctagccgcccgatgctcttcgtcccgcgccaagtcgtactcgccgcctcatcacagccccgcgccgccgcctcttccgccatggccaaggaggaatccaagaaggagaagaagaaggccaaggccaaggtggccaatggagccgccgccgccgccgccgccccggtccctggcgcgagggccgcggtggtcgcctccgtcgccgccttcctcgagtccgctgggctctcgcgcacgctcgtcgccctccaatccgaggccggcctcgaggccggtgcgtgggggtcgtcacaggtgaacttggaggagctggttgccagattcttagagtcgagcaattcaactcgggcggctgccattctgggaagcgatgagcaagacaaggaaaatgatgatatagcaggagaagttggcaaggaaaaaaagaggagcggcacagaagccggtgagcctgagagcaaggcgatcgagcctttagctgaggaaaagccgactgaaaatatggacggtgaggctaaagagaagaaacaaaagaagaagaaagacaagggtgacccttcagctgcgaatgctgctagcgagggaacaactgaaattgtgaagaacgccgaccagaaggacgatgaggccaaggagaagaaacagaagaagaagaaggacaagggtgacccctcagctgcgggcgctggcagcggcgaaacaactgaaacagtgaaggaggatgatcataagcttgatggcaagaagaagaagaaaaacaagaagcagggaaaggatgatgatgtcgaagctaggctggaaaaggcagaattagcaatacttaacaagtttgaggcagcagaaaagctcaatggaagagaggtagaaccaaaaggtcagaatgacagtgctgatgactgcagtggtgctgtggaaaggaaaaagaagaagaaagagaaatcatctgccgggacttcagagaagactgatgcaggaagtgcacctgctgaggctgatggtgccaagggaaagaatggtgctgtagaaacagtcaaggatgataatgagaaaaaggccaaaaaaaagcggaagaagtctaaccctgaagaaactgttcaggtggaaggtaaagaggctgcagggaaagattcagtcccaaaacaagatgatgcgaacaagagtgtaatggagattgaagaaggtaaccaagggaagtcgtcaaatgaaaatgcagttgctggcaaaaaacggaagctagaagaagttgaaggaagcattccccctgtgactgggaaagaagattgcacagccaacgaaagtctaagcaatggttttgcagaggataaaaaagaagaaagcaacacaaaaccaagcaaaaggcagaaacattcatctgagcccaagactgtgaccccatttcaacgtattaaggtggacgacgtcagatttgcagatgacaggcttcaggataactcgtattgggctaagggtggcgcagacaccggttacggcgcaaaggcacaggagatccttggccaagtcaagggaagggggtttaggcacgagaaaaccaagaagaagcgtggcacctacaggggcgggcaaatcgacctgcaaacccactcgatcaagttcgagaattcagacgacgagtgaaatggcctggtgctggtgggaagaagcgatgcgatggatggtgcatgcaatacaacacggtaccagctggattaaatcagttgcggtgtgccattatttgttagattgagcgacgtgagaaatcgtcgaaattttgtttgcttgttgggctcactgatttgctgattttgctacagcttatgcgacgttaacgttgctactctgcgtgtt

SEQ ID NO: 111492 - DNA, 1463 bp, Zea Mays
gctttgcatgtccccacccaacccaaagttcattttcgtttttaagctgcgctagtagctgctgctggtggttcgaagttcattcagagagagcgcgagagggggtgtggctgtctatggcgtacgagaggatacacgaagctcctcagatggtggccatctcgccaaccaggctcaggatgaagctgctgggctccaatcacaaggacgaccccactcgcaagacgctgcaggcgtcgaggctcgacgacgatgaccaccccaacaacagcctcctgccgcaagagctcgacgaagagtaccccaaggaccaccgctccgactcttcccggtcgcggtccgacgccagccacgacaggatcagtggcagcgacgacgacagcggcaccaactttgagttctgcaaggacgagagggcggccctgccggcttcggcggcgcccggaccgttcttccggcagcaggtgccgtccaagtggaacgacgcggagaagtggatcgcggggcgccaccaccgccacgtcgtgcactccaaccctgtcttctccaagaagcccgcggcgggcgcgcccaccgagctgtcgtctaataggtcctcgcacaagaagccccgcttctcgccggcggccgtgtcgacgcgggacgtcgggacggagatgacgcccgccgcgagccaggagcagtcgcgcagcggcacccccgccggcgccgccacgccggcgctcagcccgctctgctcggcgccgtccagcccgcggcgcggcggctcctcgtccgtgccggagcgggagctccggctccggacgcggcgggagatcgctgcgctcggcctgcagctcggcaagatgagcatcgcgtcgtgggccagcaaggaggagggtctcctcgccgccgcgtcgccggagaaggacaagcgctacgcggccgtcgacacggtggtcaggagcaaggcgttcgaagctcgcgccgccgcgtgggaggagtccaacaagtgtaaactcgcggcaagataccagaggaaagaggcgaagatagagggatgggaaagcttgcagaaatgcaagttcgaagccaagctgaggcaggccgaggcacgggctgagcagatgaaagcccgggcgaagcaggacctggcgaagaggctgtcagcgctgagccacaaggtggaggggaagcaggcgagggtggaggcgcgccggggccggcaggcgtcccggctggcgcggcaggtggagcgcatccgcgagaccggccgtgtgccgtgccggctccggcggtgctgcgcctggttcctgtagtgtagtgtagctagcatgctcccaatcgtcggaacaagtgctgatggcagtatgtcatggcatgggctgcttgatttgtaactacatgaaaattcatcgctggttcatgttcgtcccaatgccagggcagtggttggccccaaaaaccccaaatgtggtttggat

SEQ ID NO: 111493 - DNA, 116 bp, Zea Mays
tttttttgttttggacaggactgcaattcattggtaggaatttctctgttgcagtgtacgaacaagtcaattctcctataggtttcaacatcacctttactggtttgcttagcctc

SEQ ID NO: 111494 - DNA, 1591 bp, Zea Mays
cactttcccttctgtctggctccgcatcccagtcccagacccggcaagcgccggccatcgccatttcggatccgggcccgctcagcgcgcgggttcccgaacccggccggccggccgcgctcctcgccaccgccgccgccggccatgaagcgcgcgcgcagctccgaggtattcatcggcgtaggccggctgcgcgcacgcaggggcctggcgccgcttctcgcagcggcggctttcgcctacctactgttcgtgtccgtcaagctcacttacctcggcagcgctgggcccgcgcctgccgtcggccgcctggccaccaccggcgcgggcgagccagctgcgcgcgcgcgctcgagcggcggcggggccgtgtccgggtacggccgcatcaccggcgagatcctccggcggcacgaagccttcgaggagcggcggaagcggtgggggcagctggggaacttcacggagctcgagcgcgtggcggccgaagcgtgggcgctcggggccgccgcgtgggaggaggcctctgcgttcgacggcgacgtcgactacatcgcctcccgcgacgtcgccggggagggcacggccaagtgcccaggctcgctcgcgctcggcgccggggagaccacggcgttcctgccgtgcgggctggccgccgggtcggcagttaccgtggttgggacagcgcggacggcgcggccggagtacgtcgaggcgctggagcggagcggcacgggcaacgggacggtgctggtggcgcagttcgcggtggagctgcgcggcctgcgcgctaccgacggcgaggagccgcctaggatactgcacctcaacccgcgcctgcgcggcgactggagcagccgccccgtgctagagatgaacacctgcttccgaatgcagtggggcagggcacagcgctgcgacagtaccccttccggagacgatgacctggtcgatggactaagaaaatgtgagaaatgggactggcaggacgtagttgaatcgaaagaaacaaagacaagctcatggttcaacagattcatcgggcgagcaaagaaaccagaaatgagatggccattcccattttcagaggggaagatgtttgttctcactatccaagctggagtcgaaggataccatatcaatgtgggaggccgccacgttgcctcatttcctcataggatgggattcgccctcgaagacgcaacaggtttagccgtgacagggggcatagatgttcactctgtgtacgcaacagcgcttccaaaggcacatcctagcttttctctccagcaagtcttggaaatgtctgaaaggtggaaggctcgccctgtgccagaggaaccaatccatcttttcatcttcaattcttcactgaggtgaatgctggcatgaggatagaaggggagggggcgtgaattcacattggctgtttgtacaggccgccggcctatttgtagaactgcaaatccgtacccactggaacgggaaattgtctcccctgtgtggctgtgtatgcagatctgtgtgtactattcgtgcgaatcggtggtgtatgtgtatttgacatccaacaaagttaacttagacggca

SEQ ID NO: 111495 - DNA, 2550 bp, Zea Mays
cactttcccttctgtctggctccgcatcccagtcccagacccggcaagcgccggccatcgccatttcggatccgggcccgctcagcgcgcgggttcccgaacccggccggccggccgcgctcctcgccaccgccgccgccggccatgaagcgcgcgcgcagctccgaggtattcatcggcgtaggccggctgcgcgcacgcaggggcctggcgccgcttctcgcagcggcggctttcgcctacctactgttcgtgtccgtcaagctcacttacctcggcagcgctgggcccgcgcctgccgtcggccgcctggccaccaccggcgcgggcgagccagctgcgcgcgcgcgctcgagcggcggcggggccgtgtccgggtacggccgcatcaccggcgagatcctccggcggcacgaagccttcgaggagcggcggaagcggtgggggcagctggggaacttcacggagctcgagcgcgtggcggccgaagcgtgggcgctcggggccgccgcgtgggaggaggcctctgcgttcgacggcgacgtcgactacatcgcctcccgcgacgtcgccggggagggcacggccaagtgcccaggctcgctcgcgctcggcgccggggagaccacggcgttcctgccgtgcgggctggccgccgggtcggcagttaccgtggttgggacagcgcggacggcgcggccggagtacgtcgaggcgctggagcggagcggcacgggcaacgggacggtgctggtggcgcagttcgcggtggagctgcgcggcctgcgcgctaccgacggcgaggagccgcctaggatactgcacctcaacccgcgcctgcgcggcgactggagcagccgccccgtgctagagatgaacacctgcttccgaatgcagtggggcagggcacagcgctgcgacagtaccccttccggagacgatgacctggtcgatggactaagaaaatgtgagaaatgggactggcaggacgtagttgaatcgaaagaaacaaagacaagctcatggttcaacagattcatcgggcgagcaaagaaaccagaaatgagatggccattcccattttcagaggggaagatgtttgttctcactatccaagctggagtcgaaggataccatatcaatgtgggaggccgccacgttgcctcatttcctcataggatgggattcgccctcgaagacgcaacaggtttagccgtgacagggggcatagatgttcactctgtgtacgcaacagcgcttccaaaggcacatcctagcttttctctccagcaagtcttggaaatgtctgaaaggtggaaggctcgccctgtgccagaggaaccaatccatcttttcatcggcatcctctccgccacaaaccatttcgccgagcgcatggctattaggaaaacttggatgcagtttccggctatccaatcggggaatgcggttgctcggttctttgttgcgctgagccacagaaaggagataaatgcagcactgaagaaggaagcagagtattttggagacatagtcattctgccgttcatcgaccggtatgagctagtggttctgaaaacggttgcgatatgtcaatacggggtgcacaatgtcactgcagattacatcatgaagtgcgacgatgacacctttgtgcggctggatatagtactgcaccaaatcagtacctacaacaaaacctcacctctgtatctgggcaacctgaatctcttgcacaggcctctaagaaggggcaaatgggccgtcacctacgaggaatggccagaagcggtgtatcccccgtacgccaatggacctgggtacgttatctcggccggcattgcgagagacgtagcatcccggcatacaaaccactccctacggctgttcaagatggaggacgtgagcatgggcatgtgggtggaggactacaacgccagcgcccccgtgcagtatgtccacagctggaggttctgccagttcggctgcgtggacaactacttcacggcgcactaccagtcccccaggcagatgctgtgcctctgggagaagctgtcagcggggagagcgcactgctgtaactacagataacacgaggcccccagcccccaggggggaaatggtgacctagccgcctaggtgcatcaaggctcatgaccttcgttccattcgcctggcttcggtggttcggttccatacgaccatctgctcagatgactaatgccagaaaccatgatctcgacaccgcatgttctttggttcttagattgaaggtatacgggataagggtgttaccaactgctgcttcatcttcaattcttcactgaggtgaatgctggcatgaggatagaaggggagggggcgtgaattcacattggctgtttgtacaggccgccggcctatttgtagaactgcaaatccgtacccactggaacgggaaattgtctcccctgtgtggctgtgtatgcagatctgtgtgtactattcgtgcgaatcggtggtgtatgtgtatttgacatccaacaaagttaacttagacggcacggattc

SEQ ID NO: 111496 - DNA, 3459 bp, Zea Mays
atgaagcgcgcgcgcagctccgaggtattcatcggcgtaggccggctgcgcgcacgcaggggcctggcgccgcttctcgcagcggcggctttcgcctacctactgttcgtgtccgtcaagctcacttacctcggcagcgctgggcccgcgcctgccgtcggccgcctggccaccaccggcgcgggcgagccagctgcgcgcgcgcgctcgagcggcggcggggccgtgtccgggtacggccgcatcaccggcgagatcctccggcggcacgaagccttcgaggagcggcggaagcggtgggggcagctggggaacttcacggagctcgagcgcgtggcggccgaagcgtgggcgctcggggccgccgcgtgggaggaggcctctgcgttcgacggcgacgtcgactacatcgcctcccgcgacgtcgccggggagggcacggccaagtgcccaggctcgctcgcgctcggcgccggggagaccacggcgttcctgccgtgcgggctggccgccgggtcggcagttaccgtggttgggacagcgcggacggcgcggccggagtacgtcgaggcgctggagcggagcggcacgggcaacgggacggtgctggtggcgcagttcgcggtggagctgcgcggcctgcgcgctaccgacggcgaggagccgcctaggatactgcacctcaacccgcgcctgcgcggcgactggagcagccgccccgtgctagagatgaacacctgcttccgaatgcagtggggcagggcacagcgctgcgacagtaccccttccggagacgatgacctggatatttgtatttgttcttgtgcatccagtattgtttgtggcggttggttgaagtataagggattcgccctcgaagacgcaacaggtttagccgtgacagggggcatagatgttcactctgtgtacgcaacagcgcttccaaaggcacatcctagcttttctctccagcaagtcttggaaatgtctgaaaggtggaaggctcgccctgtgccagaggaaccaatccatcttttcatcggcatcctctccgccacaaaccatttcgccgagcgcatggctattaggaaaacttggatgcagtttccggctatccaatcggggaatgcggttgctcggttctttgttgcgctgagccacagaaaggagataaatgcagcactgaagaaggaagcagagtattttggagacatagtcattctgccgttcatcgaccggtatgagctagtggttctgaaaacggttgcgatatgtcaatacggggtgcacaatgtcactgcagattacatcatgaagtgcgacgatgacacctttgtgcggctggatatagtactgcaccaaatcagtacctacaacaaaacctcacctctgtatctgggcaacctgaatctcttgcacaggcctctaagaaggggcaaatgggccgtcacctacgaggaatggccagaagcggtgtatcccccgtacgccaatggacctgggtacgttatctcggccggcattgcgagagacgtagcatcccggcatacaaaccactccctacggctgttcaagatggaggacgtgagcatgggcatgtgggtggaggactacaacgccagcgcccccgtgcagtatgtccacagctggaggttctgccagttcggctgcgtggacaactacttcacggcgcactaccagtcccccaggcagatgctgtgcctctgggagaagctgtcagcggggagagcgcactgcttcggcgcacagcgcacagctgctggaccagtggaccggcgggacaaggaaacccgcgcggtatccggtggttttgccaagaccctcccccgtttacaagccagaaggcaagctataggcgaaacttcgggggtcgtcgagggttctcgaccctcccttcccctctctcgcccgctcgctccctcaccgccggcgttctcgccgccagctacggacggggcacactgcgcagggtcccagccccgcctctcacccgaacgtcttcgctcccctcaccgggtaggcgtcgcgctctactggcaccaccccggccctcgcgctctactggcaccggaccggcgcggggtggcgcggagacctgtcccggccaggagaccgttccgtgctataccggtgaagatgctctttgcatagctcaagctccaaactgatggattctgatgacaagaagtttggaaatgggccaagggagcttactggtgctgttgatttgattaaccactacaaactgctgccacaccatgatttcttttgcaagaaacctttgccactggcaatatcagatacacattatcttcacaatattgtgggagacactgaaattcgaaaaggagaaggaatggagttagatcaacttgttcagaatgcatatatgagggataaacctgcttatattcagcccttcgatatggaaacactggggcaagcgttccaacttcgagaaacagctcctgtggttttgccctctactgaaaagggtataccgactatttcgggtaaaccaaaaagcgagtccaaggacaaagagaagaagcataaaaagcacaaagacagagagagggacaaagacaaggaacataagaagcacaaacatcggcataaggatcggagtaaggacaaagataaagacaaagacaaggataagaaaaaagataagagtggtcatcatgattctgattcaaagaaacatcatgaaaagaagaggaagcacgagggaactgaagattcagcagatgtgcataagcacaagaagagtaagcacaagagttccaaaaccgatgagatggggaatggacttattagttaacacttcctagttctagcttcaatccttgtaatttgctgttaaaaggagactgatggtctctgccatcaaaaccctgtgcagaatagtgatgacaacataagttggagatcttgataagaacgcgataaagaagtatttttgcagagtccattccgaggaaaattaaattacttaatacaggactaatccttcgaactgtgcaaccttctgttcctccctgacgaattggttgtaggagcggttgaaaggatatgccatgagattgtttcgattgcagggccagcgcacttattgatactaggcttcttatttaactcctaatttcggatgtagcgtgcatgagtatcctgttgagtagctgtggatggttttacagttggtctagagatgtagttgagggcagggaattggaaagaatttcgtgttcccgtcgtactgaccttggttgatagagagtttaaccagtagctaaaattaaatgttgctagtcagttccaagttttattctgcgtggaatgaattggagtcaaattagcacactgcttatttaaccatgataaagatcttgttattacaaagtataattattggttcgtggtcggaccttttgcgtg

SEQ ID NO: 111497 - DNA, 2598 bp, Zea Mays
catcgtgctgcggtgtccgagtcacatcgtcttcccggaaccaacaagtcgttgggtctgaccgtctgccgtggccgtaccgggccgccctgttcatcgggtcaaatccttcgtcttcttcctcgtcgcatcctctccacctaatccacaatccggaacctcaccgtggagaaccccagatcaaaccctttccccgcccattccccttcgcacttccactctcccagtcctccggtgcgattcgtttcttccttacttccctgcccgcccgagggagaagacgaaatcgggcgaggaatccggccgccagggtttcttgatccgggcgcgtgattcgtcgtgcccaggcaccagtgagaaatcaaatcaagaacacgccagcggaagtgagacgagggcgcggggaggaatcaagatcgcttctttgagctgccagttcccccgcgccaatgccggatccggccggcggcgccgggctggcatgttccctctaactgcccctgtccgccgccgcggctcccgatgctcgtgtggtcttcgggagcaggagagggagcagcggccgtcgtgggcggcggctaggagcgaagatgcagatccggctgtcgccgagcatgaggagcatcaccatctccactagccatggcctgctagacttgatgaggctcaaggtcgccgcgcgacacttttcctaccgcaccgtcttccacaccgtcctcatcctcgccttcctcctgcccttcgtcttcatactcaccgccatcatgacgctagagggcttcaacaagtgctcctcactagattgtctaggaagacgtttaggtccgcgccttcttggtaggggaaacgatggttccatgaggcttgtgagggatttatatgtgatgcttgataaagtaaattctgaggaagcacctcttgacttgaaggttccagaaacttttgatgaatttatctgggacatgaagaataatgattatgatttaaggtcatttgcttttaagctgaaggctacgatggagagcatggataaggaattgaggtcatcaaggctatcagagcagttgaacaagcactatgctgcaattgctattcctaaaggcctttattgcctttcattgcgtttaactgatgaatactcctcaaatgcccttgcaaggaaacaattaccgcccccagagttggtgccttgtctttcagacaactcctatttccattttgtgttagcatcagataacatccttgcagcctcagttgtggtcagatcaacaattagatcatcactgaagcctgagaggattgttttccatgttattactgataaaaagacctatcctgccatgcattcatggtttgctttaaattctctcagtcctgctattgttgaggtgaaaggtgttcatcaatttgattggttaacacaagaaaatgttcctgtacttgaatcaatagaaactcagcgcgctgccagagatcgttaccatggaagtcgccgcccaataaccagtgctaatgatagcccaagggtttttgctgccaagcttcaggcaggaagtccaacatatactaatgtgctcaatcatattcgaatatacatgcctgagttgttcccaagcctcaacaaagtcgtatttcttgatgatgatgttgttgtccagcatgacctatcaccactttgggatattgatctatctgggaaggttaatggcgctgttgagacttgcagaggtggagatagttgggtgatgtctaagaggttcaggaattatttaaacttttctcatcccctcattgcaaaaaactttgatccttcagagtgtgcttgggcatatggtatgaatatttttgacctgaatgcatggaggaagacaacaatcaaagacaaataccatcattgggtcaaggagaacctgaagtcaaacttcacactttggaggctgggaacattaccaccaggccttatagcatttaaaggccatgttcacccaattgatccatcatggcatctgttaggtttggggtatcaggaaaagacagatatcagtagtgttgaacaagcagcagttatacattataacgggcaaagtaaaccatggctggagattggttttaaacatcttcagccattttggacaaaatatgtgaactactcaaatgaattcttaagaaactgccatataatggagccacagttgtagattgtcgtgacaaaataaataaaaagcatatatcaagtgaaattaaattcgttattttggaagtcaacatcagagagtttatgaagggtaactggggagctcagtaacccccctccatggtcatatgcgttgatggtgaatatccaatgaacagagcatctttcccctcataggaccccttcccttttaatttattccatttgtatcatagctcatgaaattatgatattgtttaggatggttcttttgtattcgatggagcaatatatgagttgaattgatggtagtcccatcattattgtaattgattaagagtatacacagttcatgtgaaaagcatggattttgattatgcaaagcaaaccttgtatacttgttacttatttttagattctctcaa

SEQ ID NO: 111498 - DNA, 467 bp, Zea Mays
cacgtctttacattacaatgacctttgttctttagatgccttatagcaaaaaaaggtgatattctatgtacagttgatcatcggccacaagcttcagcctcaaagtcagggaagacgacaaacgcaatggtcagaggagcaacatagattggcgagttaactgaaacttccactggatacaatgaagggatgccaccatcttcagtgagctcaagaggggctccattcagcagcatggtccgggcaaaagggttcccatctttcgacgagagatggtactcttccctcttggaaaacccatcggaggctttgctcccgacccaagaaaccgtcctcttcaggccatggacaaaggcactgtccctcctgatcccttgcccttctgcgaggttgacatttaggtcgttcctgactgagaccatgaagcccatcgttcggtgcaggttcagcaagagaagagtgacgcc

SEQ ID NO: 111499 - DNA, 2794 bp, Zea Mays
cgctgctcgcattgcttgttgtggacgcaggggaggaggctgatcgcccggggagccagagcagaacagaggaggagagagaggagaccgaccctccctccctgcctcccctctgttcttgctcctcctcctctgtttccggtctcccggtcccgggctggtccgccgcctccgtggagccgtaagcagctgcttggtccgccgttccgaggcggccagcggggcggcagacatggggtgcgcggcgtcgaggcacggggcggtgtcctctccgccgtacgatgtgtcgtcgtcgtgctcctacaacatgtcccgcagcgcgtcggcgtcggcggacctaggctcgtcgtccgcgctgtcgatatggagccggccagtgcggctggaggcgttcgacgaggaggacgacgagcggcggcggctgtcggggagggatgcggcggcgcggttggggaacgtccggcggtgcatggagggcgagcaggcggctgccgggtggccgtcgtggctgagcgcggtggccgccgaggccgtgcacgggtgggtgccgcttcgcgctgagagcttcgagaggctggagaagatcgggcagggcacgtacagcagcgtgttccgggcgcgggagctggccacgggccggctggtggcgctcaagaaggtgcggttcgacagcgtggagcccgagagcgtgcggttcatggcgcgggagatcctcatcctccgccgcctccgtggccaccccaacgttgtcggcctcgagggcatcatcacctcccgctcctctccctccatctacctcgtcttcgagtacctcgagcacgacctggccggcctcagctcctcccccgacatcaccttcaccgagccccagatcaagtgctacatgcgacagctgctggaggggctggcgcactgccatgcgcgcggggtgatgcaccgggacatcaagtgcgccaacctgctggtgaacaacagcggcgagctcaaggtggcggacttcgggctggcgaacctcttcgcgccggcgccggcggcgccgctcaccagccgggtggtcacgctctggtaccgcccgccggagctgctcctgggcgccacggcgtacgagccctccgtcgacctctggagcgccggctgcgtcttcgcggagatgcacgcgcgccggcccgtcctgcagggccgcaccgaggtcgagcagatccacaggatcttcaagctctgtggctcgccgcccgaagacttctggcgccgcttggggctctcccacggcgccgtcttccgcccgcagcaaccttacccgagccgcctccgggacaccttcgccgcgtccatgcccgaccacacgttccgcctcctcgccacgctcctctccctcgaccctgccggccgtggcaccgccgccgccgccctcgacgccgagtacttcacgacggcgccatacgcgtgcgagccggagagcctgcccaagtacgcgcccaacaaggagatggacgctaagctccgagaagaatctagaaggaggagcaaccttccgagccaaggcggcgaggcggataagggtctgtcgagggggcacaagagcatgcggctgcaggacacgaaccagagccacgtgcacgccgaggaatcgctgcccgttgtggccgaaaacggggtgacaatggcggggaacgacggcgactcgcggctgttcgtcgacctggagcccgttccggccatcagcaagcggcacggcggcagcgtcggcggcgaccacgcggcgccgtgcgccagggctaggaccatgtccaccagcttcaaggagccgccttgtgtcgccgaacacctccctctctctggccccgtgcagctcgcggcgtccaccggcttctcctgggccaagaagccccggcccgacgccacgacggcggcggtaactgtgacgatgcggagcggctccatggggccagggaccaacaggaacaacaacagcggaggaggagacggagcaagaaccacctccggctccggcgccaccgccaccgccacagcagcggcggcaccatacgaggcggagaagcaggaggtgatcaagcagtgggcacaggtcgctgacgccttcagcgcctctgaagcttacaacagcaggttgaggcagacgcttgacgccaagcagctcaagactggaatgatgcacaaggggaaggtgaacagggtggacttctcagggccgctgctgtcgcagccccggcgcatcgacgagctcctgcacatccacgagcagcagatccggcaagctggtcgccggccatggttcatgaaaggtgcctactgatctgatccgatgcacaaactggttgaacttctctggaacttgcatgcaaattgcactggtccctcccttcgtgacaggcaccgaggaggaggagcactgatggcagagacacggcatggacacaactaaacgcccatcagatttgcacgtacttaccacagagcaagagaagatgctggaaacatatcaaaggagttggaccgtgagctagctctcctgatgagcaggtgttttttcagggccggggacagacaaacgagtcggcctcatgccatcagggaagagctcagatggaagctgctgtagtggttttcaggtttcatgcaaccagaatttgctctacgcctctacctgaactagacaacaatgttgttgttgttggtgttgtataagatctttttgtgctcgcttgtgatgataatatgcatgacaagctccaaaatgtggtttccaatttacacatagcaagaggttagaaaa

SEQ ID NO: 111500 - DNA, 3916 bp, Zea Mays
cgctgctcgcattgcttgttgtggacgcaggggaggaggctgatcgcccggggagccagagcagaacagaggaggagagagaggagaccgaccctccctccctgcctcccctctgttcttgctcctcctcctctgtttccggtctcccggtcccgggctggtccgccgcctccgtggagccgtaagcagctgcttggtccgccgttccgaggcggccagcggggcggcagacatggggtgcgcggcgtcgaggcacggggcggtgtcctctccgccgtacgatgtgtcgtcgtcgtgctcctacaacatgtcccgcagcgcgtcggcgtcggcggacctaggctcgtcgtccgcgctgtcgatatggagccggccagtgcggctggaggcgttcgacgaggaggacgacgagcggcggcggctgtcggggagggatgcggcggcgcggttggggaacgtccggcggtgcatggagggcgagcaggcggctgccgggtggccgtcgtggctgagcgcggtggccgccgaggccgtgcacgggtgggtgccgcttcgcgctgagagcttcgagaggctggagaagatcgggcagggcacgtacagcagcgtgttccgggcgcgggagctggccacgggccggctggtggcgctcaagaaggtgcggttcgacagcgtggagcccgagagcgtgcggttcatggcgcgggagatcctcatcctccgccgcctccgtggccaccccaacgttgtcggcctcgagggcatcatcacctcccgctcctctccctccatctacctcgtcttcgagtacctcgagcacgacctggccggcctcagctcctcccccgacatcaccttcaccgagccccagatcaagtgctacatgcgacagctgctggaggggctggcgcactgccatgcgcgcggggtgatgcaccgggacatcaagtgcgccaacctgctggtgaacaacagcggcgagctcaaggtggcggacttcgggctggcgaacctcttcgcgccggcgccggcggcgccgctcaccagccgggtggtcacgctctggtaccgcccgccggagctgctcctgggcgccacggcgtacgagccctccgtcgacctctggagcgccggctgcgtcttcgcggagatgcacgcgcgccggcccgtcctgcagggccgcaccgaggtcgagcagatccacaggatcttcaagctctgtggctcgccgcccgaagacttctggcgccgcttggggctctcccacggcgccgtcttccgcccgcagcaaccttacccgagccgcctccgggacaccttcgccgcgtccatgcccgaccacacgttccgcctcctcgccacgctcctctccctcgaccctgccggccgtggcaccgccgccgccgccctcgacgccgagtacttcacgacggcgccatacgcgtgcgagccggagagcctgcccaagtacgcgcccaacaaggagatggacgctaagctccgagaagaatctagaaggaggagcaaccttccgagccaaggcggcgaggcggataagggtctgtcgagggggcacaagagcatgcggctgcaggacacgaaccagagccacgtgcacgccgaggaatcgctgcccgttgtggccgaaaacggggtgacaatggcggggaacgacggcgactcgcggctgttcgtcgacctggagcccgttccggccatcagcaagcggcacggcggcagcgtcggcggcgaccacgcggcgccgtgcgccagggctaggaccatgtccaccagcttcaaggagccgccttgtgtcgccgaacacctccctctctctggccccgtgcagctcgcggcgtccaccggcttctcctgggccaagaagccccggcccgacgccacgacggcggcggtaactgtgacgatgcggagcggctccatggggccagggaccaacaggaacaacaacagcggaggaggagacggagcaagaaccacctccggctccggcgccaccgccaccgccacagcagcggcggcaccatacgaggcggagaagcaggaggtgatcaagcagtgggcacaggtcgctgacgccttcagcgcctctgaagcttacaacagcaggttgaggcagacgcttgacgccaagcagctcaagactggaatgatgcacaaggggaaggtgaacagggtggacttctcagggccgctgctgtcgcagccccggcgcatcgacgagctcctgcacatccacgagcagcagatccggcaagctggtcgccggccatggttcatgaaaggcaccgaggaggaggagcactgatggcagagacacggcatggacacaactaaacgcccatcagatttgcacgtacttaccacagagcaagagaagatgctggaaacatatcaaaggagttggaccgtgagctagctctcctgatgagcaggtgttttttcagggccggggacagacaaacgagtcggcctcatgccatcagggaagagctcagatggaagctgctgtagtggttttcaggtttcatgcaaccagaatttgctctacgcctctacctgaactagacaacaatgttgttgttgttggtgttgtataagatctttttgtgctcgcttgtgatgataatatgcatgacaagctccaaaatgtggtttccaatttacacatagcaagaggttagaaaagctagtaatcgtaaacccaagcttccaaaccgacattcgaaatcaatttgccactttccagagcgtccaagcttgcaagccgacattaggaattaattttagcgcttgacttaatgaaaccatctctacccctattttaaaaaaagtggttattttgtcttgcatttttttgaaaaataaataatatatagtgaatcaaattcgtttcttgatccaccttaggatgtttccatacttccataacagatgtgcttctgatataaaaaaaatcaagaacccttcaagctaaagtatataccctcttcatccaacgtttccttggttgtgggtttgttcaaggtgaaatgaagaagttcatatgctctaaccgtgctaactgttcttgacgagagacatctctttgatgtaggctaactggctaagcacaccataatgtcatccttcgcatctaaagaaaggaaggaaaaaatatatttgcttcctaatttgctagcggggcgcgagcaatttaggtcccgtttggtttgagggactaaagattaatctctccattttagtcatatttagtcctaaattgtcaaacggtaggattaaaacagggactaaactattttagtccctagtccctcaagatgtggctaaaagggattaaaccatattaattccacatttacctctcatttagttcaattgcactagtcttcttatgagtcatttagtatattcttactaattttaatccctagaaccaaacatgttagggactaaactttagtcccctaactaaactttgatccctatactaaataaaccaaacggggccgtactatagtaagatacaagtcatcaatggctatggccaaggtaattaccttaattatcatgtagcagtacttgttggctcatcataaaaatcaaaggcggcgtcgacgcgagcgaggcctctagaacgtatctttgcagtccaccacatctatttcgacctatcaactaataagacttacacttactgtaagccatgctagctcgctatgtaatatccactgtgtaagtcttagctgataggcaaaacagatgtggtggatacgctgcggaagagtgctagccatgcatgggtgcaaaacagcagcaggttatatatctatactactacaacaaactaaccacggccgcggccggaatggtcgatgattactcaccttcgttgctg

SEQ ID NO: 111501 - DNA, 115 bp, Zea Mays
ctaactaattttaaaacatttgcagttgctacaactcttctgacctttgtggggttgtttcggaaagcccatgatgagaacctcaagcaaattgaggctgagaagaagaaagccc

SEQ ID NO: 111502 - DNA, 1137 bp, Zea Mays
atggctatgattattcattctagaaaaagaaaacgaaatgcaaggaggatagggattacctatgcaccaatgcatgaaagggattgaattagaattgaatatctcaacacaaagatttggagggatgacacaacatgtataaacatgattagaatgaaaagggcttgtttctttcacctaactaaacattttagagagcatggtttacttcaggacactatccatatgtgtgttgaacaacaagtggccatgtttctaaatacaattgggcataacctaagaaataggttgattggcacaaattttggtagatctagggaaacagttagtcgatgtttcaataaagttcttcgtgcaattggtgagctacgaggggaactaattagtccaccttcattggacactccaatcaaaatatcagggaactacagatgggatccgtactttaaggactatattggagctattgatggtacacatgtaagagccaatgttcctagagatatggagcatgcctttcgtggtaggaagtcctatgcgactcaaaatgtaatggcggctgtagaattttgatctacgcttcacttatgtgttggctggttgggagggaaccactcatgatgctaatgtattacgagatgctttagaacgtgtgaatggccttcgcgttccacaaggtaaattctaccttgtagatgcgggatatggagcaaaaccgggattcttgccttctttccgtggtgtgagataccatttaaacgaatggggaaataatctcgtacaaaatgagaaagagttgtttaatctaaggcactcatctctttgtgtcacagttgagcgtgcattcgggtcattgaagagaagtttcaagattttagatgatgcatctcctttcttcccttttccaacacaagtcgatattgttgttgcttgttgtatcattcataattggttcatacaagatgggagtgatgattttattatacaagattctaattggcctagtcatagccatgctacatctttagttggccaagtaagtcagcatgctgctatggttgctttgaggcaaggaattgcagaccagatgtggacagaccatcagaactacaatggaaactagtatcttgtaatatt

SEQ ID NO: 111503 - DNA, 511 bp, Zea Mays
atggccacaggtaagtttgcaaaggattctaatgcagctttaggcgaagatgatgatgttgataatgaagaggtgatggcacatgctttcactaaaaggatgtccacttgtgatgataatgccacaacatcttctacaagcaagatcaggaagaaggcaaaaacgtgatagtgaagaggaggggttgattgctgcattcaaaagtgtcggggataccttatccagtgctattgagaaggttgccacaggggacactgatgtgctagatgatctttttgacagtttgataaaccttccaggtgtgtgtgctttgttcttaacttcagatgttgtaacctgttttctattgatctgtttgtccaataaaaactattgtaacctaaaacctgaaaaccattgtaacatatttttttgacaatttgctaaactttgcaggttttgagcagacccacatatctctttatttgaattatctggtggcgcaccctcacattgttagagccttcaacaa

SEQ ID NO: 111504 - DNA, 1437 bp, Zea Mays
atgcgattcggtgttggcattgtcggcaagaatggggtcatggggatcgagcacggaggcgtagatgatgaatgtcgtggactagggatcgcaaaagggatgatgacggctgcggcgacgagagcccgaaggcagccgcggcgcccgttcgcgcccgtagtggtgtcgccgccgtcgcaggcggagaatcggctagtgcacgaggacgcgccgtcatcggtcgcgcggccggtgcggaggtttgggacgtgcgccgggaagatcgccgggcccgcggtcaacatgaagtgcagctatggatcgtccccggtttgcacctcttccaagaagactcccgcggcggtgaagagggcgccggggacggcgaccaggaggctggattcttgcgctatgaacaagaagcgctcgaccccggcggcgtacgacgcgccgcgcgaaccggcgtcgcgcgccgccgaggagcgcgacgacatgttgccctgcccctgcagcgaggcgggccgagaacggcggggcagcgaggcctccgcctcgcggaagcgggggatgacgagggtcgtggcgatggaggaggccatggcggggatcccggagcctggcgagggccgcgtcaagtacctggtggacacgttcgagcggctcctctcgctaggcggcgggcccacggtgtgggacagaggagcggcggcggcgaggaggaggaggaagaaccagggaaccgcggcagcgacggcgtcgtcgccagcaacgccacagggcgccgaggagatcgacgtgtcgcacccctccattgcctcgtcgtccgaggtctccttcccggccatcgctggtgtcgcctgcatcctcgacgcctccgaccgcacaagcatgatcagccgtgcacgaggccaacggcggaagagggcatacaacagcaccggaccgccgtcggatagggcctggagttgcagcaggaaggtgacaagggtgacgacacagctgccgttccgtctcaggaccgagcaaagagggaaagccaaggaaggaaattttttcgagaggttgaggaagatgcaggtagaggaggagaggctgcgcaatccactcgcgcaaggtttaccctacaccactgaagagccagagatccccgcgaaacctccaacaagggaacccacggaaccgatcgatcgtgtgctgcacagcgaagcgcgtgtggtcagacgcgtcaagttcgacagccaagtcgctgagcgcagtagcttcatggaggaagtaaagctggagagggaaagacagcaaaaggcggatgaggaggttgagatcaagcagatgaggaagcagcaggttccaagagcacatccgatgccggacttctccaaacccttcgtgccaaaaaggtcagtgaagcttcctacagttcccagggagccaaggtttcagcccaggttgccttggtag

SEQ ID NO: 111505 - DNA, 282 bp, Zea Mays
atggcgtcaatggtgctggaggcgacgagggtggtccatgaggacttggagaggctggagcgcctcgcggcgcgcgagctgcaacgggagcctgataactcgcgcggccgcttttttcagtcccaccgcatccgccacatgctcgacctcgtcgtctccacctcctgcaagctcgaaacttttggctgttacctcgacttgcatgagctttataacgagttcataaattccaagtttggaacgctgatggaatactcgacttatgttggctgtttctcctag

SEQ ID NO: 111506 - DNA, 501 bp, Zea Mays
atggcgcgacacgacaaactgaaacagggatactgcaacatagggcttgacccggcgaacagcgacgcgaagaggaaagcgaggttgcagccagacgagctgggacacaaacacacgcagcgactagacaggttctacggcaagcttatcgtggcgtacaacgaaatttttaagcgcgagtcgctagaggagaccacgccggagggtcgacagggcgcgccagggaagaagctgcgcgagggtggggaagaatcaggggcgagcttgtcgcggccaacaggaagcagtgtgcgcgacgatgggagcggcttcatgacgagggcgtacagagcacagggagatgggcgccatccgagccaggggcgagctcggggcagggaggaccgccgcgatggggaggaagaaaagcgcggtgtggaggcgagctgccgtgggctgctcagcgtggagatgacggcctgtgttttgtattcccagccgaacgtgagtagaaaaatctga

SEQ ID NO: 111507 - DNA, 2290 bp, Zea Mays
ctggagcacgcgcgaatacatccagcccaccccctgccgcctcctcctctataagacgagacctgcgcaccggcaccgccatctccgtctccctgtctcaccggtgccgcttcccctcacccgctcgatttactgcccaatccggcccgcttcgccccgccacgaattttaatcaaccgtttggagcttgaatttgaattccagctcgaatcacccacccggccagctgggagcgagagcgttccagctcgaatcacccagcccgccagccgggagcgagagcgagctgggtgagctcgattcgatgcgttgctgagcgtggctcaaccgattcaggtcgggcggtggcgcagtcagagggatctgaaccctagcgccgtccggatctgtgacccgcgctgctcggcgcgtcggcggcatgagtgcctggaaaacgtggcgaggaggagaagcggcggggatatgagcggagccagcggcagcggggacgacttcgggcgggcggtggcgcgtgccgcagtggcgcaggcgctggaggccgcggggttcgactgcgcgcaccgctccgcggtggacgcggtcgtcgacatcctcctgcgctacatcacgcacctgggtcggtccgccgccttccatgccaacctcgccggacgcgcgctcgccaacgagcttgacgtcatccaggcgctcgaggaggtcggcgccgacacggacggcttcgccggcgcggcggccacgggccactgcctcgtcagctccggcgtcgtcagggaccttatggcgttcgttgactccaaggacgaggtgccgttcgcgcgtccgctgcctaggttccccgtccagcgcgtgcagccgcagcccactgccagcttggcggtggcggggcgggagactgggatgaggcacgtgccggagtggttgcccgtgttcccggatccgcacacgtatgtgagtacggaggtgtgggttgagccaccggcgaccaaggacagggttgacaaggtggagcaggtgcggcaacggaggaaggctgagaagtccctgctcagcttgcagcaaaggctggctatggcaggtgcggatgggtttcgtccagtagctgctgtggcgcaggataacgcagagaaggggaaggagatacaggcagctgggacaaagagaaacccatttcttgagccagcattgccgcctggagagaagtatgtatctgaggttgatatgcctcctgaaaagaagaaaccctctgtccttgaggcatttgcgccagctatccaagctagaaccatcaaagagttcgatgctggggcagggttggatcaaaatcaaaggaacatcgttccaaaggagagggctcgggtgcatcttaagattggatttggaaagaagccatttgctgcagctctgaactcaagagccctggacctgagggaagatccttcattcctgaaagaggaagcaaaggatgacaagaagcggagagcaggcatgatattaagggcatcgatggagaacccacaagaacttcctcagctctaaagttatctatagaggaagtgcggtacccagagtggagttgcatcatggtgtaattgtggaacttcagcttcctgaatctagaggccatgcatgtctccgtgatacaatacaaccttcctcagaagcttaacctgcaacccggggtctcccccatccacctagcattttcctagaatcaccaggggctgacaagttctgcggcgccgtagctgaagtaccagcatctcaccgctctgagcttggttctggtggtgtttcaccttgtgagttggttggttcaaacggagctgatttgtgaagccgcggttctggtctccagagtccagacctggcgtccaaaagaatgatgctccctggtagaattggagatgtttgtacaaaagctaacctctagttgttagacagaattgatgtatctggtggattactatacgatggactcgtttatgacgattgattgattgattctgactggtgacttcatgttatttgtgagtagttgtggtgctttgtagttggagactgggatcgtaataagagtgtaccatatgattcttccctttcccggcatctaacttgagtaattattcgagactgaacttgtaaagattttattttgagtgaactgtgatgtgggtctttagacctttttttcccacttgaatatttttttgctcgtctaggtctataaactttgtccatgttccaaaagctcatctagaggagatttgatttgatgtggcaccatggtggc

SEQ ID NO: 111508 - DNA, 237 bp, Zea Mays
acagctggtcttgctgattcatggaagcagtggctatcaatttctgtgaatcagatctttcttggcctcccatcttcgcctcaggcagctgggagtggttttatactagctgatgacatcaagtcttaggtgcttccattgatcaataactcagggaaatatggagggatcatgatgtggttcaagtactatgatgatcaagatggctacaattcttcaatgaagagtgatgtttag

SEQ ID NO: 111509 - DNA, 2716 bp, Zea Mays
cggcgcggccatgagttggagccggaccggctcctctgaaaccggccgcatatctaggctcgcatgtgttgccgttggagatcgcggtcgcgacgagttcgggtcgggtacggacacatcgttattgattgcattacggggttgcaaggatcgctatatatataggttgcatttgggcgtgaggagaagaagatcgtggtctcgtggatatcagcaatggaccgcgatgaggagatgggccacggggaccggtccctgctattcgtcggcgacgaggacgacgacattggcacctacagggacggcggcttcatggaaacctcctccgacgagggatctttctccgacccgagcgacggcgaagcccgcggcgggcgccgcggcggtgacggcagcaagagcgcgtggccgcagagttacaggcagtcgatcgatatgctgagcgtggtgccgtcgccgacggtgagcatgctgatggcagcgagcccgaacctcaccagatttggcagctccttcctcaaggccgggagctccttcttcctccggaagggcgacgactcggtgctgccgctcgccaggccgctgctgccgccttcgctcccgcagctgtcgcagtcgtcgctgcggccgcagccacccatgaggcagtccacggacatcctcgcccagccgccgcggcctccggctgggcacgaggcccagttgcccgacaggccgtccagtgcgtgcctgagaccagattatatcgagcttcctccgcctgctagcaagtgcagcaggaaccaatcaatcatcaatgggttcaacgtgctgtgcggcgttgggatactcagcacatcttatggaatcaaggaagggggatggtcaagcctccttctgctccccttgttgggtggcagctcttgctacacaggcttgcttctaaagagatgcatagacagttcgcccaacattgggacatacccagacattgggcaagctgctttcggtgttgctggtcgaatctttgtatcggttgttctttacttggagctttatgcaagctgtgtggagtacatcacgctgctaggagacagcatgtcatcagtgtttccctcagcacatttagcttttgccggcatcgacatgaatgcacacactctctttgcgatcacaacggcattggcaattctcccaacagtctgtctcaggaacctcagtctcctctcgtatctttctgctggcggtgtgatggcgacaattgcagtcatcgtctgcctattctgggttggcattggagaaggaatcgggtttcacttttccggtgctctagtgaacgtgacccaccttccagtggcgcttggcctgtatggattctgctactcgggacactcggttttcccaaacatatactcgtccatgaaggagcgctcgcagtttccgtttgtgctcctgttctgcttcacggtggtgacagtcgcctatgctggaatcgccgtctcagggtttctcatgtttggcgagtccaccatgtcacagttcaccctgaacttgccacagcagtacatcccatcgaaaattgccatctggatgacgattgtgaatccgtacacaaagtatgcattgacaatgactccggtcgccttgtctatagaggaagccctgccaaagaagatgcagaattacctggttggaatgtctgttaggacatgcctcgtcctctccactgttgtggtggctctgctttttccttatttcgggctggtgatggcattgcttggatctgtcttcacaatgcttgtggctctgatactcccatgcgcgtgctacctctccatcaagaagggcgcagtgccattgtgggagatcatcctgtgcatagtcatcataatgatcggcgccgtatgtgcaagcgtgggatcatacacctcagtcagccagatgattagcagcaccagatagcgcacgctagctgatgtttatctagctgctacagatccttccaaatgctttgacatagttggaactggcagctttcgtagctaagtttatttgttccttctttatggcagaaatttggtaagagagagtttagttgcgggaggacaggcgaaggttgttgtttcagacatccatgacaagagttgtttttcttttcgttagaaattttctgtgggcgtgtcttcggttgtcgtctgcacagggcaggagagaacaattcagaaagaaaagaaaaacgcagggactgcctaaatgctagtactagtagttagtgttaatccctccagcacaggagcatggtgacgcatcggcgcacgatgtagagcctggccctctgctccttcaccaggctcgccagccggccaggcaccgagcggccgggcggggcccgggacccccggctcttgagccccgccgcagggcagccagggctccccggcgtggacctccgcctccccttcttgctcttgtcgttcattattctctccgtctctctagactctgtactccctctccctttctcttgatctctgctaggatcgtggaacacagacggtggtggtggcagaccggcggagacggcagcagctctctgcccgcaggagttgtgttgttcggttggtttgttgttgcagatggaaaaagagtgaggcttgagtggcagcagctaccaggggtgaggcggtatttgtagccccagctcccagatggggatgggatggggtgacatgacaat

SEQ ID NO: 111510 - DNA, 1716 bp, Zea Mays
atggaccgcgatgaggagatgggccacggggaccggtccctgctattcgtcggcgacgaggacgacgacattggcacctacagggacggcggcttcatggaaacctcctccgacgagggatctttctccgacccgagcgacggcgaagcccgcggcgggcgccgcggcggtgacggcagcaagagcgcgtggccgcagagttacaggcagtcgatcgatatgctgagcgtggtgccgtcgccgacggtgagcatgctgatggcagcgagcccgaacctcaccagatttggcagctccttcctcaaggccgggagctccttcttcctccggaagggcgacgactcggtgctgccgctcgccaggccgctgctgccgccttcgctcccgcagctgtcgcagtcgtcgctgcggccgcagccacccatgaggcagtccacggacatcctcgcccagccgccgcggcctccggctgggcacgaggcccagttgcccgacaggccgtccagtgcgtgcctgagaccagattatatcgagcttcctccgcctgctagcaagtgcagcaggaaccaatcaatcatcaatgggttcaacgtgctgtgcggcgttgggatactcagcacatcttatggaatcaaggaagggggatggtcaagcctccttctgctccccttgttgggtggcagctcttgctacacaggcttgcttctaaagagatgcatagacagttcgcccaacattgggacatacccagacattgggcaagctgctttcggtgttgctggtcgaatctttgtatcggttgttctttacttggagctttatgcaagctgtgtggagtacatcacgctgctaggagacagcatgtcatcagtgtttccctcagcacatttagcttttgccggcatcgacatgaatgcacacactctctttgcgatcacaacggcattggcaattctcccaacagtctgtctcaggaacctcagtctcctctcgtatctttctgctggcggtgtgatggcgacaattgcagtcatcgtctgcctattctgggttggcattggagaaggaatcgggtttcacttttccggtgctctagtgaacgtgacccaccttccagtggcgcttggcctgtatggattctgctactcgggacactcggttttcccaaacatatactcgtccatgaaggagcgctcgcagtttccgtttgtgctcctgttctgcttcacggtggtgacagtcgcctatgctggaatcgccgtctcagggtttctcatgtttggcgagtccaccatgtcacagttcaccctgaacttgccacagcagtacatcccatcgaaaattgccatctggatgacgattgtgaatccgtacacaaagtatgcattgacaatgactccggtcgccttgtctatagaggaagccctgccaaagaagatgcagaattacctggttggaatgtctgttaggacatgcctcgtcctctccactgttgtggtggctctgctttttccttatttcgggctggtgatggcattgcttggatctgtcttcacaatgcttgtggctctgatactcccatgcgcgtgctacctctccatcaagaagggcgcagtgccattgtgggagatcatcctgtgcatagtcatcataatgatcggcgccgtatgtgcaagcgtgggatcatacacctcagtcagccagatgattagcagc

SEQ ID NO: 111511 - DNA, 684 bp, Zea Mays
atagctgatttcaccgtgatgacaattgacagtggtcgccggtcgcgctcagtggtcgccggtcgcttcggttggccgccggccggtgcacccgcacccgcaccacaccgcaccgcacccatacgatacggcacgaggcggcgacccggacaggacggacgcgaaaatcagctgccgtggaggtgcgggcacgaacgcgggccccacccaacacgacgccgtaccgctattccctttccctctgactagtcactagccgaccgcgcgggaagcggtccggttcacgacttcacgccgctggctcccctcgccatggccggggaccgcggccgcggggccgcggagagggtggatgctgccgtgggggcggtgggatccggtggctgggagttccggaacgcgtacaggcgccagctgctggctctgtcgcggcggatccggctcctcggccccttcgccgaggagctgcgggaggcacgccgggggtccgcggagcaggaggagcaggagcgggcgctggcgcctctcgccgacgcgctggaggaggcactcgacctgctccagctcggccgcgacggcagcaggatattcctggtaccgctctcgccttttctagtccctcatctgtgctgtactcgcctactcggtactcctgacgcttggctgcccgtgcgagtaaatatt

SEQ ID NO: 111512 - DNA, 2254 bp, Zea Mays
tctgactagtcactagccgaccgcgcgggaagcggtccggttcacgacttcacgccgctggctcccctcgccatggccggggaccgcggccgcggggccgcggagagggtggatgctgccgtgggggcggtgggatccggtggctgggagttccggaacgcgtacaggcgccagctgctggctctgtcgcggcggatccggctcctcggccccttcgccgaggagctgcgggaggcacgccgggggtccgcggagcaggaggagcaggagcgggcgctggcgcctctcgccgacgcgctggaggaggcactcgacctgctccagctcggccgcgacggcagcaggatattcctggtccttgatagggatgaagtaatgaagaagttccatgaatcaattgctcagctggagcaagccctgtgcgattttccatatgataaactggatatatctgatgaagctagagagcaggttgagttagtgcatgcacagctcaaaagagccaaagagcgggtcgacatgcccgatgacgagttctacaacgaattatgttcgctgtataacaagagccacgacccaagtgctgagttggatatccttgggagattgtcggagaagttacacctgacgaccatcgctgatctcacgcaagaatcacttgctttgcacgagatggtggcatctggtggtggcaacgatcctggagaacacattgagaaaatgtcgatgctgctgaagaagatcaaggactttgtgcagactcagaaccctgaaacgggcccgctggtgactgccaagccaatgggttccaacgggaagccaagacctgtaaacgttcctgacgagttccggtgcccaatctctcttgagctgatgaaagacccggttatcgttgctactggccagacatacgagcgggcattgatcgagaaatggctagcttccgggcaccatacctgtccaagcactcaacaaaggatgccaaacacgacgctgacaccgaactatgttctcagaagccttatcacgcagtggtgtgaggccaacgggatcgatccaccgaagcgcccgacgcagcagcctgacagacctacatcttcatgctcttcgagcgagcgcgccagcatcgacgctctcctctccaagctatgctccgcagatcccgaggaacagagatcggctgccgcagagctccggctcctagcgaagcggaacgcgaacaaccggatctgcatcgccgaggccggtgccatccccttgctactgagcctcctgtcttcgtctgacctgcagacgcaggagcacgccgtgacggcgcttctgaacctctccatacacgaggacaacaaggcgagcatcatactgtccggcgctgtcccgggcatagttcatgtcctcaagaacggaagcatggaggcacgggagaacgctgcggccacactcttcagcctatcggtggtggacgaatacaaggtcacgatcgggggcacaggagccatccctgccctcgtggtcttgctgagcgagggcaggcagcgcgggaagaaggacgcggcggctgccctattcaacctgtgcatctaccaggggaacaagggccgcgccatacgggctggcctcgtgccactcgtcatggggctcgtgacgaaccccaccggagctctgctggacgaggccatggcgatcctgtcgatactgtccagccaccccgagggcaaggccgcgatcggggcggcggagcccgtccccgtcctcgtggagatgatcgcgggtgggtcgccgaggaacagggagaacgctgccgccgtgatgctgcacctgtccgccagcgtgcggcagtccgcgcatctggctcgggcgcaggagtgcggcatcatggccccgctgcgggagctggcactgaatggcacggggagggggaagaggaaggccgtgcagctgctcgagcggatgagcaggttcctggtccagcagcaggaggacgcggtggatccacgtgtgcaggagctggaggagatcgagcgccagcttgccgcctttggacctggcgttacggaggctgatgtccttcaacagttgggggctctttaacctatggtacatttttcactatgatactactatacttatatagaaaagttctagcggcggactttattatcagtaaaatctcagttctagctactgaatgttagcgtgggtttcggatttcaagatttttatggccatgcgtgtatatgcatttgcgattttg

SEQ ID NO: 111513 - DNA, 2197 bp, Zea Mays
acaactatgccccaagttctcatgtaattaaacatagtatagttaagtaacctgacacgtatcacatccgtgagttaacacatgcacctcccactacatgcaaaaactaccaactacacgacattaacctgcagcttaaaactcgtaaggaaaaaaacatgcagcgacccaaaacaagatcgatcaccagccctaattgaagaagacgactccaattaagttccaaaccacataaactaactgaggagagtgagctagttcagcttcgtcagaatgcatgtatgcatatttatccccagctggacctggacggccacatgcaactcacaacacattccccgacgacgacgagctgaaccccgacaagaactccgccggccacccactgccaccgccggtgctgccgggccagtacgagtacgactgctcttgttgatgcgccgtgacggcacctccgccgttgctgctgtgctcctccatcttcaccgcggcgagctgcgcgagaaggcccgaggcaacgacgcccctcgggaacccgtctgcgaggacgccgctgccgtcgtcggcgaaatggtagccgtgcaggccagcctgctgcaggaactgcggctgcatctggagcgggaggtagtggtggtggtagccctccagcgaggcctcgagcgcggcggcggccgctgcgggcgggaggccgaggtggggcagctgcgcctgcatgctggcgatggcctcggccgccgccatggccgcgctcgtcgtggtggtggtggccgtggtggaggtggaggtggtggaggacgaggaggtggccgccgtggcgcccgcgccgccaccgcgggaggacttcttgctggagcgcttggtgttgcgcctgcacccgccgccgacgggcacgttgcggagcgcgccgccgcgggtccagtagcggcggcacgccttgcagaagtggcgcggctgcgagagcgagtagttgttaaagtagcagaacttggtgttggcggagtcgcagcgcgggcagcggagcgtgccgggctccgggagcggcacgcgcacgagcctggcgcgctccgccatcgacacgacggggcgaggctgcgtcgcccccgcccctgcccctgctcccgccgtcgtcggcaccgaggtggacgagccgcctcccgctggagcgctcgccgccgtgtcagcaggacctccgcgcagcggcgccaggcaggacggcggaggcatcaggtggtggtggtcgctgccagcaccgccgtcgaggagacactggagtggttgctgctgctgcatatgcatctgtatgcatgtatagcgaatcaattataataaagactggaattcaacgcacggtatattcaagattcaagaacatgcatgcctagaatgatgcctttccttttgtgtctaagttcaatcagacatgaacgaaggcacagtaaacaaacttgcaaattttgcggtgaaccaaccaaagtttgaagttcattgttcgtatcaggggaaaaataccccaggattcactcttaaataacaagaaggaaacagatacacgacgaaattaattaaaaaaagaagagtaataggataaatcaaccacctggccccaattgggagggtcaaggaagatcgggagcgaggagaacaccatgatggcgggtgcggtggcgaagttaagagaacgactcggcctctttcgttccttttactgaccgtgactcttggggagggagaacgatggagaagggtgtgaggagatggaaaccacagctttccttgcgcctgccctcaagggctgccttttataatttatgtggccttccttagctgctaagagagaacgaacgatcgagctggagctacctgcagctaagaacagtgctgcgagacagcaagagacagatggtgctgatgaggatagctagctagagagctagcgcggatggctggatggatgtgtcttgggtcatgagagagagagagggagagagagagaataaaaggtgatggctcaaaaactgagaaggccgtgacaaaccctaggtatggctagtagctaacagtaggagaaagagagagagaagagggagaagaatgaagagctcaatcagtgtgcaggaggggacatgggcggcgccaccagagaaagctgggaagggctccagcacgcaatggaatggggtggactggggatgga

SEQ ID NO: 111514 - DNA, 207 bp, Zea Mays
atgtccttccttttcatggggttaacaggaaacattggctttaaaggttctaaaacgccatcaggattgggtagagatggaccatcttcatctggtctaaattccaaggcttgtcatgaaaaaatgagggacaagttgaatgacaggttcctagaattaagttcaatttcatatcacattatcatttgcagcgggcgcgacacgtga

SEQ ID NO: 111515 - DNA, 589 bp, Zea Mays
cacactcaagactgacaacaaaccgcttagtccacctcctcgatcttggggccagggccgccgctgccggcaggggcgtcctcgtccatgccgccagcgccgcccatgtcttcacccgcgccctggtacatcttggcgatgatggggttgcagaggctctccagctccttcatcttgtcctcgaactcgtccgcctcggcgagctggttggcgtccagccagctgatggccgcgtcgatggcgtcctcgatcttcttcttgtcatcggccggcagcttggacgcaatcttctcgtccttgatcgtgttgcgcatgttgtaggagtagttctccagcgagttcttggcctccaccttcttcttgtgctcctcatcctcagacttgtacttctcagcgtcctgcaccttctcattgccctcaccgctcaggatggcagcctggacagcagcaccataggcgacagcctcatcggggttgatgttcttgcacagctccttgccgttgaagaagtcctggagcagttgctgcaccctggggatcctagtggagccaccaacaagtacaacgtcatggacggtgctcttgtcca

SEQ ID NO: 111516 - DNA, 172 bp, Zea Mays
gaccacaagttcacaatataaaaagttgatcacaaagaccacaagttcacaatataacagtttgatcacaaatatcacaagttcacaatattacaaattgataacatagatcacaagttcacaatatgataagttgatcacaaagaacacaagtacacaatataacaagttc

SEQ ID NO: 111517 - DNA, 1150 bp, Zea Mays
gacaactacactagaacaatattatcttctgccacattagaacatcaataggcagcaatattagggctgctttggtagacaggaaaacagaggggatccatggctccatttcccgtccaccaaaccaacccttaagaacttgcaatatctacatggtattctacaatggaggtattctacaatatgttcagctgtaaaaatgtaatattaaggctgccatcatcagatgagaaaaaaacttacaatttcataagtataaacaatcgagatgtgtaaagcagcacaataatatcacaaaatatacgaacaaatcaacttcaaatgcctacagaactaaatatacctccataacgcaagaaacttcctaaacctttcctatcgaaacaactagaatgtggcagatatgtctactatactagagcacaattcgaagcgttttgttctaaaattgtaaaaatactaaatctaaagccacaagaacagagctaaactattttcagaatgctacatgaatcctaacatatcagatagtgatacaagtactcatagtcgaactaccacatcaggtctcatcctacgaatgaaatagagaaaggagggatgctgatggtgttaagacctcgaggttccgttgtcagggttgtggctgatcacgatggcgtagtccccagaggccctggcgaagacaccgcggtcaccaacgtggtgctcgacgttgcagacgacggcaccctcggggatcccgcggagcggcaggacgttgccgatggagagcgtggcgcggcggccgcagtaaacgaactggccggtgtacatgccctcggcggcgacgaagagctccttctggtgcttgtacctgaaggggtggcggaaggtgaccttggcgagcggggcgccgcgtccggggtcgtggatcacgtcggtgactacgcccttgaggtacccgttgcgctcgccgaagtcgagggagcggaaccgggcggggcccttgcggtggtgggtgtgggacttgaacacggatcccgcacccttacgctgcgcgcggatcacgcgacccatcttgcccggcggcggggaggaagcggcggcggcggcggcgcggcgggaagagggtgcggaagtgagcgcggtgcggctagcgttggacgag

SEQ ID NO: 111518 - DNA, 1495 bp, Zea Mays
cagaatggcaaggcccttgctctgcctcgcactcttgtgcacttccctggcgttcaccacctgcgccggcatccgcctggagctcacccacgtcgacgccaaggagcactacaccgtggaggagcgcgtgcgccgcgccaccgagcgcacccaccgccggctggcgtccatgggcggagtgaccgcacccatccattgggggggccagtcgcagtacatcgccgagtacctcatcggcgacccgccgcagcgtgccgaggccatcatcgacaccggcagcaacctcatctggacgcagtgctcgcgatgccgcccgacctgcttcagacagaacctcccctactacgatccctctcggtcgcgcgccgcccgcgccgtgggctgcaacgacgccgcgtgcgctctcggctccgagacgcagtgcttgagcgacaacaagacgtgcgccgtcgtcaccggctacggagccggcaacatcgctgggaccctggctaccgagaacttgacgttccagtcggagacggtgagcctcgtcttcgggtgcatcgtcgtgaccaagctctctccggggtccctgaacggcgcgtccggcatcatcgggctcggcagaggcaagctgtcgctgccctcccagctcggcgacaccaggttctcctactgtctcacgccgtacttcgaagacaccatagagccgagccacatggtcgtcggcgcgtcggccggcctcatcaacggcagcgcgtcgtcgacgccggtgacaaccgtgccgttcgtcaggagccctagcgatgacccattcagcacgttctactacctgcccctcaccgggatcacggcgggaaaggtcaagctagctgtcccctcggccgctttcgacctccggcaggtggcgccggggatgtggacgggcacgttcatcgactccggcgccccgttgacgagcctcgttgacgtggcttaccaggcgctgagggcggagctggcgcggcagctgggcgccgccctcgtgcagccgctggccgggacgacagggttcgacctgtgcgttgcgctgaaagacgccgagaggctggtgccgccgctggtgctgcacttcgggggcggcagtggcaccggcacggacttagtcgtgccgccggcaaactactgggcgcccgtggactcggccacggcgtgcatggtggtgtttagctcggtcgaccgcaagtcgctgccgatgaacgagacgaccgtcatcggcaactacatgcagcagaacatgcacgtgctctacgacctcgccggaggagtactctctttccagccggcggactgcagctccatatgatcgatcactagcttgcgtgccggccgtgtgcatattctgtactatttgtgtgtgtatgtgcgcgcgggatatatatatgtaattgtgtatcactatccaaattgctcatgcaattgcactgataaacgcgtttgtatttttatacgacacaacaatatattatggcaa

SEQ ID NO: 111519 - DNA, 316 bp, Zea Mays
accaccgcgcaagattccgccgcgcccaggttcccggcggtctacgacgcgtggttttcccgcttccgtgggcagcacagggtggccgatgaggctgttccacacagtcgacttgccagcatcgatattgccgagcacgacggcgttgagaatgatggaggggcggcgcgaggcggtctcatcggatgggtcatcatccgcaggtagcgaggcgtctagccgcatggactcagagagctagacgaattcatcaattgcccatggctggcgacgacgacatggccacaaggatcacgaggtcgatcgggggaagatc

SEQ ID NO: 111520 - DNA, 324 bp, Zea Mays
tttatttttttattgtctatgtctttctctaactaattttgtacttgtagaaagaagttgcctttattattcaactatctacgacacatgcactgattttaaggtaacttgtacaattacgaaccccaatccaaattaatcccccggtcctaaataagccagataattaagaatcctggcccaaataggaaaaggtacatgtagatattaggggggagggatagagagatatagagagaattatcttatacatatatattgttttctactcttaaaagtatgtaaacatacttaaactagtaaatgaatacacacaatagcgtt

SEQ ID NO: 111521 - DNA, 219 bp, Zea Mays
gccattgagcagcagagagtagatgttgggggactagacattacacaaggaataaaataaaaaaaggcaagcgatggctcgctttagtgtcatcatccggatatataacaacctttcggagaacatcgatcgatcacgtatgttacgtacgtcgcgcttagcttgctttactagctagcgtcaacaacaacaacaacaaaaaaacaaatctaaaaagaa

SEQ ID NO: 111522 - DNA, 161 bp, Zea Mays
tctttttttttatttgaaaagaaataaagaaagaaaaaatgcagtcaagtggctagcaaggtctgcgaggtgtctggcgggcgcactgatggccgcactgacctctctgtggcctcgagcagtcgctcgcagctcactcaaaggtctcaggcaaagaaaat

SEQ ID NO: 111523 - DNA, 1428 bp, Zea Mays
tacaatatgcgcaacatgagccaattaaaaaagctactttatcagttagaatctgagggcaacccaaatggtggaatataggatctttagggagctccaaatcacacccaccatatcacctggccaccaagacctccccctcttacctataaatgagaggcaaaagccagtaagccaccaaaccagtaggcaactaagacaaagtggcatactcttctctgtactagctttcttcttcctctcctcttcctcacaaacagactggatttcaacaagataatcctgaaactggagccaacaagcacacagagaaagaagagcaagaagaccggctcccagccgatacaaggtaggagtgagcagcgttagtttcatcatatcgcataggcgatatggtgacagtgagagaggagactcgcaaggggccatggacagagcaggaggacctgcaactggtatgcactgtccgtctgttcggtgaacgtcgttgggatttcattgccaaagtatcaggactcaaccggacaggcaagagctgccggctgcggtgggtcaactacctccaccctggcctcaagcgtgggcgcatgtctccccatgaagagcgcctcatccttgagctgcacgctcggtggggaaacaggtggtccaggatagcacggcgcttgccagggcgcactgacaatgagatcaagaactactggaggacacacatgaggaagaaagcacaggagaggaagaggaacatgtctccatcatcatcctcatcttcactgagttaccagtcaggctacccagatactccatcaatcattggagttaagggacaggagcttcatggtggcagtggctgcatcacaagcatcctgaagggcacccatccggacatggatggctatcccatggaccagatatggatggaaattgaggcgccagaggtgccctcggaggtgggctttgttggagggaacgaaaatgtgtgcagcagccttgccacccctctgccaccacctaccgtctgggaatactacccagaggtctgctggaagcttgacgatgagatcaagatggcaccacaatttggttatatagtgaaggagctgacccctgcttctgataccatatatattgggtctgattactaagttatacaccatcctagcagaagtgaagtgcttttgttgacacaagctttagcatggatctggatatttatctcccgcttagaattggaggcctatggctctatgcatgatttctatgtatctatctagtgtgcaagacaagatcatctcaatttgtccttgatgctatgtaacacaagggcaaaggtgctatgtctgtttactcagaataattagctattccgtgggactcctgttgggcatgaagccaagaataaattttatattgatatagatggtctta

SEQ ID NO: 111524 - DNA, 333 bp, Zea Mays
tcttaccagcgatgatgtcgcagagaaaccggctacggagcgagcaggcgctacggcggggcgacgcttcttggtctgccagcggggccacaacacgcggcaatggcacccgtggccaggctcccaatcgcacggcgcgacacacacaacgaacggcgaagcgggtatgcgtacagcggcaccaaatccgatcccagggatcacccgccactacgcgccggtcaaggatagcagcagcgaccgacggcgacatctaagcctagcagcggcggaatctctctcgagtccacccatggtgcggtcagtacacaggagggcttggctggtcgagac

SEQ ID NO: 111525 - DNA, 246 bp, Zea Mays
atggggaacagttggagtaatgatggtggaaaagacatgaaaagtagcactataccatggtttggtgaaaggagagatgaaggtgctggtacatcacagccaatcaatactggaagcaagacagatgcacccactgttgttactgaaggtgaagatgcacaagatgatctggccacatcacaggcacctaagatattcaaaaagattactccaagaaaagcaactgaactaccttatgtgtcttaa

SEQ ID NO: 111526 - DNA, 412 bp, Zea Mays
gcgagtggaggtggggttttgcaacgtgaagtcggagttgctacattaggggatgtggctcggcaatgataacatgaggcgaacctcccttcttcgtggtccagaatgtttcgaaggttgggcaaaaaccggaggcagggcagagggtcaagattggaagtcagagcttgtctgtgccttgagcccgagaacgatgacctgttgagacttttcgcatcgggctgtctatctgcttttcgtttggttcgcgtgtcggctgctttgggaagtcggagtgtgtgctctcgtgtggggttgtcgctgcctgtgttgtttggtcactctatgtcggcggtgagtgtggtgccgtgttgatgtcccaatccaaccagcgagttgagttgtatggtgttggcatgttgatgtcccaatc

SEQ ID NO: 111527 - DNA, 117 bp, Zea Mays
tttcaacatataatctatatattaacctctgtccaaattatgtgggcatcataacatggcatgaggaaataaaaatagtaaaaagaaaaaatataatggaaacaacaacaaaaaaaa

SEQ ID NO: 111528 - DNA, 564 bp, Zea Mays
tgggaattgcacatgaaatgtatgtgcggaattcatttcagggtatcacaaataaaataaagaaccaatcagttgcatatgaaatcaatacttcttttattatgagctgtatatcgcaattgcatcatagacgtgcagcttgggtcccctactgcgtgcctgtcgctctggcctcaccagtgtgacgccaaaggggtgtactccctgacaggctgcatatacccccaaatgcgcctcgagcgacaactgacaaaccacaacatccacagactttctgcaaaggcaaagcttcacttcctgcgaatcggggatggatcagttctttggacccaccagtttcacactagttctgttttgcagacttcttccccttctgcttctgtttctgcttcagttgagtgaggccaggcgctgtgatcttggcattcccgacgattgcagccaccagctcagggtctgtgcatgccttcatgagctccttctcacggttggtagcatcaggtgtgtgcaggaacaagctcatcgcggtttttgcagctgaaaccaacatacttgagcatcagg

SEQ ID NO: 111529 - DNA, 464 bp, Zea Mays
tatgaaatcaatacttcttttattatgagctgtatatcgcaattgcatcatagacgtgcagcttgggtcccctactgcgtgcctgtcgctctggcctcaccagtgtgacgccaaaggggtgtactccctgacaggctgcatatacccccaaatgcgcctcgagcgacaactgacaaaccacaacatccacagactttctgcaaaggcaaagcttcacttcctgcgaatcggggatggatcagttctttggacccaccagtttcacactagttctgttttgcagacttcttccccttctgcttctgtttctgcttcagttgagtgaggccaggcgctgtgatcttggcattcccgacgattgcagccaccagctcagggtctgtgcatgccttcatgagctccttctcacggttggtagcatcaggtgtgtgcaggaacaagctcatcgcggtttttgcagctga

SEQ ID NO: 111530 - DNA, 2815 bp, Zea Mays
atggcctccttgctgtggaagctaggtaccttgctctctgacgagcacaggcttcttagcagcgtgaaggtggatatggtgtccctgaaagccgaggtcgagggcatgcatgctttcctgaagaagatgtcggaggtggaggaccccgacgagcagtccaagtgctggatgcaggaggttcgggagctgtcctacgacatcgaggacaacatcgacagcttcatgctcactctcggctcttgtactgagtccagcagcaaacctagaggcttcaaggggtgtgttgctaggttcttgaacttgttcgcaggtgctaaggcacaccattgggctgccaaggagatccaacgtctcaaacgacaggctgtagaggctagcgatcggcgtgggaggtacagccacagggttggtgatgctgttgctgtccccagatcgagtagaacaagcatagaccctcgcttgccggcgctgtacgctgagacgacaaggctcgttggcgttgatggcccaaggaacagacttatcaagctgctgacgacagaaagagagggcacagtgacagagctgaatgtattctccatagttgggtctggtgggcttgggaagaccactcttgccagtgaagtgtaccggaggctcgaagcgcaatttgattacagagctttcgtatcagtgtcacagaaccctgatatgaagaagatattgaggcatatactctgccaccgagggtgtggcggcagcgaggaatgggatgagcagcaactcatccacgccgtaagagagttcctccaggataagaggtactttgttgtcattgacgatatatggagcacatcagcatggaggattatcagatgtgcttttcctgaaaacaactgttccagtaggatactgacaactactcgcatcgtcacagttgctaagtactgttgctctcctcaccttgaccgtgtgtatgcactgcagcctctcgatgcagctcactctgagagcttatttttaagtaggatttttggttccgaaggtagatgtcctctccatctgaaagaagcttccgacaaaatactgaagagatgtggtggcctaccactggcaatcgtcacagtcgctagcctattggccactaagggtatcacaaaagaggaatgggagaagacgctcaagtccattggttcagcacttgagattcaagatacagacgtggaagagatgaagaagattcttctgatcagctacaacgatctcccctaccacttgaagacatgcttgttgtatctaggcgtgtttcctgaagactatgagatcaagagggaccggttgataagaaggtgggtcgctgaaggctttatcaccgcagaaaggtggacaagacatggaggagataggagaatgctatttcaacgaccttatcaacaggagcatgatccagcctgttggcattcagtgtgatggtcgcgccgacgcttgccgtgtccatgacatggttcttgatctcatcgtatccaaatcagccgaagaaaactttctaaccttgtgtggtgacggggatcacaggatggcgcgacgagataaggctcgtcggctatccatcaactaccatgcccgggatggtattgtagtgccagagaatatggtcgtttctaatgttcgatccctcacaatctttgggcacgctgaggacatgtctgctctttccaacttcctgttcttgagggttctagatctagaaaacagggtggtgctggaatacaattaccttaggcacataggcaggctacgtcagctgaggtatctccgactcagttcaagaagaatagctgcgctccctgaacagataggagacctacagaacttgcagaccttggatctgaggtggacaaggctgaaaagattgccacggagcgttgttctgctacgccgactgacatgcttgctggtcaacagtttagaattgcccgaagggattgggaacatgcaagctctgcaggaattgtcagagatcgaaatcaatcgtcacacaccagtgtcttccttgctggaactgggcaagctgacgaatttgagaatccttgggataaactggtgcatcatcgacgcagatcatgatgcaagaaaggtccacgcggacagtttggttacgtccctctgcaagttaggcgtgctcagccttcggtcgatacagatccagagctaccacacctgttctctggacttcttgcaggattcttggttcccacctcctcgccgcctccagaaattcgacatgtccatagattaccatttcccccgaaccccgaagtggatggtctcgctggagtacctcagctacctggacatatacctcactccggtggacgaggagtcgttccgaaccctgggggacctgccgtccctgctgttcctctggatatcctcgagagaggccaggcctggagaaggcgtcgctgtcggcagccacggtttccgttgcctcagggagttctacttcacctgctgggaagtcgggaccgggctggctttcgaaccgggggccatgccggcgctcgagaagctccggatcccatgcaacgcgcgtggcgcgtgctcttcgcatgccggtgttcgggatctcggaatcgggcgcctctcctcctccctgaggcacctccaggttgagatcgtttgccgtggcgcgaggctccaggaagtggaggccgtggaggaagctgtccggaacgccgccagcgagatttctgacgagctcttccttggcgtgagtaggtgggatgaagaagagatcttgaaggacgaggagcataagctagaggaagcggag

SEQ ID NO: 111531 - DNA, 1356 bp, Zea Mays
cctagccgtcacacccaacagccagccacccttctcccccacgccatcctcctccctctctcccacacggcagcaggcagggcgccatctcctagcagctcctcccatggcgtcctctgcccttcttctcctccatggccgccgaagcccctcccatggccgacgctctctgctccagcccctccagcagctatggcgtcccccctcctccccttcttcttcctcaagccagcaggcacctccctctactccctgcgcgcagcagcagccatggcgctgcctctcttctccatggcgagtagcagctcattcacctctctctcccatggcgtgctgctccagtcggcctcccttctccccctcggctccttcctccaggccgggctcctatgccaggaacggctgctccacttgaccgctgctccattttttttcccctcgctctgctctctcggctgctggcagccagggcgcgacgcctctgctccttctctctaccccacaaaacagccagcgcgcaggagcttcttctccatggacgcccagaatcccagcagcgagcccccttcctcgctgttcgtcgtggtgcccgccggctgttcggcaaaatgcgcagcaagccacgcactgcagcagcttcgtcccttgccttgcgttgtgtcgagcttcgctactgcacatctcccataaaaaaacagcagcccctccgcgtcacgcgctcgactcgctgcgctcgcccgcgtggtgtcgcagtaggacagcagtcgtgtcgcattcgccatcgacctcgccttcgtgtacaccccctcgcagcagcgccaacatagcagccgcgacactcccctccaccccgcactcgccacgctcaacaaaaatgccccctcgcgtagctacacacttgttgttgctgcacgttgttcgtcgacgcgcagccccttcgcgccgtgcccgtgatgtcgtcgttcttgctgttttgtcgcgccaatcgacagccgcagcagcccctccgtggcgtgtgctccaccttgacacgccctcggtgcccgtcgtgctccttcgacttcgcttcggtctcccatgatcgacgacgcgttcgtcttcacgccacatgtgcagcaaccacgaccgaggtttgatatggtgagctgatgtgttattttgtgttagatcggatatatatatgtggctgcgatagttattttgtgcgtcgtaggggttgatcgcggatgtataaattgtttgctagaatgcttcgttgtaaaataatgtgttagtgtggcaaaaatttgataaaacctaaagcatgtttggtgacttccgcactcgactaatgagttagtctatattaattttttt

SEQ ID NO: 111532 - DNA, 660 bp, Zea Mays
atggacaagagccctggtgctgcttctcacttacgtctttcctcgttggtgaaccgcggaatatatgaggccttggagttgagggatggaggatctgattatcttggcaagggtgttcttaaggagatggcggtcacgatcacgtgggtgaagacgagacagatcttcatcagccgcggcaaccccaccgtcgaggtggacgtgggcctcagggatggcagctacgcgaggggggccgtacccagcggcgtatccactgttgaaaccaagagttgtctctcccaaggacgcatttcatcaccatcactaagcaacgcatgggcacatcaccagggtataagcttttttttgctattctaccttttttctctcttaccctgtttgttttctgaaattcgtcagttggttagtttttagctttctgaaaggctgaaagcaagatccgatccagcaaagccttttgactttctccctttcacttctacgtgcctttgcataattgtccatttttttaaaaaaatactacagcaagtagtacacgtttatttaccaaaccataaagcttcctgtgctgcgaaacagtagtatctggggaaggttatgtgtatgtcacagtactaacacagtggatcagaactaagcacagcagatcagatcaga

SEQ ID NO: 111533 - DNA, 1551 bp, Zea Mays
cccacggaggaagaatcttcaggggttccaaaatcgcccaacgacggcggccgcttcaaggaggggctgcgcggcggcggcggaggcggcggcggggatggccccttccgtcgggaggacagctcacatcggcccaagcccaattttccgtcctatgatggcgaatcggaccccctggcgtggctgacaaaatgtcatatatacttccgcggcatgaggacactgcgcgaggaacgggtctggatggcgtccctgcacctcgacggagttgctgctggatggtactacaccattgagcgcgactacggcgacattacctggggccgtttctctgaattgatcagtcttaggttcggccccccactgtgcatgaatggcctcgctgacctcaaggatctctatcgcactggaacagtggatgattatacacgtcaattttccttgctgctttgccgttgtgacaatctttcgcagcgtcaacagaccaacctcttcactgttggcttgggtgagccattgaggacagacgtcgaactccaagggccaactaatttgcagtcagcaatccaccttgctcgagcatatgagcgtcgcatggcgctggctgtaagcacacactccacggcgcgccctgcagcccgtggcgtgagtacgcatattaaatcagttgttggcaaccaacgccctcggttcaagcgtctttccaatgaagaattagcagcaaagcgggctagtggtgagtgctaccattgtactgaaaagtatactgccgatcacagatgtgcaaacaaaggggttttcttgttggaattagcagaagatgatgagggtggtgaaacattggatgatgttggcatctctctccatgctctcaccggttttgatattggcactaccatgaaactttctgtttgtttgtatggtcgtcagttagtggccctcgtggacactggttcgacacattccttcatcaatgattctgtggtcagccagctgcagcttcaagttgaacctcgtccaggtctgatggtgaaggtggccaacggagatcgggtaactactgcaggtgtgtgcactcaactgcctctagttattggagaagctgatttctcgatatccttctataccctaccactggatggatttgacattgtattaggtgtccattggcttcgcactctcggaccaatctggtggaattttgaggccctctccatgtcattcttatatcgaggtagtaccattcagtggactggaattggtgctctgccaccatagtgtgcagctttagcatcaggaggtgatctcatggaggctttgctccattcctttgaggatattttcagggaacctcacagcctccctccatctcgccgccatgaccacaagatcatattactgcccggtactccacctgtggcagtacgaccatatcggtaccctcaattgttgaaggatgaaatagagcagcagtgtgacgctatgttacagcaaggtatcattagagaatgcacctccgctttttcatccctagtgcttcttgtgaaaaag

SEQ ID NO: 111534 - DNA, 944 bp, Zea Mays
tctttgtgaattgacagtggtgtgcccctcccctgccacttcctatatatctgccctctatcgcaactccgttgctctgtagcggttacctccctttcgctctactgctctctctctctctctggaccttgccgttctctccctcgtcggcaatcagcccgcttcctgtgctctctatgctccccttccgttcgtagcctcggccttcgtctccctccatggacccgcgctaaatgcatcgcgagattccaaaccggtagcgtttcttcctgctccatccgccgcaagatgtaagcaagggcctcacttcacacccggagtgggagaccatccagaatacatcctcagatcttcttgtgtctgagaaaaaagcgacgcccttcaatggaggagagcttcgtgcccttgcggggcatcaagaacgacctccacgggaggctcgcctgctacaagcaggactgggccggagggttccgtgccggtatcaggatcctggcgccgacgacctacatattcttcgcgtccgcgataccggtcatatcgttcggggagcaattggagaggaacactgatggagtcctcacggcagtgcagacgttggcatccactgcgctgtgcggcgtaatccactccatcgtgggagggcagccgctgctgatcctgggagtcgccgaaccgacggtgctcatgtacacattcatgttcagcttcgccaaggacaggcccgacctcgggcggagtctgttcctggcctggaccggttgggtttgcgtgtggactgccatcctactcttcttgctggccatactaggcgcgtgctccatcatcaaccggttcacccgcgtcgctggcgagctgtttgggcttctgatcgctatgctcttcatgcagcaggctatcaaggttggtgaaagctgcagggcttttcggtttcaagccatttg

SEQ ID NO: 111535 - DNA, 2979 bp, Zea Mays
tctttgtgaattgacagtggtgtgcccctcccctgccacttcctatatatctgccctctatcgcaactccgttgctctgtagcggttacctccctttcgctctactgctctctctctctctctggaccttgccgttctctccctcgtcggcaatcagcccgcttcctgtgctctctatgctccccttccgttcgtagcctcggccttcgtctccctccatggacccgcgctaaatgcatcgcgagattccaaaccggtagcgtttcttcctgctccatccgccgcaagatgtaagcaagggcctcacttcacacccggagtgggagaccatccagaatacatcctcagatcttcttgtgtctgagaaaaaagcgacgcccttcaatggaggagagcttcgtgcccttgcggggcatcaagaacgacctccacgggaggctcgcctgctacaagcaggactgggccggagggttccgtgccggtatcaggatcctggcgccgacgacctacatattcttcgcgtccgcgataccggtcatatcgttcggggagcaattggagaggaacactgatggagtcctcacggcagtgcagacgttggcatccactgcgctgtgcggcgtaatccactccatcgtgggagggcagccgctgctgatcctgggagtcgccgaaccgacggtgctcatgtacacattcatgttcagcttcgccaaggacaggcccgacctcgggcggagtctgttcctggcctggaccggttgggtttgcgtgtggactgccatcctactcttcttgctggccatactaggcgcgtgctccatcatcaaccggttcacccgcgtcgctggcgagctgtttgggcttctgatcgctatgctcttcatgcagcaggctatcaagggacttatcgatgagttccgcattcctgagagggaagaccgaaaggcgctagagtttgttccatcatggcggtttgccaacggaatgtttgcaattgtgttgtcgtttggccttttactcactgccctgaggagcaggaaggcacggtcatggcgctatggagcaggttggctgcgtggcttcatcgctgactatggtgttccactgatggtgctagtttggactggagtgtcttacataccatatggaaatgtaccaaaagcaattccgcgacgccttttcagtcctaatccatggtcccctggtgcatacgataactggacagtcatcaaggatatgacacaagttccactcctctacatcattggtgccttcataccagcaacaatgattgctgttctctactacttcgatcatagcgttgcatctcagcttgctcagcagaaagagttcaatttgaggaaacctccatccttccactatgatttgcttctcttaggcttcctgacgttaatgtgtggccttattggtatccctccatcaaatggtgtcattccacaatcacccatgcacacgaagagtttggctactctcaagcatcagctgcttcgtaaccggctagtagccactgcacgaaagagcatgagccagaatgcgagcttgagccaactgtatggcagcatgcaggatgcttatcagcagatgcagacaccactggtttatcagcaacagtctgtcagaagaggcttaaatgagctcaaggactcaacagtccagctagcttcgagtatgggtaacattgatgcaccagttgatgagacagtctttgacatagagaaagaaattgatgatctgcttcccattgaggtcaaggagcagcgcttgagcaacttgctacaggcttccatggtgggtggttgtgtcgctgctatgccactactcaagaagatccctacatctgtcctctggggctattttgccttcatggccattgagagcttgcctggtaaccagttttgggaaaggatcttgctgctcttcactgctcccagcagaagatacaaggtgcttgaagagtaccacaccacgttcgtcgagacagtgccattcaagacgatagccatgttcacaatgttccagacagcgtacctgttggtctgctttggaatcacatggattccaatagctggagttcttttccccctcatgatcatgctcctggttccagtcaggcagtacatcctccccaagctcttcaaaggtgcgcatctaactgacctagatgcagctgaatatgaggaatcgccggctataccattcagccttgctgcgcaagacatcgatgttgcattcggaaacacccagagtgcagaaatcctagacaacatggtcacaagaagccggggtgagatcaaacgcatcaacagcccgaagatcaccagctcaggtggcacgcctgtggcagaactgaaaggcatccgcagcccatccatttctgaaaaagcatacagccctcgtgtcattgagctctggcatgagcgcagccctaggacgccgtccatgctgggtgaaggctcaacaccaaagtgaatgaaagcaacgatacattgcttaagctattcaaccactggtcatcagttatatgagtggttttaaagtggtttcagtgttagtatccttatatgaagatgtcctctgatgagattactacttatgtgtatctccagtctctcttttttttgttctcctgattaaaggagtgatatacctgtaatctctgaactagcagaatattagagtggctacttgaaaaatcatgtcactagcatattatcattctttaattgtctataatcattgatactatattactatgtacatgaaattggtggaaattatgcacatgcatttccattgaacccaagcatgtatctggattctggaatactcaaatgctcacaatattccattgacggcggtggtgaagcatggaactttatagaccctgcttcccttctgaatttgcacacattttgcatttttgctagttgtaacaagttctcttgcttcttttta

SEQ ID NO: 111536 - DNA, 111 bp, Zea Mays
tggcattatccaatgagtctccgtcgtgtggagtgcttagaccagttcatcttctaccgagaacggaacgtggatcagagttccgcccggatttttctcgccgaaaaccaa

SEQ ID NO: 111537 - DNA, 111 bp, Zea Mays
cttgaacttggagatttttaaaaggaattcagaaaaggattctcaattcacaatctactttgtaaagcataaagacgaatacacagtagcaatggaatgaaatatttggcc

SEQ ID NO: 111538 - DNA, 5385 bp, Zea Mays
atggcgctgatgatgacgccgttgctgacccgccgcggctcctgccgactcctcagcgacgacttcatcccgccctccgcccgcacgcccagatctgggggccgcaccacgcccaaagcagcagtccctctactcctggggaggagagcgggcgaggtggcagggaacgggaacgccagacgaagaaggaagggacaagggagggaggaagcagaaggagactgcgagatcccagaatataacagaactgcggccgccgaagatgctcggattggaaggggctcggatgggggcatggggcggaggcgtccgttgatggcggcgcggatggagtcgcgaggtggggcagaggagagggagcgcgtccgtgcccgtcgcggagaggatggaaggggcgcggatggggcggaggagacagaggcaatggcatcagtcgcggagaggaaggcgtcagtcgcggagaggagagggaggcgtcagcgatggggtgctactcctgcaaggaaatctagtatgactgttctgggaaaagtcccaaaaccgattaatttaccaagtcagaggttggaaaacaatggtcttgatcccaatctggaactggttccaaagggcacccacacctggggcagcaaagcaccatctacaacaccaaacgcatggagttcctcatcaattctgtcttccaagaacgatggaagttccacttcatctagtcacttcaatgtccggcccacctctggcggaggctcaaggccatcaacagctggaagtgaatcacttggttcacccaatgcttggggtgcaaattctcgcccatcttcagcatcaggcacatttccatcatctcatctaccaatggccacaaatcgtccccaaagtgcggaaacaagacctggaagttcacaaatttctcgatttgcggataatgcttcagataatgtgaaagcatcgataaggactattgatagatcggaatcttcatcacgtgggcctgggttcacattaagtactggtgatttcccaacgcttggctctgaagcaaacagtcaacgagggcatagttcgaaagggcgcccaacttctagtttgggtaaagaggtgtcgcaaggtgaacaagtgaagagcctagcaactggaactggtgaagtaatttcaccatccaataatcaccctgttgatatcatgaagacagagcatcatgcacacactggaggtgctcctgtcccagccacaagtgtgccaaatgaaggcttgcaacaacagccatatccaccaaattttcctatgcctcctctgcagtttgattcatggcgtgcacctcctggtcacccccctgagggaatgtggcatagaggaccagtgccaggtgggccatacagacctgttggcccccctggtagtttccctgtcgaaccctttggttattatggccagttcccacccaactccgaagctgcaggaaggcagggctcagggcatggtggatatcacactaaaaatgatgtgtatcatcctatgcctcataattcctatattatgaatcagcctgttattccagtcagaccagtttatcagggtccagtgctgtatgatgggtattatggccctcaagcaaatttcaataacaccaatgttagagatcctcattttgttggaggtcctggaatactaaatcaattcccaaatcagaatgacaggtttcaccctggacatcctcaaaacagaccaggcaaacatgaaacggtcccaagggagcagctggaatctgataagctacatgtctttcaccaagaacaccctgggagtttgcatgataatccagatcgtctaggaggttcccgtgaatttgaaaggaatgtgcagccagcaccgccacttcttccacatcctgatggaaaacagactgatatgaacatgagggcagatacaagggacacctttagtgagactgaaagaaccgtggtacttacaaaatcggtgcctaaccagagaggttcggttggtatagaccatttgtctgtttatgaaaacacacgatcccatcacagagaaacttgtgatggcactctgcgcaagaagttcaaggaggatagctcagttgtacttgaccagcatcctgtcattaagaagaatgcagctttaatagagaaaattgagagtttgaacaacaaagccagaaatgtctatgcacagaatctcccagaaccagcttcatccaaggaattcaagaagcataaaaaaactactgatgtttcatctaatgatgtcatcagtacgacatgcacatctgatcaggcagtttctgtttcacatatttctgctgtggtgcagagacgaccaaatgtgaccattgagggtacaattcttggaccggcacattcacatttaactgaatttagcaaagctgagaagcttggtgattcaattaacaatcatttacataggagagttgattcttcgagaaacagttaccatggtccttgtaaagataggccagctaataaattcggaagttgtggacgtggagaaagttacataactaattcattaccagtagctgatttggggaatgatatccatcatggccaacaacctcagattgcctcacagctgcaacctgtgattgtacctgatgatatgccagcttcactcgattatgagtctcagaacaaaaagcaggatgcagcatcaaatgctcaaaacaatcagcgggcaaaaatgaaggagttggctgcagaacgtgcaaaaaggatgaaagctgaggaagaggaacggataaagaaccaaaaagcaaaagcactcgcaaagttggaagaattgaacaggcgatcatcagtacttcagaagaaatcaaatgatacaaaagtagaaactgatgatgcacatgataagcaacagattggacttgatgtgaatgctaaacttgacacttcaactgaacaacatgatgttgttacgcctgataggcttactgctcttctgcctcctaatgatcccaatcatactatggttcagatacaggcccagtctactgcacaatcaaatgctttagatggtggcaaagcgcatgatgctcataccacctcatctttggtcaagaacacacacagcaacatggagcatgttgtgcagaagagtatctcacagtcgcataatatcagtatggtaaagactaagcaaggctacaggaaaagacaggttgtttcagaggagaaaatttctggcgagaaggcaagtgcttcagtaaccactgattccagtgtgcagaaaaatgttgatgttcccgtcgacacagtaacggctgttgttgcaccacatgatgatcccccaactcagaacaagaagggaacccggcatttgaggagtaagaaaaaggtagatgatgcttcagttatttctaaacatccacctgtggtgtttaatgaacagaatacagtgaaaatctctaccgagccaaaaacacatactggtggtgttattatcagtagctctattgttccgattgaaggtactattgtaactgttggaagtataactgttggtggactttcacttacagctatgaatcaggagcatgttaattcagcagatggaacaaatagtactgaaagtggcctatcaagacctcagcaagcaagaaaatctggaaagcatcagcatgttcttcggcctgttgagaagccacatgggaatgatggtgtcttgtgggcaccagatatgctaccattgcataatgagcagtctgatggagccatgccgactgcagcagtagctgacgtcactcagccagctgggaaagccatcaatgatggagagaatgtgacaagaacaaagagggctgaaatggaaagatatgttcccaagcctatgtccaaagagctgcaacaacataatccaagccatgataaggaagcaattgataagcccggtgctgctaaatcacatcctgcagccgaacccaagaaaactagcaaaggacatgggggcaaatctaatccttcttggcgcaagcgggatccagatcaacctgctatggtggcaccaaattctgttgaccaagcagacaactcttatgaatcaaaggaggttcagaactgcaccgatatgaatcagcctgttgaacttggcaaggaagatacacagttaaaatccaatgtagatgctgctgctgagaatagctcagctccagctcaaactgttccactatctgccggtggtgcaaaagaacatagtgcggctaacaggcaaaggcgacagcattttaaggctcaaagaaatgaagcaagtagctactcaaatgagagcaaagttagagagggcaagaacgactctgtctatcaatcagcatcaccggtgattgattcgaactcatccaatcacaagaatgtgccaagatcagatgtgaaaaacagcggcatagtttcacattctagagcctggaagccgaaaaccaattcccatcctcagaacagctcagacggcaagattgctgttgaagggaaagtggattcccatggtggtaggcttgagctgaacatgcccaaaggatctgatacaattacccatcaagacaccagcagtaaaccgatgaaaaggagtgatggcaccgatgaggcctcacacagcaaacaggagaacctgacacaggaagatggtaaccagaagatcgagactggacaggagcaggctaatcctgcaccgcgtcgccaaggccagcccaatgcaaggtatcacaggggaggtggggcacacaggggaaggggcggttatgacactgggaggccaaaccatggcacaaacgcggagaggtggaagggtggcagccatcttgaataccagccggtcggatcccaaaacaaagctggaggcgacttccagctgagtcagggcatggaagatcgaaccgaggggcctcctgcatctggacaagcgttcggggagcgtggccacagcagggggctacgcccagcaggccgctttgtccggcgaaacactgcctctacgtctaccactaattctcaccaacatgaataatcttccgcggctgccacatccgctgagctgcaggaaaaaactcgccttcgtggtggcgtttcacaacatatttggatgcacttgggtgggcggttggtgtccgtcgtcaacgacgagtctacggtggtgagcattaggatcatgtaacggtattagtctttgccccaaagggcacaccctggcccctcacgtgtcacgtgtgactagattttttccagaggaacatccacccttgtttgggatgcaacgttggaacgtgtgctaacagagttgtgtttgagaactgggtttaaatgttgttagcctgtgttgctgatgggaactgagagtgttggtttttgcccaactttc

SEQ ID NO: 111539 - DNA, 1760 bp, Zea Mays
ggtcgcggctgcccgccgcttttcccttcttccgttgcggcctcgctataaaaaccgtccgtccagtccgcgccgcggccgcgcacggcgaacccgaatcccgagcacaggccgccgctcgctcgctcgctgcagctacgcacgcacgcgcctgctcctccccttagcttccacaaggctcgactcggccggcggcgatggcgcggaagaagatccgggagtacgactccaagcgcctcctccgggagcacctcaagcgcctcgccggcatcgacctccagatcctctccgcgcaggtcacacagtcaacggatttcactgagcttgcaaaccaggagccgtggctctcatctatgaagttggttgtgaaacctgacatgctctttgggaaacgtgggaagagtgggcttgtggccctcaacctagatcttgcccaagttcgccaatttgtcaaggagcggttgggagttgaggtcgagatgggtggctgcaaagctccaattacaaccttcatagttgaaccatttgtgccacatgaccaagagtactacctttcgattgtatctgaaaggcttggcaacaccattagtttctcagaatgtggaggtattgagatcgaggagaactgggacaaggttaagactatctttcttcccacagagaagcaaatgacacctgacgcatgtgctccattgattgccaccctgccattggaggtccgcacaaagataggtggtttcattagagctgtattttctgttttccaagacttggatttctcatttcttgagatgaacccattcaccttggtaaatggtgaaccgtatcctctggatatgagaggagaactagatgacacagctgctttcaaaaacttcaataagtggggcaatattgtgtttcccctaccatttggaagagttctcagtccctccgaaagttttatccatgaactggatgagaagacaagtgcttctctgaaattcacggtactgaacccaaaaggacgcatctggacaatggttgcaggtggtggtgctagtgtcatatacgcagacactgttggtgatttgggatatgcttcggagctaggaaattatgcagagtacagtggagctcccaaggaggaggaggttctgcagtatgctagagtgcttttggattgcgctacctctgatcctgatggccgtaagagagcccttctaatcggaggaggaatcgctaacttcacagatgttgcttctacatttagtggcatcattcgggctttaagagagaaggagtccaaattaaaggctgcaaggatgaacatttatgtccggagaggtggtccgaactaccaaactggactcgccaaaatgcgcaccctaggcgccgaacttggcgttccaattgaggtctatggaccagaggcgaccatgactgggatctgcaaagaagccattgattgcatcatggccgcgtaaatcacaaatgtggttgttccatttgaagtcacatccgttttgtactagacgttccttgtacgtgattgctctggtaaaacagagaacgatcattgtcatgagtaaactcggcctttgtaacacagttacgcaagtaataattaagatcttggtttggtgctctgccacccttctagggtgggccggtgaggtgaatgtacaaataacaatgcactttgtgatccaccagattgcagtgctctggtatttctagggtcttgtactgcctgtgctgttttgtgttgtttgtttctc

SEQ ID NO: 111540 - DNA, 728 bp, Zea Mays
agatctactgctacaccaaactcacctctgcttcggtcgttacacgcgtgctcgtcaggagttcaggcgcggcgagcaggggggcgggggagaagcagccggactcgttagcccagtcggcagtcgccatgggcatcggctacgtagtgggcgtcctcggcggcgccatcctcgcccacgccgcctacgccaccatccagtaccgcgcggtgctcaagatcacggaggaggagttctcgcggccgcccatggatgtgatgatggagttgctcttagggttggtcttgtgcatgtgggcaggtcttgctgttcccactaaatttctctcggtgcttccacattctgatgagaataggatcgtctcgctcccggctaacctggatttcatgatcttcaaccaccgtggaagagcgctgccgtcagactcagacctgaaactccatacatagacatgtccagaatccagatcttttttctttattttctgtaaggccttgttcggttattcctattacacatggattagatgagattggaaaaaattaaaaataaatttgacttgcttgagatttaaacttacccaattcaactcaatccatatggattgagagcgaaccgaacaagccctaacctgcaggttccagtttgtggccattagtttagtggggagggggtgggaggactttccaaggccataagtaggttatctacgctgtaattcgccaatt

SEQ ID NO: 111541 - DNA, 1010 bp, Zea Mays
agatctactgctacaccaaactcacctctgcttcggtcgttacacgcgtgctcgtcaggagttcaggcgcggcgagcaggggggcgggggagaagcagccggactcgttagcccagtcggcagtcgccatgggcatcggctacgtagtgggcgtcctcggcggcgccatcctcgcccacgccgcctacgccaccatccagtgtacgctccatccttgtcccatcccgtcgccgcgctctcaccaaatttcgccgtggatctccgtttcccgagggcgcctttgatttgccgtcttgactctgggttgccgttccgtcgtgggttctcggtccttcggaacccgatgtgctctcggatcgatcccgccgttgagcctttagtgaagtgaggcgaggtttagatctagttcacgagcttctgtgatcctgggctctcttcaccgaccgggttcgacggctgcgtggttggctcagcagtgcacccaccgcgcggtgctcaagatcacggaggaggagttctcgcggccgcccatggatgtgatgatggagttgctcttagggttggtcttgtgcatgtgggcaggtcttgctgttcccactaaatttctctcggtgcttccacattctgatgagaataggatcgtctcgctcccggctaacctggatttcatgatcttcaaccaccgtggaagagcgctgccgtcagactcagacctgaaactccatacatagacatgtccagaatccagatcttttttctttattttctgtaaggccttgttcggttattcctattacacatggattagatgagattggaaaaaattaaaaataaatttgacttgcttgagatttaaacttacccaattcaactcaatccatatggattgagagcgaaccgaacaagccctaacctgcaggttccagtttgtggccattagtttagtggggagggggtgggaggactttccaaggccataagtaggttatctacgctgtaattcgccaatt

SEQ ID NO: 111542 - DNA, 762 bp, Zea Mays
agatctactgctacaccaaactcacctctgcttcggagttcaggcgcggcgagcaggggggcgggggagaagcagccggactcgttagcccagtcggcagtcgccatgggcatcggctacgtagtgggcgtcctcggcggcgccatcctcgcccacgccgcctacgccaccatccagtaccgcgcggtgctcaagatcacggaggaggagttctcgcggccgcccatggatgtgatgatggagttgctcttagggttggtcttgtgcatgtgggcaggtcttgctgttcccactaaatttctctcggtgcttccacattctgatgagaataggatcgtctcgctcccggctaacctggatttcatgatcttcaaccaccgtggaagagcgctgccgtcagactcagacctgaaactccatacatagacatgtccagaatccagatcttttttctttattttctgtaaggccttgttcggttattcctattacacatggattagatgagattggaaaaaattaaaaataaatttgacttgcttgagatttaaacttacccaattcaactcaatccatatggattgagagcgaaccgaacaagccctaacctgcaggttccagtttgtggccattagtttagtggggagggggtgggaggactttccaaggccataagtaggttatctacgctgtaattcgccaatttgtggcgccctagagcctatttgatcccatgagctaaagcaaactcactaaaataag

SEQ ID NO: 111543 - DNA, 574 bp, Zea Mays
ttattcaattcatgatctctgacagtttattagtacatgtatttataagccattagataagccagattacaatttaaaaaaagccacacaatgacccagattaactctaatgcttctagaaccacgtagatctacagatctacactcacctctgcttcggtcgttacacgcgtgctcgtcaggagttcaggcgcggcgagcaggggggcgggggagaagcagccggactcgttagcccagtcggcagtcgccatgggcatcggctacgtagtgggcgtcctcggcggcgccatcctcgcccacgccgcctacgccaccatccagtaccgcgcggtgctcaagatcacggaggaggagttctcgcggccgcccatggatgtgatgatggagttgctcttagggttggtcttgtgcatgtgggcaggtcttgctgttcccactaaatttctctcggtgcttccacattctgatgagaataggtgagcctatcttgtcctctgtattttgtaaggttgttacatggtgatgtaggtgattgtcagaaatccaggaagtgaacctagttcaactggtt

SEQ ID NO: 111544 - DNA, 1315 bp, Zea Mays
atttcatttcgttcggcgtccccacacggccacaccggaaaaaagaccccggcaagaacctcgctctccggcgtctccggccaatacccatggaggccaccgcagtgccgagggctctgttcctattcgggacatcgccggcgccgtatcgtatgcgtatgaactgcttgcgcgtagctattggaggagatgtgaggcggcagggggccgtggcagtgtgggcgaagaagaagagggggagggggcgggatagcgagacggaggaacgggtggacacgcacagcttcacccccaagccgggcgaggctgccgggctgttccccgaggccgtcctgcttagaaagaaaatggtgagagaggatggtcaagtgtcaccagaatttgctgatgcagacgaagaaaagctgtatgattttcttaatattgagctagaaagtgatttaaatctgaaaagaatgcggcactatgaagtagtttatctaattcatgaggaccgtgttgaagaagttgaaaatgttgtatcaaaagtacaagattttatcagggagaagaaaggaaggatatggaggcttaacaattgggggctgcgcaggcttgcttacaaaataaagaaagcaacacatgccaattacattttaatgaactttgagatagagtcaagatacatcaatgacttcaagaccctgctagacaaggatgagaggatcatcagacatctggttatgaaacgggatgaggcaattactgaagattgccctcccccaccagtatttcacactctgcgagctcaacaatattttgatgatgaatatgaagatgagggggaagaggaagaggatgaggatgctaggagtgagccaaagtctgccaattatgatgaggatgatgttgaagctgatgatgagcctgaaattatttatgtcgatgaagctgatgaggataattacgaagacactagaagaaggaacacaaagctaaaggtgaagaagtatacatcagagaaggtattgaggcagcattagtgtatggttttccacttagtttaagtctttttagctcttatagaaaggactatctgtgtctgtatgatgaggaagtttcacttaggtgtttttttctgatgccaaggaccactgcatgataatgagataggtatatgtgctatggttggtacagcccttgtaaatgctttctttagtgcacctttgtttttgtgcaactttattttccaaggaaaccaaaagcttaaatactatattattagtttgaatacagccttctcggactgcaaataaggtatgagtacacgcaaaga

SEQ ID NO: 111545 - DNA, 1732 bp, Zea Mays
tataggtataatgccgtgtgtttaggcattagctatatatatagtcgccaggtggtgtgcaagtgcaatgcagtagcggctagctagcaacaaagcccagagcacgtagtaggtctccatggcgtggaagatgttgcctgcggctagcgagctcttccccgcgatcgtccgggccggcacagccactcctccccggccacagccaccagccgcacgcaacagcccatcgcccaccgtccacaggcacgcccctcccgcggcacggcttggcagcgcggggacggtgctggtggtcgacgtcgacggcgccctgctcctgtcgcgttccctcttcccctacttcatgctggtcgcgctcgaggccggcagcttcctccgcggcctcgtcctgctgctcctctaccccgccatccgctgctgctactgctgcctcggcggcggcgacctggccgtgcgggccatggccgcggtcgccttctgcggcctgcgcgcgcggacgttccgcgccggccgcgccgtcctgccgcggtggctcctggaggacgtggcggccgaggcgctcgaggccgcgcggcgtgtcggcgacccggctcgggttgtgtgggccagcgccatgccgcgcgtgatggtggagcccttcctcagggagtacctgcaggtgccggccgcggccgccgtcgccgcgagggagatgaagacggcgtgggggttctacactggtctcatggagggaggtggtgaagactgcgaggcgacgatggcactgatgacgaagaggacgtcggcgggggaaggcgccggcgacgtcgaggtgtacgtggtatgcccggaggagaagagcaagtggcggcgcctggcgcggcgcgactaccccaccccgctggtcttccacgacggccggctcgcgtttctgccgacgccactcaacacggtggccatgttcacgtggcttcctctgggcgccgcgctcgccatcctccgcctggccgtcgcgctcgcgctgccgtacaaggtcgccacggcgctgctggccgccactggccagtcgtggcgcctccgcggctcactcccgccgccgggaaacagcggcgggtccgggcagctgtacgcgtgcaaccaccgcacgctgatcgaccccgtgtacgtgtccatcgcgctggaccggcccgtgcgcgccgtgtcctacagcctgagccgcgtgtccgacctcatctccccgatcggcgccaccgtgcggctggcccgggaccgcgcgcgcgacggcgccgccatggcgcgcctgctggcccgcggcgacagcgtggtggtgtgccccgagggcaccacgtgccgcgagccgtacctgctccgcttcagcccgctgttcgcggagctcggcggcgccggcggcgtggtgcccgtggcgctggcggccgaggcctccatgttctacggcaccacggcgagcgggtggaaggccgccgaccccttctacttcctgtgcaaccccagggtgtgctacacggtgcagttcctgaagagggtggacacggcggacgtggcgggcgacgggaagaagaagaaggcggcggccagcagcgtcgacgtggccaaccgcgtgcagcggctcatcgcggacgcgctcgggtacgagtgcaccatgctcaccaggaaggacaagtacctcatgctcgtcggcaacgacggcgccgttgccgcgccgcgttgccgccagcggcaagtaactaattaa

SEQ ID NO: 111546 - DNA, 1064 bp, Zea Mays
aatcgattattaattgaccacgtctccttctatttaccccggaccctaaccaaactctaacctccatttcttcccttcgccatgacgccgccgccgccgccgtgcctcgcctgcctcctcaccctcctcctcctcgccgccgcggcggcgccaccggccggcgccatctgcgtcccgcgcaatcccggtggccacagcaagccaggagcgccggccaagcccgcgccaccgaagccgaagcctctcacgcccgcggcgccggcgccgccgaagctgacgccgatggccccaggcgccgacatcgtgcggagcctgtgcctgaagaccgactaccccgacctgtgcatgtcggccatcgcgaagcagccgcagccgcagctgccggtcgggaagcggctggacggcgccggcgtgctgcggctggccatgggcgccgtgcgcaccaaggccgccgaggccaaggccgcggcgggcgcgctcgccaacgacccccggacgcagccgctggcgcgcggcccgctgcacgactgcgtcgagtcgttcgacgacatcgcctacagcctcgaccaggccgccaagtccctcgccgccggcgaccgcgacaccaccggcaccatgctcgacaccgtgcgcaccgacgtggacacctgcgaccagggcttcgaggagcgcgaggagctcacgccggtcatggccaagcacgacgccgagctcgccaagctctccagcaactgcctcgccatcgccaccgccgccggcttgcgctagatcgcctgtgcatgtgctagctcctaggcaacaacaacaataatatatataccgccaccttataattaactctccacgcatcagagaagcttcacacatgcaccaaacttgtgcatccatggatatccaagaagaagatgtagttagtgcaagcgttccggttatttcgttttccttttactcctcttcattccttctaccttcaccaagaactgattgttgactgacagcacctacaagagtttatgtaaattttatttaaatccgataattataatcctaaacttgatcatgtt

SEQ ID NO: 111547 - DNA, 327 bp, Zea Mays
caggtaaccttcagggcaacatattggtgccgcttctggtctcagcttcagcctagaagggaggaccaagagttaataaagtcttcatgtcgtaatgtggagagggtgctactacagttctttagcaattttggatgggggtctgcgttgcgtttaaatatgtagtagctgtggttcgatagctgaagttctttaatttggctagttggggttctctgaagtggtcataggaggagttttggcaatatgcttccgtcccttgtaataaatggccgtaacctcatttaaggccaaggtcggatgatttttccattatctaaaaaaaaa

SEQ ID NO: 111548 - DNA, 1528 bp, Zea Mays
atctgccccatccggccgtccgtcatccaacttcgccccactcttctcggacctccacctgcggcggcggtagaggtcacgtagccctcgtcgctcgtcggagcgtcttggatccttccttgaccctactcatctcagattccggccagatggaaggcggcgagggatccggattcgatggggcacacatgaagaagcggcggagcagcgcggtgaggcggccgaggccggagggcggccctgccgcggtgcagcgggacaacggctcccctccgccgctgtcggtgacatccaggagcgccccgaggagtctgctgttgacttcggacgagaacgccaccggccccgacgggggcaaccgtaggcgtgagttcctcctgaacgctccgtcgccggagcgcgcgaccaaggggagcatccggctgcgttccgaggccgcagccggtggctccaggaagagcgacggtagcagccatgcccctgaggggaaccgtgagaagctggggaaggtgaagctcaagattcgtaatgtgctaccgaaaccgaaccctgatacgtcgcctgtgaagcccccacggcctgtagattcgcggcaccagcaaaagcatggccatctgaaggaaggcacaaaagattctgacaggccaacctcttcacgagacaagaaagccagaaaggagaggtcgattcaagaaacaatggcacatgtgcaagcagacaaatttcagagagaacctacttcagatcctgtacggaagagtaggaggcttgctaagaaatctgtggacaatgaatttgacgaggactttggtacaagcaatcttggaactcctgaagattgggatggtactcgtgagtctaagagcaaaggaagtggctctaagaagagtgcctcaaggaaagggaaaaataggagcaaggtgtatggggctgataacgattttgttacttcccgatctggcaagaaaagatctagagaatcagctgatgatgataatactgaagaagaaccaacctcagacagtgaacctgacgttgaagacactgaacagaaaacaacggcgactgaatcacctgtcaatattagaagtgaacctctcacgacacgtcgccgcgcccttcaatcatggatggatggcagcagcatcagtactgtcgagttccctgatgggctacctccagctccttcgagaagtccgcactatctttgctcttcattttgtgcagttcaatttgattaaaacatcaaactctttgttctcctgctaaatgtgttgaaacatatttctgttggaccaggcaagaaggacaagctttctgaagaggaaatgcttgcgaagaaggctgaagctgctcagaggcgcaggatgcaagtggaaaaggccactaaagaaagtgaggtaggagagaaatcttttctcgcgttttcgatcagtatttggcatgtttcggtttccaggagtcagtttcagctatgttttgatctctgcaggcggaagctataaggaaaatattgggcattgactct

SEQ ID NO: 111549 - DNA, 2085 bp, Zea Mays
atctgccccatccggccgtccgtcatccaacttcgccccactcttctcggacctccacctgcggcggcggtagaggtcacgtagccctcgtcgctcgtcggagcgtcttggatccttccttgaccctactcatctcagattccggccagatggaaggcggcgagggatccggattcgatggggcacacatgaagaagcggcggagcagcgcggtgaggcggccgaggccggagggcggccctgccgcggtgcagcgggacaacggctcccctccgccgctgtcggtgacatccaggagcgccccgaggagtctgctgttgacttcggacgagaacgccaccggccccgacgggggcaaccgtaggcgtgagttcctcctgaacgctccgtcgccggagcgcgcgaccaaggggagcatccggctgcgttccgaggccgcagccggtggctccaggaagagcgacggtagcagccatgcccctgaggggaaccgtgagaagctggggaaggtgaagctcaagattcgtaatgtgctaccgaaaccgaaccctgatacgtcgcctgtgaagcccccacggcctgtagattcgcggcaccagcaaaagcatggccatctgaaggaaggcacaaaagattctgacaggccaacctcttcacgagacaagaaagccagaaaggagaggtcgattcaagaaacaatggcacatgtgcaagcagacaaatttcagagagaacctacttcagatcctgtacggaagagtaggaggcttgctaagaaatctgtggacaatgaatttgacgaggactttggtacaagcaatcttggaactcctgaagattgggatggtactcgtgagtctaagagcaaaggaagtggctctaagaagagtgcctcaaggaaagggaaaaataggagcaaggtgtatggggctgataacgattttgttacttcccgatctggcaagaaaagatctagagaatcagctgatgatgataatactgaagaagaaccaacctcagacagtgaacctgacgttgaagacactgaacagaaaacaacggcgactgaatcacctgtcaatattagaagtgaacctctcacgacacgtcgccgcgcccttcaatcatggatggatggcagcagcatcagtactgtcgagttccctgatgggctacctccagctccttcgagaagcaagaaggacaagctttctgaagaggaaatgcttgcgaagaaggctgaagctgctcagaggcgcaggatgcaagtggaaaaggccactaaagaaagtgaggcggaagctataaggaaaatattgggcattgactctgagaagaagaaagaagagaggaagcagaaggagcgaggagagaaggagcgagctagcagagcacaaaacatggcggcaaactcgatccgctgggtcatggggcccaccggaacagttatttcgtttccacacgcagtaggcctccccagcatcttcgactccaagccacacagctatcctcctccacgggagaaatgcgctgggccatcgtgcacgaacgattacaagtacaggcactccaagctgaacctccccctctgcagcctcaagtgctacaaggccgtccaaggaaatgcttgatagggctcagggaacataatggtggggactggggagtttgtgctgtctccattggcatgccatctatggctggaaataaggcatgaagatgatgtgcatctatggtgggagttctaaaggatgcaatgcaataagggtctgcctgcaaatgtatagaaatggatatctatctacatgtagatttgtggggtagagatgtagaagatctttttgctgaacctgtgattaaagatgccggatgttattgctatcccacaatacgcatcctgtttttagttcttttgagagaaaaaggtgtttttgttgtagatactgcacgtacgtttcatatgtataataaagagcagaataagtttttgtaacctgtttgttcatccgttcatagagctcaaggttggaaagggaagccaaaccagaagtgaagtgcatgttcaaacgtaaaacaaaaaaaaaa

SEQ ID NO: 111550 - DNA, 1325 bp, Zea Mays
gatgggacattcgtaaagttaagtttttctgcactctaggctaaacttcactgacgttacggaaggggtctcgaagagctgccaagacccacctgccacctccgatggacttcgccggccgggtatccgtcctgctcttcttcctggtcgctcgcactgtagcaaacgaccagatcttcaccacttcaggtttgccatttgggcgaagttcgcgtgagccaaggtaccgcgtcgagttccatcctgttgattcgccattccatccagagaatggtcaggaatcggtaccaatggctagtcatgaggggaagcgttataagtgctttctaccagttgaagaaactaaaaccatgaagtcaatgctcccacaaaatgcaactaatattataatagaaagtgaaaggagaattaagccaaaggagccagatgagttacttgaggttctcaaggatcagtgtttctacaggcacgaaggttggtggtcgtatgaattctgttattatgggaaaatcagacaggtccatgtagaggacggtaaggttatccaagaatttgttctaggcgaattcgatgacgacgcgactgctgcataccatgaaaatagcacctctgagttagctgacgatgaccatcacgtgaaagatatatctaagaggtatcatgttcacttgtatacaaatgggactgtatgtgatctcacagatattccccgggagacagaggttagatttgtctgctcggagcctactgtgctgattagttcagtcaaggagatctcttcctgcaaatatgttgtaacaattcaaagcccgatgctttgcaaaaacccgttgttccagcaagaaaaacgaacccttcccatccattgcaatgaattacctgctaaagcagaatccggtgctgaggatggtttgcttccaaaagaagcgcagatttccatcatccccgatcaggatgagctgcatggttttccagcttatgctacttgatataatgatatgccttcaatatttatttctggtgtagaaaaagcacagttttggaggcccagtggcaactgagcaacgctatgtattactctctccgttcttttttatttgtcgtggtttagttcaaaaattacgacaaatattggagaacggacccatagatcctacagcagcggctccttgtaaagcaggttgagacgatcattctgcagtgctaattatttaggaggattacgaaggtagaaagtttctcagtattagtaaatgtaacaagtttgagacagtaacatttgcttgaaatgtctagtctataacaaggacaatactgcattcttg

SEQ ID NO: 111551 - DNA, 739 bp, Zea Mays
gccaccgtcaactggcttgacctcttcggaaagggaaaacgccaccacacgcggatcgaattaggctctccgagtctccggttccctcctctcggcggcggctcaggtccctctccatctccggcgtggcgcttggcgtctgacctcaacaagcaagaaagcaaatggcaggcggcagggttgcgcatgccaccctcaagggcccgagtgtggtgaaggagatcttcattggactgaccctgggtctgatcgcgggaggcatgtggaagatgcaccactggaacgagcagaggaagactaggtccttctatgacatgcttgacaagggccagatcagcgttgtcgtcgaggagtaaagagttcttcccagttattttcaaagaactctctcgagagcatgacaaagtgattgcttgctgtggagatttgtcctggaaataagcacaaccatttgggaacaccagattttgtcgaattttcctttccttttgatgaatatttgagcacgtccatgtcaataccaaacatctggccttttctctctctgttttttttacatatgtttatgtggtcttagcgagtagctgtgctcgactttgcgttatgaggtatgccgtatgtgattggatcacggtgacctaacaggctatcccacacttgtgtttttacctgacttttgagtgggtgatgcacggataatattgacatgttgcgtgcacgttcaggtggtgctctttca

SEQ ID NO: 111552 - DNA, 579 bp, Zea Mays
atgtccatggcgacgccgctgaactcctcgacgacgcggagcacctcgttgacggagcggaggcgggcgccgagttcggcggcgcgagcgcggagcacggcgttctcctgctcgacgcgcgcgttctgcgacgcgacgtcggcggcgcgggccgccacgcgcgcgttctcggcctgcaggagcgccgcctcctgggccagctcgtccaggtgctgctgcttccgcagccgcgaccgccgcgccgactcgcggttcgacagccgccgcttctcgcgccggcgcgtgtccgccgccgagtcgccgtccgacccggacgtcctccccgccggcgacagcgacgacgacgacatcaagacacggtcttttttcccccggtcggtctggctactttacctccaacaaaattcctctatcgctagcgctagtgtattattattcggcggttgttcgggaaggcaagaaagaagggagaagcaagaggggacagagagagagagagagagagagagagagagagagagagagagagggcacggggaatggcggatccgggggagggcaagttacgagatcacataa

SEQ ID NO: 111553 - DNA, 2388 bp, Zea Mays
ttcccgccatcccccagcccaacacggtgccgcctccctcccgcaccccggccttctctgcctcccactcactcgacgcctccgccgccgccgccgccgggatgaagaaccccgacttcactgcagacaaagcgctcgccaaggacttcctgtccaacttcgtcggccctcacggcgaccccaagtacctgaacatcctgcaagatgtcgccaacaggaagatacgcgcggtccagatcgagctggacgacctgtttcatcacaaggacgtcgatgaggagttcctgcagcgtgtcactgagaacacgcggcgctacgtcggcatcttcgcggaggccatggacgagatcatgccggagcccactgaggcgtacaccgtcgacgaggaccgggacatcctgatgacgcagcgtgtggacgagggggtggacggcggcgcggacggcacggacccgctgcagagaatgccaccagatatcaaacggttctttgaggtttacatcaagacattctcaaaggcaactccactcaccattagacaagtaaaggcatccaacattgggcagcttgtgaaaatatctgggattgttactcgctgctcggatgtgaagcccttgatgcaggttgctgtttatacatgtgaagaatgtggctttgagatataccaggaagtgactgctagagtgtttatgcccctcattgaatgtccatctcaacgatgcaagctgaacaaagcaaaggggaatctaatccttcaattgcgtgcatcgaagtttttgaaatttcaggaggtgaagcttcaagagttagcagagcatgtacccaagggccacattcctcgttctctgactgttcatctaagaggagagctgactagaaaggttgcacctggagatgtggttgagatgtcaggaatttttctccctatgccttactatgggtttagagcaatgcgtgcaggattagttgctgatacttacttggaagcaatgtctgtcacacatttcaagaaaaaatatgaggagtatgatctcaaaggtgatgaacaagaacaaattgacagattggctgaggacggtgatatctacagtaagttggcaaggtccttggcacctgaaatatttggccatgaagacgtcaaaaaagcactgctgttactacttgttggtgcaccccataggaagctcgcagatggcatgaagatcagaggcgacctgcatatatgcatgatgggagatcctggtgttgcaaagagtcaacttctgaagcatattatcaatgttgcaccaagaggagtgtacaccactggacgtgggagcagtggtgttggtcttaccgctgccgtccaaaaggatccagtaacaaatgagtttgtcctcgagggtggagcactggtactggcagatatgggcatttgtgctatagatgagtttgacaagatggaagagtcagaccggacagcaatccatgaggtaatggagcagcaaacagttagcattgccaaggctggcatcaccacctctctcaatgcgagaactgcaattctggctgctgcaaatccagcatggggaaggtacgacatgaggaggactccagcagaaaatataaatctacctccggcactcctgtcccgtttcgacctgctttggttgatcctggatcgcgcggacatggaaaccgatctcgaaatggcgaggcacattgttcatgttcatcaaaaccttgaatcgccggcgctggggttcacaccactcgagccatctgtgctcagggcatacatatctgcagctagaagagtgattccttccgttcctagagagctcgaggaatacattgcgactgcatattccagcatccgccaagaggaggcgaagtcgaacgcgccaacctcctacacaaccatcaggacgcttctgagcatactccgtatctctatcgccttggcaaggcttaggttctcagaaaccgtggcccagagcgacgtcgacgaagcactgcggctgatgcagatgtccaagtactcgttgtactcggacgaccgccagcggtctggcctcgatgcgatatctgacatatattccatcctgagagacgaggccgcgaggacgagcagcatggacgtgagatatgctcatgctcttaacttgatctccagaaagggatacagcgaggctcaattgaaggagtgcttggaggaatacgcttccctgaatgtgtggcagatccatccgagcacctttgacatccacttcatcgatgcctgatgctgaagccggcaccgatcaccaaacaaatttcatcatgagtttgtggcttcatgatttgtgacgggagggatgaacaccgtcgactgaagcctaacaggatctaaaagttttagcccagttc

SEQ ID NO: 111554 - DNA, 1316 bp, Zea Mays
tggtgcggtgcctccttgggctcaccaaatctccactcccaatcaaccacttgctgcaaagaggaatacgattcagcttagctcagctccaccaccaccaagaacaagatctcgacgaagcagccagacgacaggcaggtagcaccggggtcaacgcggcagacaaacaggctctcccgctcgtcagctagcagccatgagtaccatgaagttttgccgtgaatggtataacgacgacgctgcctgctcgctcgctcgctcgcttccttgctcactcaagctgctatgctgtgctctgccctgctgtatactgacggcggcatcgtttctgtttcttggccatggcagcaacaacatcctgtaccccaaggaggaccgggagcagaaggtgctcctctacgcctgccggaactgcgaccaccaggtgtccttccttcctccgcccgttcagcatctcgtgtctgtcgggatccattcggatctctccgaagcacagagctctcttgttttctagaatctgacgcggtctccaaacgctctccgcaggaggtcgcggacaacaactgcgtgtaccggaacgtggtgcaccacagcgccggggagttcacccaggtgctccaggacgtggccggcgaccccacgctgccccgcaccaagtccgtgcgttgctcctcctgcggccacggcgaggccgtcttcttccaggtcggtcacctgtcacctcctcgcctcctttggaaacggagtccatgacaactgaacacgcatacttgagagctagcaatagcatcgtcttcttcttcgtagaccatgggccagaaacttgagctcactgttgcatggtactgcaggccactgcgagaggggaggaagggatgacgctcttcttcgtctgctgcaacccgagctgcggcaaccgttggagagaataatggacggttcctctggcgcaacagccaggacgacatgattttttttgcaagattttcatccgacagacctgctgctcccccccatatgagcatgtcaactgattggattggattggattggattgtactactatgttcccagtgcgttcagacatttcaataacttgccggcagggtaaacttccctgtggcctgtgcttcattcatttgcatcaaagaaaggatgagatgaggaaaactttttccatgttcgaatgattccctctgcacctaaaggtttcatccactcaaacaaattcaccatcaggtgaggtggagaaactgtcctcacttcacatgacacacggttatgcaagttctctctatatatttctgttttttttt

SEQ ID NO: 111555 - DNA, 962 bp, Zea Mays
aaccacttgctgcaaagaggaatacgattcagcttagctcagctccaccaccaccaagaacaagatctcgacgaagcagccagacgacaggcaggtagcaccggggtcaacgcggcagacaaacaggctctcccgctcgtcagctagcagccatgagtaccatgaagttttgccgtgaatgcaacaacatcctgtaccccaaggaggaccgggagcagaaggtgctcctctacgcctgccggaactgcgaccaccaggaggtcgcggacaacaactgcgtgtaccggaacgtggtgcaccacagcgccggggagttcacccaggtgctccaggacgtggccggcgaccccacgctgccccgcaccaagtccgtgcgttgctcctcctgcggccacggcgaggccgtcttcttccaggccactgcgagaggggaggaagggatgacgctcttcttcgtctgctgcaacccgagctgcggcaaccgttggagagaataatggacggttcctctggcgcaacagccaggacgacatgattttttttgcaagattttcatccgacagacctgctgctcccccccatatgagcatgtcaactgattggattggattggattggattgtactactatgttcccagtgcgttcagacatttcaataacttgccggcagggtaaacttccctgtggcctgtgcttcattcatttgcatcaaagaaaggatgagatgaggaaaactttttccatgttcgaatgattccctctgcacctaaaggtttcatccactcaaacaaattcaccatcaggtgaggtggagaaactgtcctcacttcacatgacacacggttatgcaagttctctctatatatttctgtttttttttaccaatttctgcagctcatggttatgcaagtacaaattcttgaacagccacgtgcttaattgattttcagttgtcactcga

SEQ ID NO: 111556 - DNA, 597 bp, Zea Mays
caatccatccatcagcttcacacctaattaaacccacgtctcaatacaatggctgcttctcgtgctgccagcgcaactgctgccttcgtcctcctgcttgccctgctgctgtgcacggggacctcacctgtgactgccgccgttgactgtaccgccgcctgtgttgagccatgcaagagctttgctcaggggatctgctcgacgggcgcctctagcggcacttgtccacctgacgcggtggcgacatgccaacgtgcggctatattggcctgtgggctcagctgcttcactggctgcagtgccgggactttcgtgccttgcgcctgagaatgcaatgcatgctggatttcatattgttcttgtcatattatcgcagaaaataaagcaacccctctctccatatctagccgtgggaggaagcatgcatgcatcacaatccatgttttatttccctttaaatttttttcagttattacataccccctcgttgtaccttcctccaagtatgccctgtaaggctcttgagtgtattcatgatactattataatctatttatgatatattttctctgttccaatatattgtttgttttagct

SEQ ID NO: 111557 - DNA, 1157 bp, Zea Mays
aatcaaacaaacacagctctgacctctgaccgtaattaccaaccactgccagcgacctctcctcggaggcgtgaccgtaattgctccgcaactaccccgataccattcccaaatcctccgtcgacccctctacaccggcgatcggcggcgaacgatggggtgggcgacgcggttcctggcggcggtgtgcttctttgctgcgggcgtcctcttcgtcccagaggctatcggttccccatccggcgcaggagccgtcaccgccgccaagctggcccacgtcctctcctttgccacctcctggggcgccgccctctgggccaccttcatcggcggcatcataatgttcaagaacctgccgaggcacatgttcggcaacttgcagagcaagatgttcccggcctacttcacgcttatatctgcatgcgcagccatctccgtcgccgccttcgcgtaccttcacccgtggaagacggcgtccactgtgcagcgctaccagcttggattcctcctctcagcgctcggctgcaacctctccaaccttctagtcttcactcccatgaccatcgaggtgaacgtatcccgcttcttaggcattggcctctttccataattccatcgagattaagaattatatgagaaccttaggatttgtcatgtagtagtggttcatggtttgtaaatttcacatgaccgtagaagtgggcctaattggttgccgtatctgagcagcctggccgtgcgagccaggccggtggggcctggctgtgcatcacgcgagcctggttctccaaatgcggagattttggccgcctctccacagcctggcccgaggtgttttttttgcatcgctagacacaagctcagctgcatatgcgacaaaccaaacaaacgataaagtaacacgagcctggctgcatggatacgacctacaaccaaacgcactgcggctgcacaccgtgagcctggttggcctatacgcaggctacaaatagggattattagcagtaactgtacaaagttgagtaatgctttagagattgaaactgatttgtgctgtgctataaatgtcaggtgaatgcaataatttgtagttaatttaactaacaatggtgctttttagtttgttgcagccaagtcaggtaatatcgggcttctgt

SEQ ID NO: 111558 - DNA, 1029 bp, Zea Mays
aatcaaacaaacacagctctgacctctgaccgtaattaccaaccactgccagcgacctctcctcggaggcgtgaccgtaattgctccgcaactaccccgataccattcccaaatcctccgtcgacccctctacaccggcgatcggcggcgaacgatggggtgggcgacgcggttcctggcggcggtgtgcttctttgctgcgggcgtcctcttcgtcccagaggctatcggttccccatccggcgcaggagccgtcaccgccgccaagctggcccacgtcctctcctttgccacctcctggggcgccgccctctgggccaccttcatcggcggcatcataatgttcaagaacctgccgaggcacatgttcggcaacttgcagagcaagatgttcccggcctacttcacgcttatatctgcatgcgcagccatctccgtcgccgccttcgcgtaccttcacccgtggaagacggcgtccactgtgcagcgctaccagcttggattcctcctctcagcgctcggctgcaacctctccaaccttctagtcttcactcccatgaccatcgagatgatgaagaagaggcacaagatcgagcgggacctgagtatcggcgaggaagtcggatggtcaaagaaccagcaggtggctaaatccaaccccaccctcgctgcaatgaacaagaagtttgggatgatccacgggctgtcatcactggccaacatcatgtcgtttggcagcttggccatgcactcctggtacctggccagcaagctagagctgtgaagaaggggagacaagacgacacctttctccgccttgttgtgaatcttgtcagttgtcacgatggtgttgcttgctgctctcaaaccagtttcaaaattggaataactagaaaatggccagacacatacagacagggttttgtaaaatcacactatctccgatctcgaatattttgcaaaactgcatgtcctcgtgcaaaaccatgtccacatgatgacaccgttctcgaatattctgtcgacacc

SEQ ID NO: 111559 - DNA, 162 bp, Zea Mays
aaatcatatccatcagagtttactacatattttcattactgtagatcaatacgatttgaagataaactatattactcctatttgaagagactcttctgtgacctatttatctgcgaggggtaccaactagattatgtatttgattggaccattatgaagtat

SEQ ID NO: 111560 - DNA, 2324 bp, Zea Mays
agttggctggagagcggagacactggtcgagccagcgagcgtgtgcgcttgctctgacagtttgccttcttcccaacccaacagaagcgaagcatctcttctccccccttcccaatcgggctgcggcatatccccttctccgtcctcccgcctgccgccatgtcttcgccttcgccctcgccgccggcgccggcggaagaggagggccgggcgccgaccaagtacgtgctgatcaccggcggcgtcgtcagcggcctcggcaagggcgtcaccgccagcagcatcggcgtcgtcctcaaggcctgcgggctccgcgtcacttgcatcaagatcgatccatacttgaacacagatgctggtacaatgtccccctttgagcatggcgaggtgtttgttcttgatgatggtggagaggttgacttggatttggggaattatgagcgtttcatagatgttactctgacaagggataacaacattaccactggaaagatataccagtctgtcattgagaaggagagaaggggtgattatcttggaaagactgtacaggttattcctcatgtcactgatgaaataaaacagtggatacagtcagtgtcttcggttcctgtggatgggcagactcgtccagctgatgtttgtgttattgaattgggaggcactgtaggtgatattgagtcgatgccattcattgaagctttgcgccaattatccttttctcttggcaaggaaaatttctgcctcatacacgttagccttgttccagtattgggtgtagttggtgagcagaaaactaaaccaacacaacatagtgtacgagaactgagagccttgggtctgactcctgatcttctagcatgccggtcagcacagccactaataggatctgttaaagagaagctttcacaattttgccatgtcccggtcgagaacatacttaacatccatgatgttccaaatttatggcatgtcccacttattcttagaaaccaaaaggctcatgaagctataatcaaacaactaaaccttgctagatctgctggaccacctgaattacgagattggacagatatggctgagtcgtatgacaacctcaataactctgttaaagttgctttggttgggaagtatactaatctgacagattcttacctatcagtggtgaaggctctcctacatgccagtgttgcctgttcgttaaagccatctatccagtggattgcagcttcggatcttgaagatgcaactgcaatatctgcaccagatgcccatgctgaagcctgggaaactcttaaaggttcatcatgcattttgatacctggaggatttggggatcgtggaatttcagggatgatattggctgcaaaatatgctcgtgagaatagagttccatatcttggtatttgcttgggcatgcagatatcagtgattgagatttccagacatgtcctgggcctggaagatgcagacagtgaggagtttaacaaggatacaccgaatcatgttgttatgtacatgcctgaggtttcaaaaacacatatgggaaacacgatgaggttgggctgcaggagaacattcttcagcaaacctgattgtcttacatcaaaattgtacggaagtcctccacatgtagatgagcgtcatcgtcatagatacgaggtcaatccctcttttgttcccatgcttgaaagtgctggtcttcattttgttggttgtgacgaaagtcgaaaccggatggagattgtggagctacaagatcatcccttctatgtaggtgttcagttccacccggagttcaaatcaaggcctcgaagaccttcacctccttttacaggtctaataatggcggccactaaacaactgggagcaaattcgaatagctcgaatggcttcgttggagcttctgactaatgtaaggtaaagcgttccgaaacttggtgattccccaaagatggggatctcccgttgctgcagacacccaagttatttcttgtgcacattagatgtacaggaaaacaatctaagcctgaagcagagtgtttctctctctcgaccacctgagtggcgtaagctaacggtcttacagtgtattggggccgaaccgtcatggttttgttgactgtcatttcaattgagcttaacagcagtcagtgctcccatccttgtgattccaattgagattaacagtagtaagtgattatgatctctcttgccgtttgagtggaagtgaaagacactaccatccagtttttggttgttatttgttctgatttttttgtgtttgttttctatacaaatgtgaaaaacatagaatataaaaa

SEQ ID NO: 111561 - DNA, 2294 bp, Zea Mays
agttggctggagagcggagacactggtcgagccagcgagcgtgtgcgcttgctctgacagtttgccttcttcccaacccaacagaagcgaagcatctcttctccccccttcccaatcgggctgcggcatatccccttctccgtcctcccgcctgccgccatgtcttcgccttcgccctcgccgccggcgccggcggaagaggagggccgggcgccgaccaagtacgtgctgatcaccggcggcgtcgtcagcggcctcggcaagggcgtcaccgccagcagcatcggcgtcgtcctcaaggcctgcgggctccgcgtcacttgcatcaagatcgatccatacttgaacacagatgctggtacaatgtccccctttgagcatggcgaggtgtttgttcttgatgatggtggagaggttgacttggatttggggaattatgagcgtttcatagatgttactctgacaagggataacaacattaccactggaaagatataccagtctgtcattgagaaggagagaaggggtgattatcttggaaagactgtacaggttattcctcatgtcactgatgaaataaaacagtggatacagtcagtgtcttcggttcctgtggatgggcagactcgtccagctgatgtttgtgttattgaattgggaggcactgtaggtgatattgagtcgatgccattcattgaagctttgcgccaattatccttttctcttggcaaggaaaatttctgcctcatacacgttagccttgttccagtattgggtgtagttggtgagcagaaaactaaaccaacacaacatagtgtacgagaactgagagccttgggtctgactcctgatcttctagcatgccggtcagcacagccactaataggatctgttaaagagaagctttcacaattttgccatgtcccggtcgagaacatacttaacatccatgatgttccaaatttatggcatgtcccacttattcttagaaaccaaaaggctcatgaagctataatcaaacaactaaaccttgctagatctgctggaccacctgaattacgagattggacagatatggctgagtcgtatgacaacctcaataactctgttaaagttgctttggttgggaagtatactaatctgacagattcttacctatcagtggtgaaggctctcctacatgccagtgttgcctgttcgttaaagccatctatccagtggattgcagcttcggatcttgaagatgcaactgcaatatctgcaccagatgcccatgctgaagcctgggaaactcttaaaggttcatcatgcattttgatacctggaggatttggggatcgtggaatttcagggatgatattggctgcaaaatatgctcgtgagaatagagttccatatcttggtatttgcttgggcatgcagatatcagtgattgagatttccagacatgtcctgggcctggaagatgcagacagtgaggagtttaacaaggatacaccgaatcatgttgttatgtacatgcctgaggtttcaaaaacacatatgggaaacacgatgaggttgggctgcaggagaacattcttcagcaaacctgattgtcttacatcaaaattgtacggaagtcctccacatgtagatgagcgtcatcgtcatagatacgaggtcaatccctcttttgttcccatgcttgaaagtgctggtcttcattttgttggttgtgacgaaagtcgaaaccggatggagattgtggagctacaagatcatcccttctatgtaggtgttcagttccacccggagttcaaatcaaggcctcgaagaccttcacctccttttacaggtctaataatggcggccactaaacaactgggagcaaattcgaatagctcgaatggcttcgttggagcttctgactaatgtaagatggggatctcccgttgctgcagacacccaagttatttcttgtgcacattagatgtacaggaaaacaatctaagcctgaagcagagtgtttctctctctcgaccacctgagtggcgtaagctaacggtcttacagtgtattggggccgaaccgtcatggttttgttgactgtcatttcaattgagcttaacagcagtcagtgctcccatccttgtgattccaattgagattaacagtagtaagtgattatgatctctcttgccgtttgagtggaagtgaaagacactaccatccagtttttggttgttatttgttctgatttttttgtgtttgttttctatacaaatgtgaaaaacatagaatataaaaaacaa

SEQ ID NO: 111562 - DNA, 2289 bp, Zea Mays
agttggctggagagcggagacactggtcgagccagcgagcgtgtgcgcttgctctgacagtttgccttcttcccaacccaacagaagcgaagcatctcttctccccccttcccaatcgggctgcggcatatccccttctccgtcctcccgcctgccgccatgtcttcgccttcgccctcgccgccggcgccggcggaagaggagggccgggcgccgaccaagtacgtgctgatcaccggcggcgtcgtcagcggcctcggcaagggcgtcaccgccagcagcatcggcgtcgtcctcaaggcctgcgggctccgcgtcacttgcatcaagatcgatccatacttgaacacagatgctggtacaatgtccccctttgagcatggcgaggtgtttgttcttgatgatggtggagaggttgacttggatttggggaattatgagcgtttcatagatgttactctgacaagggataacaacattaccactggaaagatataccagtctgtcattgagaaggagagaaggggtgattatcttggaaagactgtacaggttattcctcatgtcactgatgaaataaaacagtggatacagtcagtgtcttcggttcctgtggatgggcagactcgtccagctgatgtttgtgttattgaattgggaggcactgtaggtgatattgagtcgatgccattcattgaagctttgcgccaattatccttttctcttggcaaggaaaatttctgcctcatacacgttagccttgttccagtattgggtgtagttggtgagcagaaaactaaaccaacacaacatagtgtacgagaactgagagccttgggtctgactcctgatcttctagcatgccggtcagcacagccactaataggatctgttaaagagaagctttcacaattttgccatgtcccggtcgagaacatacttaacatccatgatgttccaaatttatggcatgtcccacttattcttagaaaccaaaaggctcatgaagctataatcaaacaactaaaccttgctagatctgctggaccacctgaattacgagattggacagatatggctgagtcgtatgacaacctcaataactctgttaaagttgctttggttgggaagtatactaatctgacagattcttacctatcagtggtgaaggctctcctacatgccagtgttgcctgttcgttaaagccatctatccagtggattgcagcttcggatcttgaagatgcaactgcaatatctgcaccagatgcccatgctgaagcctgggaaactcttaaaggttcatcatgcattttgatacctggaggatttggggatcgtggaatttcagggatgatattggctgcaaaatatgctcgtgagaatagagttccatatcttggtatttgcttgggcatgcagatatcagtgattgagatttccagacatgtcctgggcctggaagatgcagacagtgaggagtttaacaaggatacaccgaatcatgttgttatgtacatgcctgaggtttcaaaaacacatatgggaaacacgatgaggttgggctgcaggagaacattcttcagcaaacctgattgtcttacatcaaaattgtacggaagtcctccacatgtagatgagcgtcatcgtcatagatacgaggtcaatccctcttttgttcccatgcttgaaagtgctggtcttcattttgttggttgtgacgaaagtcgaaaccggatggagattgtggagctacaagatcatcccttctatgtaggtgttcagttccacccggagttcaaatcaaggcctcgaagaccttcacctccttttacaggtctaataatggcggccactaaacaactgggagcaaattcgaatagctcgaatggcttcgttggagcttctgactaatatggggatctcccgttgctgcagacacccaagttatttcttgtgcacattagatgtacaggaaaacaatctaagcctgaagcagagtgtttctctctctcgaccacctgagtggcgtaagctaacggtcttacagtgtattggggccgaaccgtcatggttttgttgactgtcatttcaattgagcttaacagcagtcagtgctcccatccttgtgattccaattgagattaacagtagtaagtgattatgatctctcttgccgtttgagtggaagtgaaagacactaccatccagtttttggttgttatttgttctgatttttttgtgtttgttttctatacaaatgtgaaaaacatagaatataaaaaacaa

SEQ ID NO: 111563 - DNA, 2294 bp, Zea Mays
cagtttgccttcttcccaacccaacagaagcgaagcatctcttctccccccttcccaatcgggctgcggcatatccccttctccgtcctcccgcctgccgccatgtcttcgccttcgccctcgccgccggcgccggcggaagaggagggccgggcgccgaccaagtacgtgctgatcaccggcggcgtcgtcagcggcctcggcaagggcgtcaccgccagcagcatcggcgtcgtcctcaaggcctgcgggctccgcgtcacttgcatcaagatcgatccatacttgaacacagatgctggtacaatgtccccctttgagcatggcgaggtgtttgttcttgatgatggtggagaggttgacttggatttggggaattatgagcgtttcatagatgttactctgacaagggataacaacattaccactggaaagatataccagtctgtcattgagaaggagagaaggggtgattatcttggaaagactgtacaggttattcctcatgtcactgatgaaataaaacagtggatacagtcagtgtcttcggttcctgtggatgggcagactcgtccagctgatgtttgtgttattgaattgggaggcactgtaggtgatattgagtcgatgccattcattgaagctttgcgccaattatccttttctcttggcaaggaaaatttctgcctcatacacgttagccttgttccagtattgggtgtagttggtgagcagaaaactaaaccaacacaacatagtgtacgagaactgagagccttgggtctgactcctgatcttctagcatgccggtcagcacagccactaataggatctgttaaagagaagctttcacaattttgccatgtcccggtcgagaacatacttaacatccatgatgttccaaatttatggcatgtcccacttattcttagaaaccaaaaggctcatgaagctataatcaaacaactaaaccttgctagatctgctggaccacctgaattacgagattggacagatatggctgagtcgtatgacaacctcaataactctgttaaagttgctttggttgggaagtatactaatctgacagattcttacctatcagtggtgaaggctctcctacatgccagtgttgcctgttcgttaaagccatctatccagtggattgcagcttcggatcttgaagatgcaactgcaatatctgcaccagatgcccatgctgaagcctgggaaactcttaaaggttcatcatgcattttgatacctggaggatttggggatcgtggaatttcagggatgatattggctgcaaaatatgctcgtgagaatagagttccatatcttggtatttgcttgggcatgcagatatcagtgattgagatttccagacatgtcctgggcctggaagatgcagacagtgaggagtttaacaaggatacaccgaatcatgttgttatgtacatgcctgaggtttcaaaaacacatatgggaaacacgatgaggttgggctgcaggagaacattcttcagcaaacctgattgtcttacatcaaaattgtacggaagtcctccacatgtagatgagcgtcatcgtcatagatacgaggtcaatccctcttttgttcccatgcttgaaagtgctggtcttcattttgttggttgtgacgaaagtcgaaaccggatggagattgtggagctacaagatcatcccttctatgtaggtgttcagttccacccggagttcaaatcaaggcctcgaagaccttcacctccttttacaggtctaataatggcggccactaaacaactgggagcaaattcgaatagctcgaatggcttcgttggagcttctgactaatgtaaggtaaagcgttccgaaacttggtgattccccaaaggtattttctctgtgtcagtgtatgtaactaatgtttctgaacattcggtttatggatgcaactattgtttcttctgcagatggggatctcccgttgctgcagacacccaagttatttcttgtgcacattagatgtacaggaaaacaatctaagcctgaagcagagtgtttctctctctcgaccacctgagtggcgtaagctaacggtcttacagtgtattggggccgaaccgtcatggttttgttgactgtcatttcaattgagcttaacagcagtcagtgctcccatccttgtgattccaattgagattaacagtagtaagtgattatgatctctcttgccgtttgagtggaagtgaaagacactaccatccagtttttggttgttatttgttctg

SEQ ID NO: 111564 - DNA, 1933 bp, Zea Mays
atgggcgcgaaggggatggcgacggcggcggggacggcggtgctgctgtacctggtgctgtcaggccggctctgcggggacgccgccggcgacggcggcgccctggaggaccagctgatatcgtcggccctggaggctcggcgacgaaggaaagaggacaccagggcgcggcgggagcagcggcgtgctccgcctccgtgcaccaagcggcggtggccggagcgccccccggacgggtggggcgaggcggccgccttgaccgcgcgcactgtgggcttcacctgggccgagacgctcggcaagtggaccctcggggaggtcgccttcgggatcaagtactatatgcggcagcagggtaatctgcagcatgagtatgctggaagtgattctgtgctactggatggggctgaggtgaggcaggtactgatttcgctgctcagatatctgaagcagtgcatgtatttctcgaagaagccatacaacgtgtttttggagtatggtggttatggccataatgacgtgcttataagaaagcctaaggcgaggctcttgaagccagctttcacaattgttcgagacagaagtagccaatgctttctccttttcatcaggggggctatcagtgttaaggagcggttgacagcagcaacaggcacagaggttccattccatcacgttgtggtccaggaaggtcgtgtttccaacctagtgttgggctacgcccactgtggaatggttgtagcagctcgatggattgcaaggcaagccattcctggcctgagtaaagcaatcgagcaattcccagaatatgaggttaaggtcattggccattcaatgggagctgggattgcaacaatactaacatacatcctacgcgagaatgagaagctgtcatcatctacttgtattgcatttgggccagctgcttgcatgacatgggacttggctgagtcgggtaaagactttgttaccaccatagttaacagaaacgacctagtgccatctcttggcatagtttctgctgccaagcttcgtatagaggttatgtcatcgtcttgggcacatgaccttggcagacaaattcagcagactaggttcttaggttttgtgaaccgttctgtgagtttcataagatcccatgtgccctttgtctctgatccaagatctaaggttgtggatgtagacatgctgcaatcccagagtcccgaggctgggagtaagccttcagcagatactcatgctgtggtgaagaaacgccctgcactagtttgctggtcatatgtggctacacccaatcccaaacagagtatggaatcgtcaatacaaatgcagggcacggaagtccaaaccgacactgctgtcgaaactgagaaaaattctgaagcggcagctgctgagctagtctcaatccatcttggtgaactgaacattcaagaatcagacaaggacgatgacaagagaggggaaaagggttcagaaacagatgaagaagagaccatggagattctagagtccttggccgacgagaagcacatgccatcatcgtcaagctttgctcaagagccacagcagctgtaccccccagggaaaatactgcacatggttggattggcagcagcggaagtggcaaccacaagtcagcaaggagcccaggaggaggtcgtcgccctgtatgagacaccccggcatttgtacagtaagattcgcctggcgaggtccatgataggagaacattacatgcccaagtacatcaagacaatggagaagctgatacacaagcttgcagaggaccagctggactctttgtagcatcaacagtgtgtataggataattattgtacagatcatgaaaatgaaaatcattctttcagattgcttgtgcgtaatggtggtttggaattggtctgtttatctgctgtcatttcactttggt

SEQ ID NO: 111565 - DNA, 3041 bp, Zea Mays
aataaaaaactgtgtttggccctctaaagtatgacatatgaactaacatatttcaatagacctatcaaagagcaattgcatcaagtgttatgacagtatggcacagcacgaccagcaacagatcaaagactaaacagcaccacaggtcaaaatagaatgaaaattcataaactttaaggaacaaaaaaaacacatatattgggtaactcaagtgtaccaaatgagtctctcagatgctacagaaggaaatcttgaatgactggagcttgaggtatagcatcaggctgagtactagacttttctctatgcttatgttttccttgacgatgtccacttctaccagagcttctgtgctttcttggttctttgccatcactttcaggaggatttgtacctttcactttatcattgttttgttccttgcttgttctagaacatgaagcgggatggcttcctaaattctctatctgctgagagctagattcattactgcttgttttgtttagcattccttccaagtttatatctgaagtcctttgtgaagacaatgccttagcatcactaccgaagagcacatcacgcagaacaccagacaaggggtcttctttcggaacatttgcactaggcatcatagaactgaggaaatcctcagcatccaacttaactacttttggtctggacttcatggctgtcaactttttcccaggaaatacaaggtcagcagccttcaacttgtcgtcattaacagaattattgctagaagatggtagagaatcgttagcttgagggtaatcatttggctcatcctcagttttccttgtttggagataaaagagttcatgcctcttgcgatgctcagaaagagatgaagaaccaattgacactgcaggctcgtctctggtatctaaagaatgacgactgcaaggatagaaaaatattgaagctgagggagtagtatcatcttcactcaccatgccagcaagttcaacaagattttcattcaggataaggccatctggaggggccactttcatctgtgcattcacagaaacaggacctagttcttgacagaatactgtccgcataatctcaacaagctcttttaacctgcttgacttgtcaccgtcagcaaccttccttttgttcaactcttgaatttctcttactaaatggataaaaccaatcaggttaatcatgtaaagtattgattcatgcaaaaaagggtcctttagtactgtgctcgccccaatatcttgctcttcaccagacccaagtgcagcattgctttccgcactaacagtttgatcagcagctaacctgtcaaacatgacatccattgccatgcctgaatcacccaatctcccaacatacacactgaaacaccacgtaatcaatttaaatactgcatggatgtagacagctctcactgaaattggcaggaggctggtccttggttgcaacagtgcttcaacaagctcaacaggatccttcgttaagtccacatactcaccagaaatccatgcagccgctgaaagaacagggaagaggaagtgatttccaagcaaagcaggatcaatcagaagacttcgagctaaacggacaagctctggccgcgcatcctgcactctcagtcctaaatcaacaaactgccgaccaatctcatccccctgggcacaatgcagagttcttgccatatccacaaggagtgaaacataccaatcaaaatccaccaccatctcatacacattatgcccacatgctgctagaacagccccaagaatgtcacttgcgaactctgggtctgactttggaacatgactgatcaggataccagcaatgtccatgatgttgttttcattaaccatccccataataagatgcaatgcctcctggcgaatgttcgcgtcagcatcacccagtgacttcacaatagcatcccaacaatcattcactgtggatgcatatgctgggccaatcataccaagagccagaagcccaaggtaccgaaggttggggtcatcagcagcagcaatgaactccttggttttcccaatggcaaggcggactgcggcatcatgtgctggcagtgcagtgagtaccgtacggatgcactcaaaggtcagtgacatggccgcagatcgagtgaggagctggcagaccgggtcgacaattttagctgccaggcgggactcgagaggagccagtcgcgcaaacaccttgagcaccttgatgagcgcccagttggatcgggaggtggtgagcaggctgtagaggtcgggcgcaagcggcagaaaaggagtcgcgtcagcaggcggcgccgataggtcacagaaggctgccacagcagccgtggacgcccgaggatcgggagaggcgagacaggctgcgagcggcttgaagaggaccggcacggccgcggacggagaggcagctatgacgcgcgcggcggcggcaatagcgcgggggctgccgcgggtgaggtgtggcacgaggtcgtgcacgaggtgaaccgggaggtcgggagcggcagccgcggcgggtgagccgaggagctggagcgcgagcgcagagacgtgctggtgggcgccagcggagggggagaggtccttgtggagctggtgcgtggcgagcgggagcagggagagcgaggccgggtggagcgagagagatgcggcgaggtaggccaggcgcttgtgggggaggtgcggcgaggccagaagctcgatggcggggaaggcgagcgggtgggaggagacgggggcgaagtggagggaggagaggtacgtgagcttctgcaccgcgacggacttggtggcggcgtcgggggcgcggatctcgcggtggatctcggagagcgcgcgggtaacggcgggggcctcgccggcggccgacgggtcggctcggagggacttgacgaggtcatttagggagcgctgaaagagggtgtccaccagcgacggcgccacggcgggcgccggcggggtggaggccatcagcggtggctcaagaggaaaggggcttgatctggtaactgagaaccg

SEQ ID NO: 111566 - DNA, 110 bp, Zea Mays
tggagtacaagcagccagaaagcgagggcgctataagtacggagcaaggaaagacgtgaacacggatcgaccaaaaaaactatgcaataatacaattaatacaattcaac

SEQ ID NO: 111567 - DNA, 64 bp, Zea Mays
atggcgaactacctcgcgcagttccagaccatcaagtcctcctgcgaccgcatcgtcatcgccg

SEQ ID NO: 111568 - DNA, 3171 bp, Zea Mays
atttaaaatgcttgcatattttaattttgttatggtttaccttttcccaattcagaatgctttttccattttctttccgtgaagtatgggtgataaattgcatgtttgggtttgataaagtctacaagtttgcattatgatgatggaatcctgttgctattgactcagagaaagagttctatcgctttcaggggtgatcttttattccctctgtcgtgttaagtttatgaggcttgcttacttgattggttatggggctgagatagaaaagagtccagtcaacagtgcatctttaagcatgctaccatggccaaagccagctacatggccttcaatccctcctgattcgtcagcagaaataatggaaaaagagaagatggttcttcaagtcaattcaagagaaaagctcttcagcattcacaggaaacctctgccattagaaccttctttacttctacgtgaggctaataggcgcagggcttttctctctgctggaaatttatctgagctttatgattcatctgatggttcaggtttagatgcaaattcaaaacttcctcccaacagatctgcttctaacttaatgacaagaacaatgtcaggtccagcaacgtccgagacttcactgccagttgatcgtcccatgaggttgtcagaaattcatgttgcagctgagcatgcactgaaacaaacgatatcagatcctgattttatgacatcactttcatcactagaagaatttgagaaaagatatatggagcttactaaaggtgcagctgacaattaccaccgatcttggtggaaaagacatggagttgttcttgatggagagatcgcagctctgttctttaagcatggaaattatgacctggctgtgaaatcctatgagaaagtttgtgctctctattctgcagaaggctgggaagagctgttggcagatgttcttcctgatcttgcagaatgccagaagattcttaatgatgaagctggttatttggcttcttgtgtaaagttactatcgctggacagtggcttgttttcatctaaagagcggcaaggtttccagtcagaagttgttcgacttgctcacagtgaaatgaaacatcttgtgcccctagatgtctcgtcactaattacatttgctggaaatgctggtccaccactagaattatgtgatggagatcctggtacactatctgtagcagtttggaatggcttcccagatgacatcacactggagtctctcagtttaaggttgtcagcttcttctagtgcagatgaaggtatcaaggcaattaaaagttcagattctcatgttctagtaccaggtagaaatatcatctcttttgacattcctcgtcaaaagcctggctcctatgtgttgggtgctctcactggacagattggcaagctgtcattcagatcacatggattttcccaagatggtccagttgaaactgatgaatttatgagctttgagaaaccgacaagacctgttttgaaggtgagaaaaccaagggctttagttgatattacacctgctgtgtcctctgctttgcttatgaatgagctccaatggattggattaatcgttaagcctatagactattctttaaaaggtggaatattgcatatcgatgctggcgctgaactgaaaattgaggagtctcagatgattgaaatagaaatttacgtaagtgatatggagtgtgctaattctgccaacagctccatcaaagctggaaaggttgaaaaggtacctattgaaaatggaaagatagaacttcctgattgggctagtgatgtgactactcttgtttggtttcctgttcgtgctattgatgacacaattgcaagaggagaatccctagtgtctcagaaacagagcgttgtagatgggatgagaatgattgctctcaagcttgagtttggagttttccgtaaccaagtgtttgaaaggaccattgcagttcattttactaacccattccatgtaagcacacgcgtcgtggacaagtgcaatgatggagctctacttctacaggtgatattgagttccggagtgaaggccacactgcatgtaaaggatgtacggttagatcttcaatctggatttgatcacttgggcaaaggagatggacggccagctttgagtttattccctctggttattgctccttcttccaaagctggaattttattcatgttacggttaagtggtacaaaggatgtggacgacgcagaaaatgcagacagcacgctgaatatcacctacgggatatctggtgacagaaaaactggagcacattctcctatacctgtcaaatctggtgattctgaagaacttgtgttcaagattgcactcagactgaagcgacctgtcctggatccatgtgtagcagttggattccttccattttcaactgactgcctgagggttgggcagttagttaatatgaggtggagggtcgaaaggctgaaaaccccggaggatgcatccatatccattgacgaaatactttatcaggttgaggcaaacccgcagaactggatggttgctgggaggaaatgtggtcacgtatcgttgtcaaatgagcaaggttcaaggatggagatcacggtgacatgtgtgccactggtgtctgggtacgtccacccaccgcagctggacctgccggaggtgggtgaggcaaacattagctgcaacccagcagggcctcacctggtgtgtgtccttcctccagccatcagcacatcctactgtataccagcgatatgattcttcctgggctgacagtttgctgccatttacacatagatgagccatagtatgtttttgccgagacgtgttttttgtgtgtagacatgtttcactggaatgtgtttcttgtaattctgttgtgccatgatcagtgtacaattctgcattgactgatggtacatgaaactggttccccagtattccgtgaaactgcaagccggatttgctgtgttcagattgtgttgttgcagactggttgcctttcgtaaatcagccagattgtatccttattaggtcgttttcatatctctgaggaatggatgattctagaatgattcttagatcgtttgtgttttactccgtccgttccaaaatatagttctttgtagtcctcttttttcgtccatgtt

SEQ ID NO: 111569 - DNA, 175 bp, Zea Mays
gatatagtgtgtcactgttcatcaccctaagactatccgcaaccgttacccctaaatttttccccctatatcactttttccctctattttcccccctattttttcatctcctgcagcggttccccctaaatactccccctataccccactaccactataaaatatcattttctat

SEQ ID NO: 111570 - DNA, 739 bp, Zea Mays
agggtccacatgtacggatgtctttttccttatcagagctccatacacctgctcgaaattggtaatttctcattgcaagtatcagtcttccattgagttcgcgtacgaggtttttgtggttccacattgttaatggtggtcagtcacaaataagtttgctataccatcatcaacctcttgaactttagttacattttgtcggaaaacatacttttggtgtgtagtgatactaattttgttgtgtcgtgctacgtatagaccatatgcttgctacaattactctaaacaatacaagtggtagctacattttctgtatacatgatgttcatggtatctcatcattgaattatccatgcattcgcttcttatggtttccttctttttaattttccagtaaattctaatcttagttttggaaacacaggcttcatcaacttcaacatatttactcaagggaaaaaaggctgcttgattaagagtaaagaagaagacgaagaaagcgaagaaatgagaaaaggctgaagcttaggtgaaccattaggccgaagggactttcgtattttggaatgaacacttatgcagttaaactactgcttattgtaatatagcattttactctttgtagtgttttcccttttttactctaaatgcttttgttgtgtgtgaaaccaagtatttctagtattttgaggcgaaggcgaaaaacaccttgccttcttttcactcgaaaaaagccccc

SEQ ID NO: 111571 - DNA, 860 bp, Zea Mays
cgcgctcccgagtctcctccgggccgctcgctgctccgacaggcattcgtacgttacacaaatagccatcctcgttcccttgtcctgtgaccatcaccaccagccctcgtccagtcgccggcggcgtacgtgtatcgaccaacgacctgtagaacagattgaggacacatggacatggcggaggaggaggcggcggcaggagcaggaggctcatcgtcatcatcggggaagccggtgatggtggtgggcatcgacgacagcgaccacagctactacgcgctgaactggacgctgcagcacttcttcgtcgccgggcagccgcagcagtaccagctggtggtgctcaccgccaagcccccggcgtcctccgtcatcggcatcgccggcgtgggctccgccgagctgctgcccaaggtggagaccgacctcaagcgctccgtcgcccgggtcatggacaaggccaagaagctctgcaccgagaccgaggtgaccgacgtcggctacgaagccatcgagggggacgccaggagcgtcatctgcgacgcggtcgagcggcaccacgccgagatcctcgtcgtcggatgccatgcctacagcaagtggaagagggctgtcctggggagcgtgagcgactactgcgcgcaccacgcgcactgcaccgtcatgatcgtgaagaggccaaagcacaagcactgagatttatacttatgcatgtacatgtgctcctggattcattggatgtcaattagctgcgcgtgccaaactttttcaattttttaactagcaatattgtcgagtaactcatcctcccatatcatttaggtcacgaaactcttaaaatgattattgttttttggatc

SEQ ID NO: 111572 - DNA, 645 bp, Zea Mays
atgacgtggctaaccatattcatcccagacgttaatgttggggctatattgaacttcgaggagcaggagaaagacaataattctcctcgtccttttgacccttccgttttggagagttacccttcaaacaaattgccttcgttcaagaagctggatgagtacaaatcgtctacactaaggcccagaaatcaagtggaggagacccaaatgaacatggtggacttcacaacaatatacatccactggccactattccaagacctgatgtcaactaagatccagcagctccctgtacatcaacgctccaagttcctagcaaagttgtttgcttatgactcaaaggttggcaagatagttgccactatcaagcaatgtctgaataagattggtaggaagcagtatcatctagctgatacaattggagagttgattaacgagctaggtcacatcgtgccaggtggcatagttcaacctgactctggcccagtttttgacaagactcctagtggaaatgttagtgcgtcaggcctcttgctatcaaaaatggaatgtgcttactctctccgaaactacctgtgttctaaggttatggacatggacaggtattctaccttcttagtgcatggtaaccaaaatgcaacctaa

SEQ ID NO: 111573 - DNA, 1199 bp, Zea Mays
ctttcacgctgtttaaatttaggtgattttgggaattaacttgcagatttattaattattatataggtaaaaagtgtagtatcagttactaggagcaagaacttgccctgatgacacagttattttggtttttctgttcacttctcctaatatttaaccttttgagtaagtgtgcagattaggtcttaaaaagggattgcgattaagctattattgccagagcctgagctgtagaattttccatttacacacgtggctgtacagggggtaaacttgcaggaatattacttggtgatcctataagatacacatgctgtgaaccctgatttgttttagctgcttttgttcgtttttgtctacttagccttgcacactgaggacctttattgaggtattccttgatccccatggttctatataacaaaccatgagtttatatcattatccctctatctcaccttatattgaacatggtttttgatactattcttctttgtgcttgaaggttgctggtctgcgagttgaatcatggcggagtacttggcttcgatcttcggcactgagaaggacagggtcaactgccctttttacttcaagattggggtctgtcgtcatggggatcgctgctctcgtctgcacaataggccaactatatcaccaactcttgtgcttgctaacatgtatcagcgccctgatatgataacccctggagttgatgctcaaggccaacctattgaccctgagaagatgcaggagcattttgaggacttctatgaggacatctatgaggagttggggaagtttggtgagattgagaatctgaatgtttgtgataaccttgctgaccacatgattgggaatgtctatgtccagttcagggaggaagagcaagcagccgtagcatacaacgctcttcaagggcgcttttactctggccgccctataattgttgagtattctcctgtgaccgacttccgtgaagcaacctgtaggcagtttgaggagaacagctgcaaccgtggtggctctgtaatttcatgcatgtgaagcaaattggcagggatctcatgaggaagttgtatgggtgttcagcttccaggaggtaccatgggagaagccgaagccgaagcccgccaccacaaaggaggggccaccgtgaccgtgatgactaccaccaccgcgacttcagtttagtgttg

SEQ ID NO: 111574 - DNA, 849 bp, Zea Mays
agcgtagtcatcacctgtgtctaggttgggagcaaagcaaagagagagaggaaagctagctagctagcatggagagtggcagcaagaaggtcgcagccggtgtgttggtgctgctgcttctccagctgatggtagctccgacgacggcgacagcccgcctcctgcaggcggatacctcccccgtgtttggcctggacttcatcgcgagggagtttggccatccagatggagccatctcctgtggtgaatcatgtgtcatcataccatgcgtttcgacactcttgggatgccgatgtgaaaacaaactctgcgtgaaataaactcgtgacgccgctgctacagtcgggacgaggccatatatctctgatccctttacgtgtgaagaaccagctccatctttgtaacaaatttgtgttgggagaaacaaaaagacggtggtgtttaacttattgtgaaaggtgatttaataataatatataataaacggtacgttggatgtgtgtactcaatcgcctgctcctcgcgtccttttgacatatttattttcagcctgcatacatcttattgtaatcacggaacggtaacttgtgcaaaaacatatggactcactaccggaatctttctgtttttttgcattcatagttttccatatttcgagtgaattgcagttcaaatatgaattatacgaataaattcaattaaaagaataaaatctaatagttatagcaaacaattttataattatgccaaaatagtacatataggtctacatattgtagcaacataccacaaaaaggaggagtactcctaccatgaatggaaaaaggaggaacctaattatattccaaa

SEQ ID NO: 111575 - DNA, 185 bp, Zea Mays
cacaaaaagtttggttgcaaaaaaatatatactttgtcaagtgtccaaggtagtaaattggtaaagaatagttatacgtgtgaagaaccagctcgatctttgtaacaaatttgtgttgggagaaacagaaagacggtggtgttcaacttattgtgtacggtgatttaataatctttactatactt

SEQ ID NO: 111576 - DNA, 776 bp, Zea Mays
agttagtaagtcgagatattataattagttggtaggataggcaagcgagtctggaaaagaagtttagacacttaattaaattgattctatccatcatatgaatgtttggtgtccaaaaatggcgagtctacatttgttagccctttggtgtatactctaggcggtaaagaaaatatagagatcatacatagttgtggtttcttgtttgaattaggttcagttgagcaagaagaatgtgagtgttgtacttagtatgtctagtttattattccttgatatttgtgttagatccgggttaagctcgaggaacgtgattgttatccttagtaagttatagaatcctagtgtttacttgtgattatttcaatgtcatggcattaggtgtttaacttgttactgtgtgtaattgtttagtcttttcttatttagtcttttcttattcatccttatatccattcagttgcaccatgcatctcattaggtacgctagctgagaatcgtacgaagcaaaggacatggaccaaagcagaccacaagacgatgtcggccggtgaattggaaaaaatggacagactgaacgagtgccaagacaaaggatgatcgtcaagtgatcgtcatctaacaaacactaacctagtgttattctagacaagccccggtgcattcacctctttccttattgtttacaatattttatcaccttgaatgatgcattaggtgataggagttgtgtgatcaaacagttgatgcatttccttccttaattaaacaaccct

SEQ ID NO: 111577 - DNA, 294 bp, Zea Mays
atgtcgctgggggaaggcgccggcttggggagatcacgagaagggcgctgggaaggcagaggccgacgacctaggggagagcaggggcgagagggcgccagggagctggccatgggagaagaaactcctgcgcgttgggggagaagggctctgcgcttgggagcttctgcagaaagctgggcgtcgagtggaggaatggagcagagaatggagatggcgccctggctccttttattaacaggcgacgaccgcatgcgacattggcgccttggccggctgctgttggttggctag

SEQ ID NO: 111578 - DNA, 693 bp, Zea Mays
atggctgatgacactgttgtggaagtcaaaggcggtggcagtcgcaaactagtccacggcaaggtcgagaagaaagccgacacgacagacttgcatgtgcgggagcatgaccaaaatagggacatgggtgtggccacgatcatcggcgccgggaaccgaaggcaggggaaaacgacatatcaggatcaccgggatgacaaacggaaccaagccgacgatgtggtgagcatggagctcggcatgggcgccgcactggagagggcgcagtccgagcaggaaaatcccaggcgcgcagagctccgggcgggcgagctgagcgacggcgcaggatgcggcactaggaagaaggccgagctgggcagggaccagaacacaggggaggagggagatccgggctggggcgcagggagaacgtcggagaggcaaccatggaagagagctggagcttggagcagaggaaggccgccgagctgggtccgagctaggggcgcactcgcgcggaaccagggagagggtcacgagctggaggagctcagctggacgcagacgccagggcgcgcggccgagcaggagccagggcacacgacccagggtgcggcggccagggaggaaggcgcacgaggaggaagaagcagggagagcacgcgctggaaaaaatcaggaccgtgggagagaggaggtcagggcggttga

SEQ ID NO: 111579 - DNA, 528 bp, Zea Mays
taggttggggagcagagcaaagcgtagtcatcacctatctatagagagagagaagagagaagagagagagaggaaatctagcatggagagtggcagcaagaaggtcgcagcctgtgtgttggcgctgctgcttctccagctgatggtagctccgacgacggcgacggcccgcttgctgcagcaggcggatacctcccccgtgtttggcctggacatcatcgcgagggagtttggccatccagatggagccgtcccctgttttgaatcctgtgtcttcgtaccatgcatttcgtcagtcgtgggatgccgatgcgaaaacaatgtctgcgtgaaataaactcgtgacgccgctgctacagtcgggacgaggccatatatctctgatcccgttacgtgtgaagaaccagctccatctttgtaacaaatttgtgttgggagaaacagaaagacggtggtgtttaacttattgtgaaaggtgatttaataataatatataataaacgggatacgttggatgtggtgtaccca

SEQ ID NO: 111580 - DNA, 285 bp, Zea Mays
ggtccactgcttagggggtgtttggtttctaggactaattattagtccctcaattttatttcattttagtccctaaattactaaatatagaaactaaaactctattttagtttccctatttaacaatttatgaactaaaatggaataaagtggagagactaatgtttagtccctataaaccaaccacccccttactaatattgccattggagggaaataataaaagaaacaagaataagaatttattgatagtcattatggatacatcttatcattttgatcagc

SEQ ID NO: 111581 - DNA, 174 bp, Zea Mays
atggcggttccctatcggtggtgcggtgacgacggctccccgatccagagggcgatcaacggcggggcaacggtgcgagcgagcggcggctaccccgaggcctcaaggcggtgcatgaggcttgaggttcgagcagtgtcatggaaggcgcgagcagaaaacatatttttataa

SEQ ID NO: 111582 - DNA, 1986 bp, Zea Mays
tttgattatttgatcccaggctttggcgggaggagctccccgcggcaaagggatactgttggtgcaaaacaacagaagatttccatgtcaacatctaagcaaccagctagcttaagcgacccctttgttgttctcgaaacaacttcatcctcagcccatccattcgcagatcccttggatgaatttggtaaagctgcaaaatatcaagggaaaagccgtgaaagtactaacgttgggagcaatctgtttgaggattcaagcacttccatccaggctccaaaatctgaacctatttttacctcagaggtggacaatggcttgaaagataagaatgagtctagcagagcccgagacgcaaatcctgtacagagtttttctaaaggaaactcctcccaacaaccttctgtagaggattttgaaaatatcttttctaagccgcagtctgccagatatgctgatgtccatgttgacattggctcagataaatatagtgggaatggtataaacgaccagtcacctagatctgatgaatccgaagatgagatatggcttacagcttctgagattcccctcttcacacagccaactagtgccccaccaccttcaaggccaccaccacctcttgcagctaagcaaaaaaaacatggatcaaaatcaaaaagaaaagatgatgaacatctaaagcagtctaggaaaaacaatgatcatcaaagaagttcgtcaaatcatgctggtgtttctacagtagatgaactagaagattttgccatgggtaagcctcagagtgtgcatgctttaaatgcggaagaatttgagagaagtacagcagcagcagcatctgcagctgctatgaaagaggccatggataaagcagaggcaaagttcaaacatgcaaaggaggtacgagagagagagcgtgatgcgaagattagaaatagagaacaacgggaacaagatagtgtaacaaggtcgtatgcccaggatcgtgaggacaaagagagaaaggaaagactagaacaagaaagagagatgaagcaaaatgaggaaaaggaaagagagcaaagaagacttgaagaggaaagagaacttgagcgacataaagaaagagaaagagctaggcaagcagtggagagggctacaaaggaggcacgggaaagagcagctgttgaagctcgtgcaaaagcggagagagaggcacgccaacgttcagaacgtgctgctgtgcaaagagcccaacaggaagcacgtgagagggcagcagtggaggctaaagagcgagcagagagggctactgcagaagcaaaggaaagggctgctgctgaaggtaaggaaaaagctgctagtcaagccagggatagggctgcagcagaaagagctgctgtggagagagctcagcaagaagcgaggaagagagctgaacgagcagcagtggaaagggctgctgctgaggctcgggaaagacaggctgctgctgcaagagataaaacgagcaaaccagatgatctagagtccttctttggtatgggtgctcgagctaatagtgctccgaagcaaagggctccgactgtggactctatgtttcattctcaaacgcaaaatagagggagttccacttcgacatcaatgaaaaaggcatcatcaacaacaaatattgctgatgacttgtctgcgatatttggaggagctcctacatcagaagaatttcaagaagtagatggggagagcgaagaaagaagacgcgctaggatggaacggcatcaaagaactcgtgaacgagcggcaaaggctttggctgagaagaatgaacgcgacatgcagcaacaaagagagcaggctgaaagacataggcttgcggaaacactggactttgagattaagcgctgggctgctggaaaagaaggcaatttgcgtgcattgctatcaactttacaatatgttctttggccagaatgtgggtggcaacctgtatccctcactgatttgatc

SEQ ID NO: 111583 - DNA, 609 bp, Zea Mays
cgctgagaaggtttttgatctccttaaggaggcgtggaacaaactcaactctgaagagctcttctaaacagcctcacgactgaacatagggtcgcccctcagggtctgcacaaggtactctcggaagaaactcacaagctggagtggcttgaggttggtcggggggaaccatgaagcgaccaagcgaaacctgagctatggttgttgtaatcaccgatgtttgtttcactcccccaattttctttcccaactgtatgctgattcaatcacaactcacagagacatgtggcagctgcccaagctggacctcatccagtaggccagaaggtgtagtatttatcctgggctgtatgcaccgtcagagcgggggttttcttaggccagtgttgtggttatagattaggtacaggttttttttaagcatggagagacgttttactagataatgatgaatgttgcttgtctgatgccattggcatcgtggcaagttcggttgtcttgtttatagtcaatttctggaacatcacttgacctatactctgattcctgttttcttttactcttgtacaaagttgctggtcgattttgattgcttgtattgtaatcatg

SEQ ID NO: 111584 - DNA, 1803 bp, Zea Mays
atggaggcgaacagcagcaagtccggcggtctgccaccgagaaacgctgacgtctccaaccccaagccaccgacccaccctcccgtccctccgcagcggctcagggagacggtggtcctcccgccgctggagacgcagttccaccaccctccaggctctggcttccgcaccgtgcaacaaaccgtgtcaatgagcctgccggcgtccccgggcagcttcggcaccgctacacccactgccgccgtgacaaccgactccgccgacctccggcggcaggccatggccaacgcgtcgcgcatggcgccgcaccgcctggccgcgcacggcgcggggagcagcagcgtccggttcacgccgcaggagaaggaggaggccatgatgttccggtcgcagcccatccccggtggcccaccaccggcgcggctcgcgagccgggctgctggtggtggacacggcggccgcagggccatgaactgggataggcgctacgactcgttcaagacgtggtccggaaagctggagcgccagatcaaccatctggccggcgccggcgccgagggatctggtgacgacggcgatctggacagtgatgtcatcggcagccaccgtacttgcgccacgtcggtgccagaggtggatcgcttctacgccgcgttggaaggccccgagctggaccaactcaagccgtcggaggacctggtgctgcctgcggaccggacgtggccgttcctgctgcggttcccggtgtcggcgttcggcatctgcatgggcgtgagcagccaggccatcctgtggaaggtgatggcgctgtcggtaccgaccacgttcctgcacgtgacggccaaggccaacctcgcgctctggtgcatctcggtggcgctgacgtgcgccgtcaccgccgtgtacgcgtgcaaggccgccctcttcttcgaggcggtgcggcgcgagtactaccacccgatccgcgtcaacttcttcttcgcgccctggatcacctgcctctgcctggccatcggggcgccgcgcgcggtggcgcccagcaccgcggcgctgccgcgctggctctggtaccttctcatggcgccactgctctgcctggggctcaagatctacggccagtggatgtccggcgggcagcgccggctgtccaaggtggccaacccatccaaccacctgtccgtgctggggaacttcgtgggcgcgcagctcggcgccaccatggggttacgcgagggccccgtcttcttcttcgccgtcgggctggcgcactacgtcgtgctgttcgtcaccctgtaccagcggctgccgaccaacgagacgctgcccaaggagctccacccggtgttcttcctgttcgtggcggcgcccagcgtgtcgtccgtggcctgggccgagatctccggcggcgagttcggccacgtctcgcgggtcgccttcttcgtcgccatgttcctgtacgcgtcgctcgccgtgcgggtcaacttcttcagggggttcaggttctcactggcgtggtgggcctacacgtcgccaatggctggcgcggccgtcgcggccatccggtactccaccgtggtggacaacgccttcaccaaggcgctgtgcgtggcgctgtctgcggtggccacgctcaccgtggcggcgctgttcgcgacaaccatggtgcacgctttcgtgctcaagaacttgttccccaatgacattgccattgccatcacggagcgaaaggtgaagcccatcatggagttgcaggagagcgacggaaaccatatagaggccaccgatgatgcaacagaaccatga

SEQ ID NO: 111585 - DNA, 108 bp, Zea Mays
ggacacacatatatctggtataggagctagaaagctagctagctacctacgaagctgggccctcagagccctcaaaggcaaaaaccttggaaagtgaggcagaaaaaa

SEQ ID NO: 111586 - DNA, 1010 bp, Zea Mays
ttccatgtatcacatcaaacccaaccatgccttgtacatatgcaccatgagtcctttcggggcggtgatcacgccagaaacgctcaagtacatgtccaagtaccagggacgtgagatcacgcaggtggattgtgcgcgggaggcgatgaggctgatccacgcggaagacaagaacctgcaagccgagaattccgcatgggaactcaagaagaagttcggcaacggcgtgagcaccatggtgctcgtctacaacgccaccggcgccaccctgagcctggcggacgacggccaggactggacgggctccgtctacagctcgccgatctcggacaccttccacaacgggcagtggatcgccttcctccacgtcaagcccgccgcgttggcgctaggcagccaggccgccagggtgttccgcggcagggacgtcgatggccggactcgggacttcgtcgtcgcctggtacatcccgtgggacaacatatcaacacgtgcttacactgaaattggcagtgaaaactacttcaagacacggtggagtagtgtgaaaacgagtctaggacatgcaaggagagtgacccgtgccaaggacgagaactgtgcgtcaacggttagcattggtggctacactacagccttctgcatcgcagtcctacaacaccagttccagcccctgccggaagagcgcgaataatccagctgcaacgagtttgcgcgcgtgcgcatcattattattacctcctaatttaaataagtaggtgtttggtttctatggactaatgtttggtcccttcattttattcatttttagtctataaattgctaaatatagaaactaaaataaagttttagtttctatatttagtaattttaaaactaaaatgaaataaaatgtagggactaaacattagtccctagaaaccaaacaccccctaagctgtgcacgcaaacgtacgactgtactagtatttatctatgtattacatgtatgtcgtctattacaatactta

SEQ ID NO: 111587 - DNA, 243 bp, Zea Mays
atggatcctagaggcacgcgcgacgggggtggctccctgagcccgcgttgcagcggtggccaccttgacgtcgcgcgacagcggcggctccttgaggcctcgccccagtggcaaccacttaaggcgcgtgtggcgacgacgcgcatccaaggcgtgtgcggcagcggcggttccctgagggagtgtggcggtgatgggtctaggaggtgcgcatgcggcgacagattccaaaggcacgcgtga

SEQ ID NO: 111588 - DNA, 1230 bp, Zea Mays
atcccgatcaaattggcgagaggagcgagagagaacccaaacggagagagacaatcgagagagatggcaaactgttttggtgacgtcgtggacaattacaagctagacacaatgccaagatatatcggcaaaaagaagactcgagaagaccgggcacgagaggcctcctatctcagtaatgagaatgagaagtacaagaaagctaaagactatgtgaacatgctgaaggactggtacggcaatggagcgtcgaagctgtgcgtgatctacaaccagacgggcggaaccctgcggtacgtcgacgacaaggactggctgggctacccggggccgacgccctacccgacggagatcggcaacgggcagtgggcgtccttcctccacgtccacaagaccggcgcctcgtcggggtccatggccgctgtcgtctaccgcggcaaggacggcggcggcagcgagcgcgacttcgccatggcctggagcaccccctggggcgcctccaagaacagggcctactgcgagatcggcaacgtcggctccttccagtcgcagtgggacaatctctacaaaaaactcaacaaggccggatacactaccaacgcaagtggtaccagctcgtctatttccgccgcaactgccaagggcagctcccccgacttcaaagcatatgtgaagatcccttacagcgcatgatgtcaaatcggatccgtcatccacatcgtatcgcgtcgttctgcttgtactctgcttcttcctctatgtattaataatcccagcagcttgaaataataacaatgcatgcatgcatccatgatggaaattagaaataatgtttatgtccccaaccacgcctacttatgctctcgagttacttatttgctgctgtctctcaactgcatgcctatgtaatatatatacaataaaagagttctagctagtactgttcgtcactcctcctcttgtaagatactccatccgtttataaatgtttgtggctttggtattcgtgtcggtcaaactttcttaagtttgactggaattataacatatattatcaatatttgtatcttcaaataattttactataagcataattcaataaaaggaagatgttgttatgatataaaatgtgcttttttgaatatatatactaccctagttaagataataattttatgtacattgtatgttaaaataagcatgtgcttcatcttaaaattactaataaaa

SEQ ID NO: 111589 - DNA, 1132 bp, Zea Mays
gtgtataattatagtgtttttttctctctctaatgcatacgcgtgtctttataatcgaggacgatcttctatgtatataatttgttaatacactggcatgcatatattcagctatgtgaacatgctgaaggactggtacggcaatggagcgtcgaagctgtgcgtgatctacaaccagacgggcggaaccctgcggtacgtcgacgacaaggactggctgggctacccggggccgacgccctacccgacggagatcggcaacgggcagtgggcgtccttcctccacgtccacaagaccggcgcctcgtcggggtccatggccgctgtcgtctaccgcggcaaggacggcggcggcagcgagcgcgacttcgccatggcctggagcaccccctggggcgcctccaagaacagggcctactgcgagatcggcaacgtcggctccttccagtcgcagtgggacaatctctacaaaaaactcaacaaggccggatacactaccaacgcaagtggtaccagctcgtctatttccgccgcaactgccaagggcagctcccccgacttcaaagcatatgtgaagatcccttacagcgcatgatgtcaaatcggatccgtcatccacatcgtatcgcgtcgttctgcttgtactctgcttcttcctctatgtattaataatcccagcagcttgaaataataacaatgcatgcatgcatccatgatggaaattagaaataatgtttatgtccccaaccacgcctacttatgctctcgagttacttatttgctgctgtctctcaactgcatgcctatgtaatatatatacaataaaagagttctagctagtactgttcgtcactcctcctcttgtaagatactccatccgtttataaatgtttgtggctttggtattcgtgtcggtcaaactttcttaagtttgactggaattataacatatattatcaatatttgtatcttcaaataattttactataagcataattcaataaaaggaagatgttgttatgatataaaatgtgcttttttgaatatatatactaccctagttaagataataattttatgtacattgtatgttaaaataagcatgtgcttcatcttaaaattactaataaaa

SEQ ID NO: 111590 - DNA, 566 bp, Zea Mays
catctctaaaccctaatcactcagtcggtcgccgtcgttcgcccgtccgctcagccggccgagcgctcgagcctcctccgtcccgatcccgcacgtccgccgagcgccgacggcccgagcagccagcaccgcccagcaggcgagccgctccgcctccgcgcctctatccgccgtccgctcgtcccgaggccgcgagccgctccgcggctacgaccctccgcccgccgtctgcccgtccggcgagcgcccgacggcccgagcagcggagcaagcgagcagctccgcgcctccagccttcgcccgccgtccgctcgggctcgaaccgagccgctccgcccaccgtccgccgagcgcctgacagcccgagcaggcgagcagctccgcgcctccgcccgccgtccgctcggcccaagcagctcactcgctcatccgcagagccgctgtgccttccgcttccaggcgcacccgccgggtgtagcccccgaggcctcggaggagtggttttactcctctgaggtcctaacgcttttcgggatgtttcggccggtcctatcgttccctcacgc

SEQ ID NO: 111591 - DNA, 369 bp, Zea Mays
atgaccacatcggctgaggacatgagggaggcaccggcagtcacagaggtgctgtacaagtggacaaacattgacaaggggtggcagtcgcactgtacagatttagattcagtacatgtgcaagactcgaacgtcgtgctctacagtcggcagaagtctgcgaaggtgaagctatacgagactcggatgatgtccaccatgtgttcgttcaaaatcctgtcaagaccagatgaggaggaagggctcaaagccagatgccactaccggagcgctaaggtggacaacattgtctactatcttgaggatgacgtctatgtcaagattctggatgtcgccatagtagaagatgctagcgagaagaaactctga

SEQ ID NO: 111592 - DNA, 1399 bp, Zea Mays
gccttatacgaaacatagctacctactactcaagtatccatccttattgagtacagtgttgatccatggactcggaaggagttgtagcagcaaaggtggcagatgagactactaaaccggcaatccaagaagacggcgccgagagcaaggccgggatgactgatctgctgatgctgaccgacaagtcgcagctgcaggcgctggcgatgctgctgcggaacaacgaggagctcatgatgagccaggcgatcaagtcggagacggagcgcattgagtacctcaagacggtgagcgactgctacacgcggacgatgaagctcctcgacgattccatggcggccaggaccacgtacgagcgttcgggcggaacgaggagcctcgtcgcccgggacatggacgactacgtcgtctacggcctcaacgcgtgcttgcagaacgtccgcaactgctgcgtgcgcctggacgccatcgacaagctgcgggcgcactacgacgccctcgccgacgccgtcgccgacccggccgccaacgtcgagggcctcgccgcggaggcgtccgagtacaaggccgccatgtggcagtactgctacaaccagcggagcgcctccgcgcgggcgcactcccgcgcctactcccaggcgctcaagctggagggcatcgacttcgccgagctggtgcggaggcaccagctccggctcgggtacggcagcaagggcgaggagttcgaggacctggacgacacccagaagctggaggtgtacaaacagcatcatcgtcgagtcggggcggggcgggggctaccggtgcggatgttctcgtcgggccgctctgccggtggccctaagattgcagccacgacgtgggcggaggcggtgagcgtcttcatcatggcggcgggcaacctggcgtgggacgtgttcaccacggagcacgaggtggaggccatcctcaagggcagcctcaacctcctggcggggctagggggcttcgccgtggaggccgtcgtcggcgcggctgtcaccaaggcggtcgcaaacgtcggcgccggcgtctttgcttgctctctcgccggcttcgtcgtgggcgccatcgccgggctgatcttcgtcggcgtcagcggcctcctcattaacctcatcatcggctccccaaggaaggtgcctgacatgagcaagctcatgttccacaccgccgtcatgcccgatggaatggcccttgcgtatgcggtatctcattaattacttaatatcatcgcagtgactaccaatgcaactgcttcagctcctactgttgcaacgcgcgtgtggaaataagaagggaataataataattattattattgtaataaaaaataattatcatatattgataatgattatatatcaaatatcttttctcg

SEQ ID NO: 111593 - DNA, 1509 bp, Zea Mays
ccttatacgaaacatagctacctactactcaagtatccatccttattgtaagtgctcttataagctactactagttacaagctggtttatatttaactacaagtagcaacgatttgtcttagtatatatggttcataatacatatatattggaactgagataatatatgcaggagtacagtgttgatccatggactcggaaggagttgtagcagcaaaggtggcagatgagactactaaaccggcaatccaagaagacggcgccgagagcaaggccgggatgactgatctgctgatgctgaccgacaagtcgcagctgcaggcgctggcgatgctgctgcggaacaacgaggagctcatgatgagccaggcgatcaagtcggagacggagcgcattgagtacctcaagacggtgagcgactgctacacgcggacgatgaagctcctcgacgattccatggcggccaggaccacgtacgagcgttcgggcggaacgaggagcctcgtcgcccgggacatggacgactacgtcgtctacggcctcaacgcgtgcttgcagaacgtccgcaactgctgcgtgcgcctggacgccatcgacaagctgcgggcgcactacgacgccctcgccgacgccgtcgccgacccggccgccaacgtcgagggcctcgccgcggaggcgtccgagtacaaggccgccatgtggcagtactgctacaaccagcggagcgcctccgcgcgggcgcactcccgcgcctactcccaggcgctcaagctggagggcatcgacttcgccgagctggtgcggaggcaccagctccggctcgggtacggcagcaagggcgaggagttcgaggacctggacgacacccagaagctggaggtgtacaaacagcatcatcgtcgagtcggggcggggcgggggctaccggtgcggatgttctcgtcgggccgctctgccggtggccctaagattgcagccacgacgtgggcggaggcggtgagcgtcttcatcatggcggcgggcaacctggcgtgggacgtgttcaccacggagcacgaggtggaggccatcctcaagggcagcctcaacctcctggcggggctagggggcttcgccgtggaggccgtcgtcggcgcggctgtcaccaaggcggtcgcaaacgtcggcgccggcgtctttgcttgctctctcgccggcttcgtcgtgggcgccatcgccgggctgatcttcgtcggcgtcagcggcctcctcattaacctcatcatcggctccccaaggaaggtgcctgacatgagcaagctcatgttccacaccgccgtcatgcccgatggaatggcccttgcgtatgcggtatctcattaattacttaatatcatcgcagtgactaccaatgcaactgcttcagctcctactgttgcaacgcgcgtgtggaaataagaagggaataataataattattattattgtaataaaaaataattatcatatattgataatgattatatatca

SEQ ID NO: 111594 - DNA, 592 bp, Zea Mays
gatctagatagaaggttgggatatttttcacaactgcaaaatcattcacagcagaatatcttcgcattattataagacgaaaacatattttagtagaagattggacgatatcgaagtttcatctcgagatatcaagcaattaatgtaggacacatacaatagatttgcctaaccatcaccttctatcagtccatccatctatatatatctgcacacaccaccacagcaggttggtaaaagcacctcatccccctgcatatactaacactgcaaaactgaaaagggtgatagcaaactacaatgaggattgtgtacatggcagctgttatgtttttggttcttgcaaccatgtcttctacctccccatcattctgccaagctgggggctgtaatttttttaacttttacttatcttgcattggcttttgtgatgttcactggcaaagaaccttgcttgatctgtatggtgtttcatacgtgtaggcatcggctgcccacgggctccaccaccgccgtccgatgagacatgctacgaggacctcaagtgttcggcttcgaggtgccacctgggttgcatacacaggggctacaa

SEQ ID NO: 111595 - DNA, 425 bp, Zea Mays
aggttggtaaaagcacctcatccccctgcatatactaacactgcaaaactgaaaagggtgatagcaaactacaatgaggattgtgtacatggcagctgttatgtttttggttcttgcaaccatgtcttctacctccccatcattctgccaagctgggggctgcatcggctgcccacgggctccaccaccgccgtccgatgagacatgctacgaggacctcaagtgttcggcttcgaggtgccacctgggttgcatacacaggggctacaagggtacgggttcgtactgccgtgggagggactgctgctgcaaacattgatgcaccgtagtgcatctatgcatttcatgaccatacaataaacctagatgtgtatcctttgcctccgacgactataaatgaaatgaaatactactaaggttcagca

SEQ ID NO: 111596 - DNA, 558 bp, Zea Mays
tcgtgtggatcgtggggatggacacggctgtgatggtggctttgatgtatctctgttttttgttttcctggtattaatagagtccagaaaacgctgttacaagcaagcagcaccaaaactcgtctctctcagtgcgctctccgttctctatttcagtgagttcgagagccgtcgatctctgtgtcatcaatgggcagggcggtggaggtagatgaggcatggcactgatccgagggcggcgtaggagggagagtcgggagaaaaacgtcaacgccgacagcggaccaccttcgcttcccccgccccggggcccacacccgcctctgcgatgccaggcttcgccgcgccacccgcccttatcgcctacaccgacgtccctctcctcgcctctttctgcttctggcgacagcaactcctccgggcccagcttgtcgccattactgtctgataaggtactccgcgtgctaaacctttgcctgcagcgtccggcgagcaaatgcctgtcttcaaggagcaagtcttataattgttactggtagtagtaattaagtgaacagt

SEQ ID NO: 111597 - DNA, 972 bp, Zea Mays
ctccatcagtagcgagcaggcgccgcaaccgaaccgcctaggcgcgctcgccgcggatgcggcgcgcgagctggatgtccttgggcatgatggtgacgcgcttggcgtggatggcacagaggttggtgtcctcgaagaggcccaccaggtaggcctcggcggcctcctgcagcgcggcgacggcggaggactggaaccggaggtccgtcttgaagtcctgcgcgatctcgcggaccagacgctggaacgggagcttgcggatcagcaactccgtgctcttctggtacttgcggatctcgcgcagcgcgacggtgcccgggcggaagcggtgcggcttcttcacgccgcccgtcgccggcgccgacttgcgcgccgccttcgtcgccagctgcttccgcggcgccttgccgcccgtcgacttgcgcgccgtctgcttcgtgcgggccatcggggaaggctggggacagggaggccgaggaggctttgctctgttctggggttcggagttcggacggggcgtggggctctggcttcgcggtggccggtgaggagttgcgggcaggcgggaaggggttaaagtaggaggcggcgggtggatttggtgctgcgcgcgcggagggttgggaatttggccgtgcgcgggaggagggaggagaagggagggtgggatgcgcgccgttcgattgcgtttgaacgaagggtggagattggttttagaggggtcacgcggataccgatccgtgggtggtgagcgcggccattggcggagcgccatctggcagccacctgaggccaatagtcacacatacagtactgccgcatcatagtttgtttggcgctacgggacattcctttccctccatggaagatggaacggcattgcacttgcggtgcggaaatcaactttttatggctagtttggaagaagggggtagagagaaaattagagggctaagagcatctccaagagac

SEQ ID NO: 111598 - DNA, 1204 bp, Zea Mays
cccccctgcccatctcctcctctctcaattcttgcagccacaccaccaaaccctagccccccccaatctcctcctcccaaggtgccaatccttgccgctcggatcatcgtcacgtggtgcgagtcttcgatcgttttggtggagggaagaagggaggaaggaaagggggagaatccaaggtggtggactcccagatcgttcttagggatttgcccaaacttccggtgaaggcaagtaaaactgtgatggttattacgcctgtcagatgaggagtcttatacttgattatgttgtgctattgtgttcatattcatattttcttttgagtaccatcatttgaaaatgttcatgtttcatggatttcatatgttgagtttgaggtttgattatgttactcaagtggttattatgtggaatgggtggaagtaaatgtctagcacatttttatttgggaagaactcatgatgttgtcatgcataatgcactcatcctccattgcattgaagtttcgtcgcgatcttatggtccgaccgtaccggtacattgagcatcatatgttgcccgagaaggggtatggtgcagcttcatatccttagcgatatggaggcagaagtcattattgcatttgtagccatgtgcattcatgggagaggtgtggaatctattatgtggatgtggataatttggacttgtgcatggtgattctacttggcattgagtttttagttacttgtttacctgctgcaatttactgttcaaaagaaaagaaagaagttctgaacacgtggttgtgtaagcacagttgatttacaatgtcctatttgttgttgttatgtttacttgctgagatgtgttatctcacatcttgcattgtttgatgcaggcacctaatttctgctttgggaatagagggatgtagcagcacggccactacacctttaataaaggaaccaccatttaataatgttgttaatcagagttggtcaagtctagtggattgctttgttcttggttgagcgtttatttttgggtgggctgagtttcttatcccatgtgttttacttcagttggggcataaatgagctttaccactttatctagtttctactatgtgaattatatgtctttatatccggtatgaacttcatgttttcccctccttgttatgttagtttcaaaggaggtgctgccggattttgctata

SEQ ID NO: 111599 - DNA, 126 bp, Zea Mays
atctaatgttgccctcttaagtacctcttcaatcctcactttgacgtttggtgactataataaggtcatgtttggtttctttagtctaggggctaaagtttagttaggggactaaagtttagtctc

SEQ ID NO: 111600 - DNA, 1243 bp, Zea Mays
atcccaaccacctaccatgggcctggcctggcctggcccatttctatgagaagagaggaggagaactgaagggatcaaagggaaaggaaacctagacaagcgaggcggcggccccgcgttctccgtctccgtctccgtctccgtccgcccggcgtaaagaaaagcctctctcaccacagccgccacgccatggccgaggagaccgacaccaggcctgcctccgcgggctcccgaggccgccccgcgcccgaggacgacgacagggaggagggcgagatcaccgacctcgcctgcgctccttccccgcccgccacgcacccgctcgagcactcctggaccttctggttcgacaacccgcagagcaagtccaagcaggccgcctgggggagctccatccgccccatacacaccttctccaccgtcgaggaattctgggggctttacaataacattaatcaccctagcaaattgatcgtgggagctgatttccattgcttcaagaacaagatcgagccaaaatgggaagaccctatttgtgcgaatggtggtaaatggaccatcagctgtggaagaggaaaatctgatacattttggctgcacactctgctggctatgattggtgaacaattcgactatggtgatgaaatttgtggcgcagttgtcagtgtgcgtgggaagcaggaaagaattgctatttggacaaaaaatgctgccaatgaagccgctcaggtaagcatcgggaagcagtggaaggaacttctggactacaaggactccattggattcattgttcatgacgatgcaaagaagatggacaaaggcctgaagaaccgttacacggtttgatcctgatgctggaatcccagagagttgtagcagtagctggcccaaatgcatgctgggtggttttatctattgctgatgagttgtttaagcaagatccattcctgtattgtactccataagccacttgggtgttgctttgtattgttcactgctgtgttttttctgtggcaccgcatctacagtactagttgcttgtcgttgttcagttgcgcttgaatctgaactaacggagtctgagcaaaacacagcatattcaaacacggcgagcagcaccgtagccaaggcgacaggaactcaggaagtgcggtgaattagatttgttagatataatcaagttgaatttgtatttagactctgatgggcctgtttgtttcagattatataattaggcttaaat

SEQ ID NO: 111601 - DNA, 286 bp, Zea Mays
tcccattaatttatcatttttctatgatttttagctcaatttacaagtttgctgataaaagaaacgacaaaactgagtacagtattgggccaaaacctagcccagccgacccaggcagagtttgcctacaacgaacagcccgcgtccgcatcacacatcttgcaaaaaggaccttcgcgctcaaactaatccacattggcccttgccactgttgatcttactcactgacagattcacttaagttcatcagattccactcttttacaaagttccagccacgacgccg

SEQ ID NO: 111602 - DNA, 1391 bp, Zea Mays
ttttagcagcccagctgtgcgctcctttcttttatctgtgtctgcgcctcccttgcacggactccgtctccactccttgacgactcacgagcacagcaaggctcgctcgctcgcacacaccaagcaagcaggccgcaggcgtctcacaggctctccgccgtcccccaacgcgctttccccggcgccatggccaggctggcgctggtgctcctcctgctgctggccgtggcggcgtccgcgtgggccggcgccggcgcgagccacctcgatctgggcttgggcttcctctcctccggggaccgccggcgggagtgccgcggcacggtggccgagtgcctggacgagtcagagggcctggacctgggggcggggcccgcgtccgtggagtcccaccgccgcgcgctctacggcggcggcggcgggtacatcagctacggcgcgctgcggcgggacaacgtgccctgctcccgccgcggcgccagctactacaactgccgccccgggggccaggccaacccgtaccaccgcggctgctcccgcatcacccgctgccgcggctgagcggatccggcattccacccgccgccgagaataagttcttttgccctgttcaccccacccgagtgctaccgctaccgccgccgctgttcacaagtagtactagagctatggattttcattgttgtatggggggtttgtttgccagatccttgtgctgatcctatgtcgccttaatactcttattattctttccattccattgctttgattgctgcttggttcctgcaagtgtcctgttcagacagattctgagttcgggttgctcattctcaagagtccgggattcgtcgtggagacctgacctagagcagcagatgcagatccgtgttcctggctgatccctgctctttgttctttctgctacgatcccacctgcattgctgcttgcaggaatggagttttttttttttttggaacaattggatctatactattaaaagatccaaactttagatatataccatggaccacacatgttattgactcatgtgaacccacatgtaagtgagatagtaatggtatggatccaaagtggtgatcttttaatggtatggatccaaatttccctttttttttggctgtgcgatttatgtggtggattctgctgagagctaggaggcatcgtgtacacaacaggcagatgaaatggaagcatggaaccactttattttccaaaaaaaacatttcatatgctggaggtggattgtattggtctggacgacggtggttgagagtgagaggcatgagccgtgacgcggcatcttcattctgcgcgccatgtggagttgctgttcgtatatggagggaataaatgacctgtttttcttgtt

SEQ ID NO: 111603 - DNA, 1583 bp, Zea Mays
accaaacctcgaaagattcccaaagctgaccctctagaaagccaagaaaactcactcctctctcctctctctctctctctctcgcctctcgcctccgtcggccgtcgccatgacccgcgtcctcctccccctgcttctgctgctggcgctgcctggtgcgtatgcacgcccggcgcggcagtatctgggacagtgtccggggctggagtacgggctgccgccgttcgccgccgcgctccgggcaacctgccccgtctcgacggaggggtactggcccccctacgaggttgttagtggggaggagcttctgaggatgttggatggcaaggaaaagcacacggctgtccttttctatgcatcatggtgccctttctctcaaagaaccagatcagtctttgatgatctgagctcaatgtttccacgggttaagcacttggccgtggaagagtccagcatcatgaagccattttgtcaaggtaccatgtccgtgcactgccttccataataatagctcgcaactcacacgtgttctggcctcttggttccaaagatctcgactccctggtcagcctttacactgctgctacaggtgaagagccagtggcatacatcggtagccggaagtggagcgcagcgcaaagcacagacggctatgcaaaggcttggaacagctcaattattagtgaaacagtgaagcgagaaccctaccttgcattgagcatcctgtttatttgcatgagggtgttctttttcttcttcccaaagtcatttgccctcatccaagacttgtggaccggataccgcgagcagatcaacctcggaatcctcggcagattggcccagctgcttgaatgcgtgcctcacgccgtggatgtgaggaaggtgtggagcaagttgaggctcgtggttggagctaatgagaacggtagggtctgggcagccctaacttcgttgccccttggtgggcgaccttctccgatccacgggttgctgttggactgattggctcgaccatctaactgacagcaacaactaatatgcaatgattttatctgtaagcatttaagtaaggctctaggtttgttagattacgatccaactgtagatataattttgatttgttatgggttttctataaatctacatgagtcggtgatggaaaggtttaaatattaaatgtgatatatcgttggatcataatctaacagaccaggagtcttgtttgcatgattgtacataaagtctgattgcatattagttgttgccctgactgacagcatgagaacacgctggctgattcattgaattgcatcattgcatgcacttgacgaagtacatattgagacagataagtgaggtctctggctctctctgctcagaaacatgcatcctgtttgtagcatgtagtaaatcttagggacacaccgtggtggagcctttgtaaatcatactgtaacagtagtcgttttcatcatgtaatcggtaatggatgaatggtccatggacatccttcagtgtcgttttctgtacaagtctttgtttgcttcgcctatatatattgtgacctttcattcttgattgat

SEQ ID NO: 111604 - DNA, 1703 bp, Zea Mays
accaaacctcgaaagattcccaaagctgaccctctagaaagccaagaaaactcactcctctctcctctctctctctctctctcgcctctcgcctccgtcggccgtcgccatgacccgcgtcctcctccccctgcttctgctgctggcgctgcctggtgcgtatgcacgcccggcgcggcagtatctgggacagtgtccggggctggagtacgggctgccgccgttcgccgccgcgctccgggcaacctgccccgtctcgacggaggggtactggcccccctacgaggttgttagtggggaggagcttctgaggatgttggatggcaaggaaaagcacacggctgtccttttctatgcatcatggtgccctttctctcaaagaaccagatcagtctttgatgatctgagctcaatgtttccacgggttaagcacttggccgtggaagagtccagcatcatgaagcgtaagacccgaatatgctggaacgcagtaattacctttcataataatagctaataatgcatgtaagtgagacatctctttccttgtatatataatctgcagcattttgtcaaggtaccatgtccgtgcactgccttccataataatagctcgcaactcacacgtgttctggcctcttggttccaaagatctcgactccctggtcagcctttacactgctgctacaggtgaagagccagtggcatacatcggtagccggaagtggagcgcagcgcaaagcacagacggctatgcaaaggcttggaacagctcaattattagtgaaacagtgaagcgagaaccctaccttgcattgagcatcctgtttatttgcatgagggtgttctttttcttcttcccaaagtcatttgccctcatccaagacttgtggaccggataccgcgagcagatcaacctcggaatcctcggcagattggcccagctgcttgaatgcgtgcctcacgccgtggatgtgaggaaggtgtggagcaagttgaggctcgtggttggagctaatgagaacggtagggtctgggcagccctaacttcgttgccccttggtgggcgaccttctccgatccacgggttgctgttggactgattggctcgaccatctaactgacagcaacaactaatatgcaatgattttatctgtaagcatttaagtaaggctctaggtttgttagattacgatccaactgtagatataattttgatttgttatgggttttctataaatctacatgagtcggtgatggaaaggtttaaatattaaatgtgatatatcgttggatcataatctaacagaccaggagtcttgtttgcatgattgtacataaagtctgattgcatattagttgttgccctgactgacagcatgagaacacgctggctgattcattgaattgcatcattgcatgcacttgacgaagtacatattgagacagataagtgaggtctctggctctctctgctcagaaacatgcatcctgtttgtagcatgtagtaaatcttagggacacaccgtggtggagcctttgtaaatcatactgtaacagtagtcgttttcatcatgtaatcggtaatggatgaatggtccatggacatccttcagtgtcgttttctgtacaagtctttgtttgcttcgcctatatatattgtgacctttcattcttgattgatggatgttgaaacttgaaac

SEQ ID NO: 111605 - DNA, 2048 bp, Zea Mays
gcacgaatcttatcgtagtccactcgaagtcgcctcccatttcgcgggtcaccggctcgccgctgcgtcaagcgagcgcttccccccagatctcgacttctcgagcctgtcctccgccccccacaggctctgctggatccagaaccttctagaacccctgcactgcgcggtgcgcgccatcctcctccttccttccatccagatctcgacacccctcgccggcccagacctccggtcctgtcgtggccccggggttcgggcggctgccaaagaatcagtggccatgggatctgctatcctcaacagcattgcccccgaggagcctaaagtggtcgtgccagagtacggtgagacggctgatatccaggacaaggaagttagtatggaacagctctgctccataagcacctatgatcagtggacgccactctctgtttctggccagcttcccaaaccacgctataagcatggagctgtggtgattcagcagaagatgtatgtctttggtggaaaccacaatggccgttaccttggcgacattcaggttttggacttcaaaactttgtcatggtcaaagctggaagctaaatcacaagcagaaccatcagaatcagctggagcagttccgttttctgcatgtgctggccattcagtgattcaatggggaaataagatcctatgtcttgcaggacataccagagaacctgcagaaagtctcagtgttaaggagtttgatccacaaacctgcacttggtctaccttgcgtacttatggaaggtcacctagttcacgtggtggtcagtcagtgacccttgttggagacactctagtggtctttggcggtgaaggtcatgggagatctcttctgaatgatctgcacattcttgatcttgagaccatgacttgggatgaatttgagaccacaggcactcccccttccccaaggtcagagcatgctgctgcttgctttgcagagcggtatcttctgatatttggcgggggttctcattctacatgtttcagtgacctacacctccttgacactcagacaatggaatggtcaagaccaaagcaacaaggtgttactccagaatcaagagcaggacatgcaggtgtaactattggagaatattggtttattactggtggtggaaatagtaggaaaggtgtctcagatactcttgtactcaacctgtctacgtatgaatggtcagttctcactaatcttgaggcccgtgcaccccctgtaagtgagggctcaagtttagtaatgcacacaattaatggagaaaattttctggtgtcatttggaggatatagtggccgttatagtaatcaggcttatgctctcaaggcaagtctcaaaccaagtgtcccatctcaacaaataaatgaatcagatacaaatggcttttctcccttatctgtggcagaaaattctagcaggaaagtcatatttgaaattgaggaacttaaagatgaaaagcctggcaatagggcagataacagcaaaaccttgggacaagtagttatggttgaacaaaacgaaatagaaaacagacttaatcaagagcacttgcagagtctccgcctgaagcaggaactaactggtcttgagaacagaaatgcagaacttactgaggaactccacttagttcaagatcaactttctatcgaacaaaccagggcttccaaatttgagaatgaaatttcagatattcaacaacgactacagaagatggataccctagaaaaggagattgaatcacttcgctatgaactggacagcactgtatccgaagaagaatcttcaagtggcaacgagttgcaccgcagtcggggcttttggaggtggaatgggtgaactcctcgagactcaaggagtgagtattgaagagaatactcttccaaatagttgtcattattttaatttttatgtctttcacaaaaatatatgaattcgtggatggtactagttcggaagcatatagaggatctaagcaaactgcagcaacatcaactgtgaaaagcatcttacagaaagtaaa

SEQ ID NO: 111606 - DNA, 2028 bp, Zea Mays
gcacgaatcttatcgtagtccactcgaagtcgcctcccatttcgcgggtcaccggctcgccgctgcgtcaagcgagcgcttccccccagatctcgacttctcgagcctgtcctccgccccccacaggctctgctggatccagaaccttctagaacccctgcactgcgcggctgccaaagaatcagtggccatgggatctgctatcctcaacagcattgcccccgaggagcctaaagtggtcgtgccagagtacggtgagacggctgatatccaggacaaggaagttagtatggaacagctctgctccataagcacctatgatcagtggacgccactctctgtttctggccagcttcccaaaccacgctataagcatggagctgtggtgattcagcagaagatgtatgtctttggtggaaaccacaatggccgttaccttggcgacattcaggttttggacttcaaaactttgtcatggtcaaagctggaagctaaatcacaagcagaaccatcagaatcagctggagcagttccgttttctgcatgtgctggccattcagtgattcaatggggaaataagatcctatgtcttgcaggacataccagagaacctgcagaaagtctcagtgttaaggagtttgatccacaaacctgcacttggtctaccttgcgtacttatggaaggtcacctgtatgattatgcttttctgtgttttattgccaaagcttctatagtatttatacaaattagcttgttacctgaagcttgcttttgtttttcgttgttttcccccaaatctgtgatgaattttcctatttcctttagagttcacgtggtggtcagtcagtgacccttgttggagacactctagtggtctttggcggtgaaggtcatgggagatctcttctgaatgatctgcacattcttgatcttgagaccatgacttgggatgaatttgagaccacaggcactcccccttccccaaggtcagagcatgctgctgcttgctttgcagagcggtatcttctgatatttggcgggggttctcattctacatgtttcagtgacctacacctccttgacactcagacaatggaatggtcaagaccaaagcaacaaggtgttactccagaatcaagagcaggacatgcaggtgtaactattggagaatattggtttattactggtggtggaaatagtaggaaaggtgtctcagatactcttgtactcaacctgtctacgtatgaatggtcagttctcactaatcttgaggcccgtgcaccccctgtaagtgagggctcaagtttagtaatgcacacaattaatggagaaaattttctggtgtcatttggaggatatagtggccgttatagtaatcaggcttatgctctcaaggcaagtctcaaaccaagtgtcccatctcaacaaataaatgaatcagatacaaatggcttttctcccttatctgtggcagaaaattctagcaggaaagtcatatttgaaattgaggaacttaaagatgaaaaggaactccacttagttcaagatcaactttctatcgaacaaaccagggcttccaaatttgagaatgaaatttcagatattcaacaacgactacagaagatggataccctagaaaaggagattgaatcacttcgctatgaactggacagcactgtatccgaagaagaatcttcaagtggcaacgagttgcaccgcagtcggggcttttggaggtggaatgggtgaactcctcgagactcaaggagtgagtattgaagagaatactcttccaaatagttgtcattattttaatttttatgtctttcacaaaaatatatgaattcgtggatggtactagttcggaagcatatagaggatctaagcaaactgcagcaacatcaactgtgaaaagcatcttacagaaagtaaaacgagtatcatgtggcccagaatttcctatgttagaatagtttcttatctgataatgacaccgacaatgatcaccataacgaattatttttttt

SEQ ID NO: 111607 - DNA, 1792 bp, Zea Mays
cgagcctgtcctccgccccccacaggctctgctggatccagaaccttctagaacccctgcactgcgcggctgccaaagaatcagtggccatgggatctgctatcctcaacagcattgcccccgaggagcctaaagtggtcgtgccagagtacggtgagacggctgatatccaggacaaggaagttagtatggaacagctctgctccataagcacctatgatcagtggacgccactctctgtttctggccagcttcccaaaccacgctataagcatggagctgtggtgattcagcagaagatgtatgtctttggtggaaaccacaatggccgttaccttggcgacattcaggttttggacttcaaaactttgtcatggtcaaagctggaagctaaatcacaagcagaaccatcagaatcagctggagcagttccgttttctgcatgtgctggccattcagtgattcaatggggaaataagatcctatgtcttgcaggacataccagagaacctgcagaaagtctcagtgttaaggagtttgatccacaaacctgcacttggtctaccttgcgtacttatggaaggtcacctagttcacgtggtggtcagtcagtgacccttgttggagacactctagtggtctttggcggtgaaggtcatgggagatctcttctgaatgatctgcacattcttgatcttgagaccatgacttgggatgaatttgagaccacaggcactcccccttccccaaggtcagagcatgctgctgcttgctttgcagagcggtatcttctgatatttggcgggggttctcattctacatgtttcagtgacctacacctccttgacactcagacaatggaatggtcaagaccaaagcaacaaggtgttactccagaatcaagagcaggacatgcaggtgtaactattggagaatattggtttattactggtggtggaaatagtaggaaaggtgtctcagatactcttgtactcaacctgtctacgtatgaatggtcagttctcactaatcttgaggcccgtgcaccccctgtaagtgagggctcaagtttagtaatgcacacaattaatggagaaaattttctggtgtcatttggaggatatagtggccgttatagtaatcaggcttatgctctcaaggcaagtctcaaaccaagtgtcccatctcaacaaataaatgaatcagatacaaatggcttttctcccttatctgtggcagaaaattctagcaggaaagtcatatttgaaattgaggaacttaaagatgaaaaggaactccacttagttcaagatcaactttctatcgaacaaaccagggcttccaaatttgagaatgaaatttcagatattcaacaacgactacagaagatggataccctagaaaaggagattgaatcacttcgctatgaactggacagcactgtatccgaagaagaatcttcaagtggcaacgagttgcaccgcagtcggggcttttggaggtggaatgggtgaactcctcgagactcaaggagtgagtattgaagagaatactcttccaaatagttgtcattattttaatttttatgtctttcacaaaaatatatgaattcgtggatggtactagttcggaagcatatagaggatctaagcaaactgcagcaacatcaactgtgaaaagcatcttacagaaagtaaaacgagtatcatgtggcccagaatttcctatgttagaatagtttcttatctgataatgacaccgacaatgatcaccataacgaattatttttttt

SEQ ID NO: 111608 - DNA, 866 bp, Zea Mays
gccaagctagcctgcccctagtccccttacccctgcggccctgcccctgcccccgctcccgattccgccgccgcatccgacccaacccgctgcgatcccctccgccgtggcgtcggcgactccctctcccgcgacgccctttcatcgctgcagttgatacgccacccgagcggttccttccctcctctcttcctccccttgtcgctctccgcatcgccgcaggccgtagggcgccaccgcgtcagaaggcgcgatccatggaccggtcgatcaacttccgcggcatcgccgggagcgccggcaacatcatgcagggaatggggaaattcgttttcggcaacgagggactcgactcaaaggaagatagctatgttgagagataccttgaccggataagcaatggcaccatacctgatgaccggagatctgccatgactgagctgcagtctctcgtggccgaaagtcgcttagcacagatgtcgtttggagcgatgggttttcctatcctcctcaatatttttaaagaagaccgcgaggatgtagagcttgtgagaggtgcactggagacctttgtgagcgcattgactcctattgagatgtcacaagggccaaagactgaggttcaaccagcatcagtgaattctgatctgctgtctcgagaaacggagaatatttctcttcttctgagcttattgtcagaggaagacttttatgtgagatactacacaatccaacttctaacagctctacttacaaactcgctgaaaaggttacaggaagcaattctattgattccccgtggtataacagttctaatggacatgcttatggatcgtgaggtctcaacattctctgcttattttctc

SEQ ID NO: 111609 - DNA, 690 bp, Zea Mays
atggatggaaggggatcgcgggggcaaccgattgaagccatggatgcggtagcggtcataaggaatgaagcactgttacttcttacttatttgactcgggatgcagaggaaattcaaaaaattgttgtatttgagggtgtgtttgagaagatatttagcattatcagagaggagggctattctgacggaggtgtagttgttcagcatctcactcctagtcttaattctacttcctttgatgactggtgggaggaaatgcttttgaaagagacaatgggctttgacccattgatatcaatactaaagattaggagaggcagtgcatttaattttacccaacagaagacagtaaatctcctcgctgctttaaatactgtggaattgcttttgatggtgggcccatccggtgaagcaggtaaagatgctaacaagaatgcaaatcaaactgcattggctcagaaaaacattctggaccatcttcttttgttgggtgttgagagtcagtgggcccctgtcgctctccgctgtatgagaaatcctaatggccaggcattattagcatcaactattgctccacatccaaaccaaggagatattcatgaacctgctagtgacatgccttttggaagtgtacttctgcaagctctggtttctagtgatgtcaatggagatatggaggtgaagacttga

SEQ ID NO: 111610 - DNA, 1533 bp, Zea Mays
caggtattgcaaattcagcttgagacatctacagcatccttggggcgtactgagccggtattgcatcgtattgttacatgtttgtccatcgcagcttcaatggagggagaaaatgaccaaaacaaccaactagaggaaccgtacattcaaccttttattcttcggctactcatcatatggcttgttgattgttcaaatgctgtcaactgccttttggaatcagcggtgcatctgaacttcataatagagcttgcttcgaataaacgttacgccgcttgtgtccgtggattggctgctgttgttctaggtgcttgcatcctgtacaatgctagccgtgagaagggtcgtgatgcctttgccgtggcagatgctataagtcaaaagattggcctcacaacatacttcttgaggtttgatgaactgaggaaaagcttggcacatccgttgtcagagcagcatcaccgcaaggagctttcccgatcaagtgcgaatagcatgtcagatttccaagagattgaagaggatgaaacaaataagggcgatcaacaccctgtgctttcagaaatatttgattcacagtttgttaatttacttactaagcttgaggctgatattagagaaaacataatggatatatttagtcggacaaaaactgcaacagcagtccttcctactgaattggagcagaagaacggggaggtcgatgaagagtatatcaagcgactaaagtcatttgtagaaaaacagtgcaatgagatgcaggacttgctggcacggaatgcaatgttagcagaagagttactgagaactggtggtggtacgaccacagatacttcacagaaaccgagcagtggccgagaaagggtccagattgaagctctcagacaagaactggagggggcaaaacgacagataggggcactcaaaagtgagaagtcccagattgaagctgaagctaacaaccaaagaaacctttcagtaaaactggagtctgatctcaagagcttgtcagaagcttacaacagcatagagcaggccaactaccgcttggatgccgaggtaaaagccttgcggcagggaggcagcgtgccatatcctgacgtggaagcaataaaagcgcaagctaaggaagaggctgagaaggacagtgaggcagaactgaatgatctactcgtctgccttgggcaggagcaaacgaaggtcgagaagctgagcacaaggctggcagagctcggggaagatgtggatacccttctgcagggtattggcgatgacactgccattccggatgatgacgatgaagatgatgaagagtgattggtttatgtaacctgcaggtctgctggtgtaatctaccttcatgttgggtcatgatattgcgatggtaactggaaaatgtacagtggatgacaaatgcaccgttccaagtttaagttatttctagagaatgtgactaaatagcctcttgttaaatttgattgtctgaataactttttatattacctttgataaatagccccttgttgaatgggc

SEQ ID NO: 111611 - DNA, 1228 bp, Zea Mays
agcttgggcagttgggttccagaactgcgcctaaggtttcttgcacgcgcaaatgaagcggcagccaccacatcctcgaggcggcggcggcgcggcggtcggcgagagcggaagcggcggagggttccataagggggaggggaaagggaaagggaggtggggcggcgggtgccggcggcggaacgagcagcggctgggtgtcggcggcggcggcggggccctctccctcgctgctttcgccagcgccaagtcccggactaccggctacaacccggccgtcatcaagaagcaaaaggagttctacaagaatgctaaactaatcagcaaatacaaaaggacaaagaagcaacaaagtcagtcaaacgaccatccgcagattccaatccatgaggatggtggcgacaatgcccaatatgtaccgaaaccgcgctaccaaggcaagaagcgcaccgcgcatagtttgaaggaagagtacgagaagaaacgcgcagaggatgagaaggctaagaaagagcaggatgcagcagttcaggcgaagagggaacaccgggagaagtccgaggcaaagcggagggaactgagggagaagatgttcaagaagacgagatctggccagcctgtgatgagataccggatcgagcatctcttggagacggcactgagcaaataacacgatgccaccgtcatcttggcagattttgtagttccgctgtccaatcgatttgttggttttaactgactttgtcacctttttagtttgcaaaaatggacaatctaagtgacaaagccagttaaaaccaacaaattggttgggctgcggaactacaaaatttgttggtcaatataccaaggcgatggtggccccacctagagctaggccagaaaagcctcatccaccggcagcccttaagccgtagtagtagggttctattctgttgtcggcagcccttaagaagagactgttcaccagtggagacacttccacttaaccaataaattacctgtgaaatcaatcattatgtcgagcaaaatgtgcgccggggtttaagttcaagaaagtaaatcagatagggcacatacctatgaatataatgggcttctctactgaggacttgatcgaaagtacacgtccattaattaggtcttcttgctgcctgcagaacaaattccatataactaactacttgtaagataatgatccaatagagatccttcatttttaattgca

SEQ ID NO: 111612 - DNA, 1687 bp, Zea Mays
atctcgcaagcagcagcagagcagaaactgagggaagcgagggacggcgatggcgggtgcggaggggagagggccgagacggagccgcgtggcgttcgtgctggtggacgggatcggggacgtgagcgttccgtcgctgggcgggcgcacgccgctggacgcggcgtgcgcgccgcggctggacgcggtggcggcggccggggtgaccgggctcatggaccccgtggagccggggcttgcatgcggcagcgacacggcgcacctatccctcctcgggtacgacccacgggagtactaccgcggccgcggcgcgttcgaatccatgggtgccgggctcgccatggcgcctggcgacatcgccttcaagtcgaacttcgctacactggatgagaacactggagttatcatcagcaggagggcagatcggcactttgaagaggaaggccctatactctgtgctgcgttggatgggatgaaacttcggtcgtttcctgagtatgaagtcagagtaagatatgctaccgagcatagatgtggtgtggttgtcaaaggaccaaagctgagtgggaacatttctggaactgatcccttgaaggacaaccgcttgcatctgaaggctgaaccgttggatggctcagaagaagctaaaaacactgcagctgtggtcaatgagctttctatggagattacgcgcatactggtttctcaccccatcaacgcaaagcgtgcagctgaggggaagaacatcgcaaatgttgtgttgctgcgaggttgtggtattcggattgaggtgcctgcctttgaaaccaaacatggacttgcaccttgcatggttgctcctaccaagatcatagctggcctgggactgtcactggggattgatatccttgaagcacctggagcaactggagattatcgtactctcttaacttctaaagctaaagccatagccaaggcactctctgcccctatggatacaccacctcgtgtttttgtgcctggagaggatggatacaaggctggaaaagaaaatggatatgactttgggttcctgcacataaaggccattgatgatgctggtcatgacaaggctgtcaagttgaaagtacggggtctagaagctgttgatcgagctattggtcagcttgcgaggcttctttgggaagctgaaaaggccggacactatcagtactttctttgcgtcactggagaccattctactcctgttgaatatggtgatcatagcttcgaacccgtcccgtttgcaatatgcagactgagagattatgcaggagccattggggaggataatattatgaatacacagctcgacgattttcccctcccttcggtaaaatccggagaagatttgctcgacagtatagaatcactggagcacaagcctggtcaacttaaagctttcagtggcgacagtgtgtgtgagttcaacgagatcgccgctgcgaggggctgccttggacgattcccaggaagcgagatgatgggcatcattaagaagtttatcaaggccaagaatgattaatgctggttgaaatgctaacctttagcgtaatatattggccataaggtttattatcaatgtaataaactaataatgacagaatggagcaatatggaagaaccgtcttgattggagatgaataagagataccttggtgaaaaacaa

SEQ ID NO: 111613 - DNA, 183 bp, Zea Mays
atggcggaacactccgacgcggctgcggccgtaactgcgcggctactggagctcgcggccgacaacgactccacggcgctcggggacctcctcgcggtacacccgtcgcttgccgacgagcccgcgccgtggtactccccggcgcgcggcgcggagcctatgaccccgctcatggtcgcggcg

SEQ ID NO: 111614 - DNA, 1253 bp, Zea Mays
gcggggtcgcgcagcgcgatgggaatggggctgccgtcgccgggtgcgtcgttcacgccgccgctctcgccttctggcgggggaagcggtgtggccggcgcgtggccgcagcccaacgtgcccgcgctgtgcctccccgggagcgcggggaaccttcagctgagccggctgcgcactttgatgagcgcgcgcagcatggcagtggacgagctgctcgcctcggcggattacgacgggctcgtcgggtcgccagcctctctgcggtcggcgaggggaaagacgctcgtgccgtccaatcttgacgatctgttctcggcggagatggcgggcgccgcggcatctcactcgcctcggtacgcagaccagggcggctctgctttctcgccgacgcgtaaggccgccatgctgaaccagttccagcagcagcagagcttgctgtctcctcgggccacggttgtccctgagccggtgtctccgatgagctccaggttgctctcggcccttgcgcaacgggagaagatgcagcagcaaacgctgagaagtatgagctctcgtgacctgggctccggcgcctccgtcctggttggctcaccggttacctctagctggtccaaatggggaatccccccgagcacaccagattggggtgctgacgccgaggagcttggccgcctcaagcgatcctcgtcctttgagctccggagtggtgccaacggtgatgagccggacctctcatgggtcaatacccttgtgaaggagccaacgccggagaagccatccatcaacgggacagccgcaaaggagtctattgcttctttgagccaggctgtaagtcatgaggatatcggcggtgaggacgacactgccggggtcatcggtggctggcttgaacagctccagctcgatgagatggtagtctagaacaaacacaaacataaatcaaacaagaaaggtgccattttttcccctgtgatccaccatttgcttcaacaacttgctacatctaccaaccttcataccttgctggtaattactggtggatacattcttttggagttggttagtgtaggtgttgagatttctatcaccatttagggtccaccacaagtgagaaattaaggaatggaaacctagccaattttatggaatttccacatcccatgcttcatgtaaaggagtagtagggtgacttgtcgttgcttcaaacgcttctaaggcctgcaatggtattgtactacgcaggattgtgtcag

SEQ ID NO: 111615 - DNA, 2052 bp, Zea Mays
ctcgaaagcggctcgccgtgtgccgtccccggcggcccactccaaagccccccaatcttgtcgctttttgcgcgccgtcgcccatctatcgtgtccgccatcccaatcgcctccggcaaaaaccctccgtttccgccgcgtccccctcgctgtcccggctcaccggacaccggtcgagtgttggtgctcgctctcgcggctcccctctttcctgagcctggaagggccgatgcaggccgcgcccgggagcgtctcttgggccgcctcgcagccgtccgtcctcggccggtgcggcggcggtgcaccgtccgcttcactcaagtggagagctggcggcgtcggaggaggggaatgcagggtccggggccgggacgtcgtcgtgccgcgctcctgcgcgcgcgcgcaggagaagcgcctgccgcgggtgcggaaatccaaggaggagaggagggagatggtggagtccttcatcaaaagctaccgagtttcaaatgaaggaaaattcccatcaattaatctgacacataaggaagttggaggatcatattatatagttcgtgaaatcatgagggatatcatccaagagaatagagtccttggtcctggtggattggatgctatgacacttagttttgaagattgcgctgattcttcaaagtcatccatgaagcttgaactgggtcaagacagtatagagatcttagatatgtctggtagtgaagtcagtaagagtcatgtacctgaaatatccagcactgatgaatcgtttccattgcaaggtaatgccatcagcaatcatagactgctgggttcatctaatatcttagaggttggtgttctgaatagtgtggtccaaaatggaagtgtggcagatgcaatattcatggaaacaaaccttgcgaaacaagatgaagttccatctagagggtccattgagtttgacttgaatacttctgaagagcaagctcgcttatttgctcaggtctctgattcagatgaagaagtaacactaaacaatcaggcggatgcacaggacgggacgaccaatagtggcactgatagagttattcttcccttagaatctttcgctgtttatgaaaacaatgcttcacttctaagagatcatgagacattgcctgatgataatcatgatggatcaactgatagggttgcggatgacgcaagtctccttgcggcgaccaatggtgttcaagcaaagcaagcttctttacatgagcatgatgcatcaactagaagtgtattgattgacaatgctcagagcttagatggtcagtttagtactactgtgtctactgatcctataaatggttttaaattggagactgaaattgcaaccaagacagttgaaacatctcaagtacacaggctgcaagatgagtttgagcaaccattagttgatgctagctatgatgggcaagaaaactctgatagcccagtttctcatccagcattagatacaaaggggctgttgcacacagaagatcagctcaatgtggtacaggtagatgaaactgaattcaagaactcaacatctgggatcacaaaggaagaggtccatgcagccgatttcaggcatgaacaaggaattaacaccacaatggcgatcagcaggagaactttaaaagctcagcagaagaaagatgacaacctattctggcttgtccttagggcatttgttgttgctatatcgaaaatttgggcaaaatgaacagtgcagaaaggcaccttacgtggaactgaagatcgagtgtgatacctttcctactggaaaacgagaaaccggtccatgaagttccatttatcccatgcgaatatagatatgctctgcagtttaggttattttttggagacagttggtctactttgtagtcgcttcccactgtagatgtaacattcagtcatcttgttctggtgtcatctgtgaaatatctgctacaatggatgtcatgtgtcttttggtaaaaggaggaggatctctttcacagcgtgtttggtttgaggaatgatatagtctatcatcttttcactttt

SEQ ID NO: 111616 - DNA, 2811 bp, Zea Mays
caaccgcttcgattaaccttttcccgcgaagcacacattcaaagctagctccaaccttggaagtaaggtggatcgacatatcgatcggcagactaatggacgtctccgaccagtcagtgcggctgaccatcgaggcgcagccgagcgacccggcggttacccccgggttcatggcggcgacgccgttcgagccgcagctctcggactcgccaccgcgaccgagcgtggcggccgacgacggcaaagacgacgacaacaacgaggcgtcctgcagcgcgcgggggcgactggacgacggcgcagccgggcccgagcgccggctcacgctgctggcgctgcggctcgccgtgctggagaaggcggccagcggactgggcgcgctgggcttcatctgggccaccgtcgtgctcctcggcggcttcgccatcacgctggagcgggtcgacttctggtccgtcaccgccatcctcctcgtcgagggcgcgcgcatcttcagccgcagccacgagctggagtggcagcaccaggccacgtggtcgctctcgctcgtcgacgctggacggtccagcgtccgcctcgtcgcgcgctccttccgcttcgtcttccgcgcgggcggctgcgactgcgagagcggcaaggcgtccggcggagctgcggcgtcctgcagccacgccgggcggagcgggtggggatggaggtcggcctggacctggaccgcctggccctggagctggagctggagcttcctctcgggccacgtcggccggctgttctactggctgcagctggcgtccgcgacggcgtgcgtggtgctctccggggtgcgtctcgccaggcaggacttcggggacgccgtggacgcgcggacgaaccgccggtcggcgctcgacatcttctacggcctggcgctggccgaggcgctcctgttccacgccgagaaggcggcgtgggagtgggaggtcagccacggccgcctgctggagcgcgtcgccgacgagtgccgcctcgcgggcgcgccggggctcctcgccatacgccgcttcttctacgacgcctactcgcggtgcatcgaggggagcatcttcgacgggctccgcatggacctggtgtccttcgccgaggagctcatcgtcggcgggtcccacgacgagcagcgcatcggcgtgggcatcctcgtcaacgtggccgcgagcccgcggctcggggacggcgcgctgcgccgcgtcggcacgtcgcccgccgtcgtggagcgcctcgtggacatgctcagctggaagggcgccgccgagcgcggcgcgcgggcgtccgcggcgctcgtcgtgtccaagctcgccagcaagaagcgcaacgcccttcgcgtcgcgggcgtgcccggcgccatcgagtccgtgtcgtcgctgctgtacgccgctgacgaggaatgcaacctcctcggcctcctcatcatcaagaagctcgcgcgcgaccacgccaactgcagcaagatcggcaccgcccgcggtctgctcgacaagatcatcgacttctcctccatcggcgtaggtggcgcgtcgccggccaccggacccagcgccacgttcttcatggcccccgcgcgcgccaaagccgtgcagcggtcgctgcaggtgatcaagatgctcgccgagaccacggggagcaccggaaagcagctcaggcgggaggtcgcggagatcgtgttcacggtgagcaacatccgcgccgtgctccagcacgcgcccgctgcccaggtcgggctgcggcggctcggcgccgaggtgctgacgcgtctcgccatggacgctgtcgcgcgggagcggatcggcggcacgggtgggttggtcgcgctcctgctccacatgttcctccggcccggaggctccgaagaggacaccgacgccgctcgcgtcgaggccggcgaggcgctcgccatgctggccctcgagagcccgcgcaactgcgagcgcatcctcagagccggtggcagctcgagctcggccacatccaccgctaccgtagacagcctcgtcgacgcgcttggggacgccgccatcggcgtcggggcgggcaggatcctgatgaacctctgcgcgtacaccggaggcagcagcgagtggttcccgcagctccgccgcgccacgcgtgccgcggccacggtgctccgggaagtcgacacggtcaacgagtccaagccgcttgaggtgtcgctgggcttcgcggctcagctagtgaggctgatgggcccacacgagctggcacaccatctggtcaacgccggggtcagcgaagcggacctggtcagccgactggtcagcgtgctggctacgcacgcctgcccttcgaccaaggcgccgcggatccgaaggtttacggtcgacctcgtcatcgcgctgctgaggacgccgccggcgcgagagaggtggctgatcgccgaggcgatggccgcggcggggatgggcgcggagctgcggcgcgtggcggagacgacgtcggagctggagtgcttccacgtgttctccggcagcgcagggctgatcaggcacgccgtcgggctcgccgcgctcgtcgatacggcgctggagctcatgagtaccgtcgccgaagccgatcgagcacccgtgtgagcgaaagcgtgacaagtgcgtgcgtgtgagtgtgactttgtgttgctgttgcgtacaggcgagaggagaagtaacagggattcttcggtaaattcaaatgcataaacagtattatttcattcattggttttttttttttgcatgtagttacgtgactaatgactgggtgaatggatgagacgggttcctc

SEQ ID NO: 111617 - DNA, 1963 bp, Zea Mays
taatcgaaatctagctaattatttataaggaatctctatctctctattgttctgttgttgaaaaggcgtacataaaaactttttctttgtacccaacttccgatccgatggtgcgactgcgagtgcgaggaggcgattggtaatggcacacacttttttttataaagatacgggtagccaatttgacttggcctgccagttccgcgcagccccctccaaatccatcgataaaacacacaataaatcaataataaccagagagtcagtttgcgtggattgccatcgccccttcctccacctctgcgctccaccacctaataattgattccactgccaatacctgcgatgagtgccgccatgccgccggcgatggaccccgcggcggcgggggagatggcgcgggaggccgccgcgtggtgctcgctgcacggcctcgtcgtcggggaccgcgccgaccagagatcagcaacggtccctggtgttggtttggtccatgctccattctccttgctcccagcacattttccagagtccttttggaggcaggcgtgcgagctcgctcccgtttttaacgagcttgtggaccgtgttagcatggacgggaatttcttgcagaatgctttgtccaaaacaaggcaggttgatgatttcacatctaggctcttggaaattcacaggaaaatgatggaaataaataaggaagagaatattcgcttggggttgcaccgatcagattatatgctggattcagaaacaagttctcttcttcaaatagagctcaacaccatttcagcatcatttcctgggcttggttccttagttagtgatcttcacaggtccttaattaaacaatatgggacttctttaagtctagaacacaagagggttcctgcaaatgcggctagcactcaattttctgaagcattggcccaagcatggtctgagtttaatattgacagtgctgtaattatgatgattgttcagccagaagagagaaatatgtatgatcaatactggctttccaaacatttgcaagactcacatggcataacaactataaggaaaaccttatcgcaggtggaagcggaaggccaggttctcccagatggaactcttcttgtaggtggccagaaagttgctgtagtgtattttagagctggctatgcaccaaatgattacccttcagaagcagaatggagtgcaagacttatgatggaacaatcatctgctgtgaagtgcccttcaatatcatatcatttagtgggaaccaaaaagatacaacaagaactagcaaagcctaatgtgcttgaaaggttccttaaaagtgaggaaattgacaaggttcgcaaatgttttgctggcttatggagtttggatgacgaatatattataaaaactgcagtggaaaaacctgagttgtttgtattgaagcctcaacgtgaaggcggagggaacaacatctacggtcttgatttgagggaaacgcttgtcagactacagaaggaaggaggggatgcgcttgcagcctacatactgatgcaaagaatcttcccaaaagcttctcctgcttatctcgttcgtggtggtgtttgccacgagggtcttgcaatttctgagcttggaatatatggagcttatctgcgtaacaaagataaagtggtgatcaatgagcaatgtggttacttgatgcgaacgaaggtttcttcatcagacgaaggtggcgtagctgcagggtttgctgttttggatagcttatacctgactggcaaggtgatgtttcagtcgatcgacctttttacccatcatttttgtttggacagataaacagtttctgaacgatatatcttgttttaagtgttgtagactgattttaagcagtctcaaaatctgttgttcactcttgttagtgctgttagaaaaccctggatgaaatgtatgtatttcatgtaaccaatgagatttt

SEQ ID NO: 111618 - DNA, 2230 bp, Zea Mays
taatcgaaatctagctaattatttataaggaatctctatctctctattgttctgttgttgaaaaggcgtacataaaaactttttctttgtacccaacttccgatccgatggtgcgactgcgagtgcgaggaggcgattggtaatggcacacacttttttttataaagatacgggtagccaatttgacttggcctgccagttccgcgcagccccctccaaatccatcgataaaacacacaataaatcaataataaccagagagtcagtttgcgtggattgccatcgccccttcctccacctctgcgctccaccacctaataattgattccactgccaatacctgcgatgagtgccgccatgccgccggcgatggaccccgcggcggcgggggagatggcgcgggaggccgccgcgtggtgctcgctgcacggcctcgtcgtcggggaccgcgccgaccagagatcagcaacggtccctggtgttggtttggtccatgctccattctccttgctcccagcacattttccagagtccttttggaggcaggcgtgcgagctcgctcccgtttttaacgagcttgtggaccgtgttagcatggacgggaatttcttgcagaatgctttgtccaaaacaaggcaggttgatgatttcacatctaggctcttggaaattcacaggaaaatgatggaaataaataaggaagagaatattcgcttggggttgcaccgatcagattatatgctggattcagaaacaagttctcttcttcaaatagagctcaacaccatttcagcatcatttcctgggcttggttccttagttagtgatcttcacaggtccttaattaaacaatatgggacttctttaagtctagaacacaagagggttcctgcaaatgcggctagcactcaattttctgaagcattggcccaagcatggtctgagtttaatattgacagtgctgtaattatgatgattgttcagccagaagagagaaatatgtatgatcaatactggctttccaaacatttgcaagactcacatggcataacaactataaggaaaaccttatcgcaggtggaagcggaaggccaggttctcccagatggaactcttcttgtaggtggccagaaagttgctgtagtgtattttagagctggctatgcaccaaatgattacccttcagaagcagaatggagtgcaagacttatgatggaacaatcatctgctgtgaagtgcccttcaatatcatatcatttagtgggaaccaaaaagatacaacaagaactagcaaagcctaatgtgcttgaaaggttccttaaaagtgaggaaattgacaaggttcgcaaatgttttgctggcttatggagtttggatgacgaatatattataaaaactgcagtggaaaaacctgagttgtttgtattgaagcctcaacgtgaaggcggagggaacaacatctacggtcttgatttgagggaaacgcttgtcagactacagaaggaaggaggggatgcgcttgcagcctacatactgatgcaaagaatcttcccaaaagcttctcctgcttatctcgttcgtggtggtgtttgccacgagggtcttgcaatttctgagcttggaatatatggagcttatctgcgtaacaaagataaagtggtgatcaatgagcaatgtggttacttgatgcgaacgaaggtttcttcatcagacgaaggtggcgtagctgcagggtttgctgttttggatagcttatacctgactggcaagtgagataacaaaaggagcggcggctacagctttcggttgggggcatacaccgtcaatggatcatcatgtcctccatttagatcgacacagaataagctgctgcaaactagagccattatgtgacaccatgtcacgttgtttgatgaattccttctatctgcccctgccaagggagagaagagaatagacatattattgtgtgtagattaaatgtgcatgaaatccatggaaatggtgaaggatgaaccacgtgcccataaccgtgatgtaggctggcggtgccgtttcttgttcttgatcaccttgacagcaacggggaattctgtgtttcttttgaggacacgtgatgtgcaccatcagtatgaatgtaaccaaagaataagggcctatttagtttatgactaactatgtcatattttgtctaaagttagttgttcgaattgaaaaactaattttagtc

SEQ ID NO: 111619 - DNA, 1097 bp, Zea Mays
ttcttgttgccttgtttatgtcctagcaagattttcgttgataagagaggagagccataaacaggtcgtccggcctggcaagccgaggtttgtcctgcgtggtgcggcttgtctctgggccggctgctcccacaagctatctgagccgctgctccatttgatcggacagtcgacaccgtccgagcggcgatcaaaaccaccttcgacgactacgccgaaaccctagcctctatctcattccactccgacattcacgtgcagctgtcgggagcaggcaatggcgccggatctaagcgaactcgccgccgccgctccagcccgtggcgcctacctcgccggcgtcggtgtcgcggtcctcctcgctgcctccttcctcccagtagccgagtcgtcctgcgtgcgagataactcattggtgagagacataagccaaatgccgcaaagcagctatgggattgaaggattgtcacatataacagttgctggtgcgctcaatcatgggatgaaggaggtggaagtgtggcttcagacaataagtccaggtcaaaggacgccaatccacaggcattcctgtgaagaagttttcactgtcctcaaagggaagggtacgctcttgatgggatcaagctcactaaagtacccagggcagccacaggaaattcctttctttcagaataccacattttcaatccctgtaaatgatccacaccaggtttggaattctgacgagcacgaagatttgcaagttcttgtgatcatatcgagaccgcctgctaagatatttttatatgatgattggagcatgcctcatacagccgcggtactgaaattccccttcgtctgggatgaggactgcttcgaagcagcaaaagacgaactctaggtcacaagtgtttcctgcaatttatctgcttcatccatgatcctgctggtgctggactactacaattctcagcactagttgtaataaagccagtgcgcttttcatgtataattctgtattgtggctcgcgaaaataaaatttggcaacggtttatgaacttatgcgcttgtggagttgatccaatgttcaccgtttcaagatttttgcattatt

SEQ ID NO: 111620 - DNA, 708 bp, Zea Mays
cgaaaccctagcctctatctcattccactccgacattcacgtgcagctgtcgggagcaggcaatggcgccggatctaagcgaactcgccgccgccgctccagcccgtggcgcctacctcgccggcgtcggtgtcgcggtcctcctcgctgcctccttcctcccagtagccgagtcgtcctgcgtgcgagataactcattggtgagagacataagccaaatgccgcaaagcagctatgggattgaaggattgtcacatataacagttgctggtgcgctcaatcatgggatgaaggaggtggaagtgtggcttcagacaataagtccaggtcaaaggacgccaatccacaggcattcctgtgaagaagttttcactgtcctcaaagggaagggtacgctcttgatgggatcaagctcactaaagtacccagggcagccacaggaaattcctttctttcagaataccacattttcaatccctgtaaatgatccacaccaggtttggaattctgacgagcacgaagatttgcaagttcttgtgatcatatcgagaccgcctgctaagatgtgagcatgcctaactttaacatcgtgtttcattttttttctcaaacatgtaatagagctgcacatcattatattaagcagaggaaaaagagatgagtcttaacaactcatacaacccttaaggccatgttcggttctacccc

SEQ ID NO: 111621 - DNA, 793 bp, Zea Mays
ccgcgtgctatcaacccccctgtgatcggcgatcccatcccttccaaagcaagcgcccactcaccttgccttgccggacaagcgtgccgcccgcgtcaaagatgcagtcgctgagcccttttctcccactcccctcccttcctctcttcgcctgactcgcacgcgcccccgatgtctgactcccccgcgtgggcacgagccccgccatacgcgcgctgccaaggggggcaaggcgcggcagctgctccacctcgacgcttgggcactcgtcgacgtcatccaggccaacgtgaccccatcgacggcctcaccctaggacccgctcctttcccctagaagcatccgaaggcatggcacccgtagccgccgacgtcgttcgcctcctactcacatggcgaggtgaacgggcactggactgtaagaaatggatgagcagtgacgtgaggagggcccctgcggccgagctatggaggctgatagacggcccgacacaaaggcgatggtcgtggaggctgcggcgacgcacaaggccatcactgggttgtggcggggcaggagagatgagtgggggagactgtgagagtgatgagtgtattctgtaattgagacggactccacccagatttgggtctagagtttgtttcgctataggtatgaaattgctgatcataggttgtttcgctacaggtattctgtaacaagtcatttcttggatgctcatcattatttgtatctctggttaacttcaatatgtacttgaaattgtggtcttacagaactaagtggaaatgga

SEQ ID NO: 111622 - DNA, 1746 bp, Zea Mays
cagaataggagtgagggaaagcccgttgctttcgcttcggttttctcccagaactccaccgagagaggggaaggactccacaaggagaggggccgaggggggagtaaactcgggtccgtgtgacggcagagagtttccgacgaggagagagaagcagctgggaagggcactcacggagcttacagagaaaaaaggggtcgaggttcatgcccgtttggttcctcggttgctgcgtgaggcggccggaggagtcgtgaaccgggaatgacgggggtggtggtggtttccagcgcggggtgcaagggtggcggcggggcgaagagggccgccggcggcagaggtggcggggaggaggagcggcggcggcgggcggcggttctggagctgctgctcgcggccgtgcggcgctccgtggtggcgtgccgggtggagcgcggggccgccggagccgggtggccggcgagagaggaggacgcggcggtggcgctcgaggagatggagatcggttggcccaccgacgtccgccacgtcgcccacgtcaccttcgaccgcttccacggcttcctcggcctccccgtcgagttcgaggatgagatgccctgccgcgtgcccagcgccagcgccagcgtttttggtgtctcggctgaattgatgcaatgcacatacgatggcaagggaaattcagtccccacgatattgctgctcttgcaggagaggctgtatgcccacggggggctgaagtctgaggggatctttcgcattaatccagagaatgaccaagaggagcacgtgagggaccagctgaacaaaggaattgtacctgatgacattgatgttcactgcttggctagcctgattaaggcatggttcagggaacttccagaaggtgtcctggatggcctgtcccctcagcaagtgcttcaatgcaattctgaaggggagttccttgagcttgtgacactgttgcgccccactcaggcggcactcctcaattgggctgtcgagctgatgtctgatgttgtcgaagaggaggagctcaacaagatgaatgctaggaacgtagccatggtgtttgcccccaacatgacacagatgtcagatccactgacagcactcatgcatgccgtccaagtcatgaactttctcaagacactgatcttgaggacgcttcgggagcgcgatgatgcagccaccaccggagagtacacaccatactcatctccagcatcatccagtaagcatgatgacgccgaatgctgctatggcagtgagcaggacatggacaggagctgtgagatgagtgacatgcatagccagatcagcaagtctgggcgacatgcagactatctcgtacgctacaatacctgttttgacagcgaacaagaggtcgacgatcatctgagtgaggttgaagaaggtttcttgcgtcggttggagcgtgatcttggagcagacagaccagaggtttcttgcagaaaaatctcagagatcatggccctggaggatgctgagccgaaagctgaaactagagcagtggagaagggcatacagaatgagaatgaagaggttgctgaacagctataatgatggaagttctgtgtttttaggcagtaaagcttattattgtaagtactgaacactgaccaatggtctttatccaacacctcggttgaatgtattgctccagtgtatgatgtaaacttggctgatccttttaatgcttggtgcccctttgttacctgggat

SEQ ID NO: 111623 - DNA, 1640 bp, Zea Mays
gaaaatttcgcttacggggcaagagtcatactgaaaaaaattgattttctgaaggatgagtttatgattttgagtgctcccagtttggactttggagcatgttcttatctgaggatgctgttccgccagagttctgataactagagcaaaacttcagttcctgcagatgtatgcctggattttcaaagtgcaaacatgagttcaactgatgcatttaattcctattccttatgcactgtattaagcagatcttttgtgcaattacagcaacattggcactaatccggtggaactcttattcctgagtcacacattgtaacaagtctgaatttgtgttggaccgtatgaattgtcccccaagctttgccagttgaactcatcaatccatgacttgtgaattcatcaagctcattctcttttattttctctagcgccagcgtttttggtgtctcggctgaattgatgcaatgcacatacgatggcaagggaaattcagtccccacgatattgctgctcttgcaggagaggctgtatgcccacggggggctgaagtctgaggggatctttcgcattaatccagagaatgaccaagaggagcacgtgagggaccagctgaacaaaggaattgtacctgatgacattgatgttcactgcttggctagcctgattaaggcatggttcagggaacttccagaaggtgtcctggatggcctgtcccctcagcaagtgcttcaatgcaattctgaaggggagttccttgagcttgtgacactgttgcgccccactcaggcggcactcctcaattgggctgtcgagctgatgtctgatgttgtcgaagaggaggagctcaacaagatgaatgctaggaacgtagccatggtgtttgcccccaacatgacacagatgtcagatccactgacagcactcatgcatgccgtccaagtcatgaactttctcaagacactgatcttgaggacgcttcgggagcgcgatgatgcagccaccaccggagagtacacaccatactcatctccagcatcatccagtaagcatgatgacgccgaatgctgctatggcagtgagcaggacatggacaggagctgtgagatgagtgacatgcatagccagatcagcaagtctgggcgacatgcagactatctcgtacgctacaatacctgttttgacagcgaacaagaggtcgacgatcatctgagtgaggttgaagaaggtttcttgcgtcggttggagcgtgatcttggagcagacagaccagaggtttcttgcagaaaaatctcagagatcatggccctggaggatgctgagccgaaagctgaaactagagcagtggagaagggcatacagaatgagaatgaagaggttgctgaacagctataatgatggaagttctgtgtttttaggcagtaaagcttattattgtaagtactgaacactgaccaatggtctttatccaacacctcggttgaatgtattgctccagtgtatgatgtaaacttggctgatccttttaatgcttggtgcccctttgttacctgggattgtatccatggaaatggtcaggctcactgggaacatgagcccttgatcatcaaatttcctgtgatcgagttgatatattttct

SEQ ID NO: 111624 - DNA, 1519 bp, Zea Mays
ccaagcaaaggtacacccatcactctcagtcagcccgcacacacgaccgaaaaaaaatattaacttctagaaagtcttcgtcgcagtccagccaataaaccccctcccacgcgcctcaaccgttcttcgccgccctgccgaggacccttccttcctcgtccgcccacgaatttccggccagaccatcctacaccgcccgtccgggacacgcgcccgcctctgccaagaatttcgccttctccggcgccgatcccgcccattcttgtgccgccggcaggccaaggatgcggaaccttctcacggattcgtttgagctcggcaaacgggggcagtcctcaggaaatgtcgacatcgagcttggattgcagggtgacctgactagttctgcgcagccaggttttgagggattctatgaacaggtcaaagaggttgaaagcttgctcaacacattgacaaagttactgaaggaccttcagaactcaaatgaggagtcaaaagttgtcacgaaggcatctgcgatgaaagaggtaaaaaaacgcatggagaaggatgtcaatgaagtgacaaagattgcacggctggcaaaatcaaaagtagagcaactgaacaaagataatgctgtgaacagaggaaaaccaggatttggcaagggatcgggtgtggaccgatcccggacaacaaccactgtcgcattgacaaagaagttgagagaacgtatactggagtttcagacattacgagaagaaatccagcaggaatatcgtgacgtagtggagcgtcgtgttttcactgtgacgggggagcgtgctgatgaagagacaatcgacaagctgatagaaacaggcgacggcgagcaaatctttcagagagcgattcaagagcaagggcgaggaagggtactggacacgctgcaggagatccaggagcgccatgatactgtgaaagagattgagaggaagcttcttgatctgcagcagatcttcctggacttggctgtgttggttgaagctcaaggtgagatgctggacaacattgagacgcaggtcacaggtgcagctgaacatattcagaccggaacaaaccttctccagaaagcgaagaagctgcagaagaacacacgaaaatggacctgcataggcataatcatcctcctcataatcattctcatcattatcctctccttgaaaccatggtcctggggtaaataagcagcaaacaagaagcgtcgttcccatgttggttttggttgatgatattacctatagtattcttgttatagctgtgcatatgtcagaaggtgctgtacatcgtattgcaatctttgttttttttttccttttggaagagaaactttgggtgtgaactttcagattttgcttgattcgaatttgctgtattggttgtgcaactaaaggcctacacatactggtttcttgggaaattggtaactctgtctacgtagacagtaagctactgctgatgcaatccttgatttgttttacgtgatcgtatacttccg

SEQ ID NO: 111625 - DNA, 1872 bp, Zea Mays
atggatcctaaggggaagggaatcgtgatcaacgataaggagaaggagtccttcgtcaacgagtcaaaggatgacaagcctaccgactcgggctcgggccacaaacgaaagtatgggaagaagaagaagacaaggcgcatcaaggagatcgtctactacgacgacagcgacgagtccacttcttcccaaaaggacaacgacgacaacgactacgagagaaggaaactggttaattcgaacttttcttttgactactctcgtattccgcaaagtacaaatgctcatttgctctccattccacttggcaaacctcctcactttgatggagaggactacggattttggagccacaaaatgcgtagtcacctgttctctctccatctgagcatatgggagattgtggaaagtggaatgaaatttgatagctcggatagtcctatgtttatcaatgaacagattcatagaaatacacaagctactattgtgttgttagcctctttgtgcagggacgagtatcataaggtgagcggcttggacaatgccaagcagatctgggacaccctcaggatatcacatgaggggaacgacgtcaccttactcaccaaaatggagttggtggagggcgagcttggaagattcacaatgattaggggagaggagccaacccaaacatacaaccggctcaagaccctcatcaacaagataaggagctacggaagcacacgatggacggaccacgacgtcgttcgtctaatgctaaggtcctttactgtacttgatccacatttggtgaacaatattcgtgaaaatcctaggtacaccaagatgtcgcccgaagaagttcttgggaaatttgtaagcgggcgaatgatgatcaaggaggcgagatatgtcgacgacgcgttaaatggtccaatccatgagcctcaacccattgctctcaaagcaacgagaagcaagaaggcgctacctagcaaggtggcgcaagttgaggcggccgggctcaatgatgaagagatggccctcatcatcaagcgcttcaagacggcgctaaagggtcgcaaggggcagccaagcaagaccaagacaaaggggaagcgctcatgcttcaaatgtggtaaggttggtcattttatcactaattgccccgataatgatagtgaccaggaacaggggaacaagagggagaagaagaaggcatacaagaaggttaagggcaaggcacaccttggcaaggaatgggactcggattgttcgtcatccgacttcgataatgaaggactcgccgccaccgccttcaacaaatcatccctcttccccaacgagcgtcacacatgcctcatggcaaaggagaagaaggtatgtaatcaaaacaatgccacttatgattcttctagtgatgatgagtctagtgatgaagaaatagattactctagtttgttcaagggattggatagaactaaagtagataagattaatgaattgattgatgccttgaatgaaaaggatagactcttagaaaaacaagaggaccttttatatgaagagcatgacaaatttgtagaggcacaaaaatcttatgctttagaagttaaaagaaatgaaatgctttcttgtgaactatcttcttgccatgagacaatttctagcttaaggagcatgaatgatggtttgaatgctaagttagaaatagctagtaaatctaactcttgtgtagaacatgttatgatttgcaagaggtgtaaaggttttgacattgatgcttgtagtgaacacctagcttcaatttccaaattgaatgatgaattggctagtcttaatgcccaacttaagactagcaagaatgaatttgacaagctaaaatttgcaagg

SEQ ID NO: 111626 - DNA, 1312 bp, Zea Mays
tggagatgctctaagagaagaaccttattttctaagaatttttatttttccaagtaaaattaacttaatttttgtcagaaaaataaaaatcccttaaaaataggactaaactaaccctaagtatacgaaacccaaagtttacggtcctaaaaatcaattatctcacccacgagcgatcgctttctacctcgctatgcccacgagctcgctttctactagctctcgacgcgtcgccgccgaccacagcacggctggcgtgtggatccctcccgctctcctcgccggatctccacccgcctcgctctctctgagtccagtggggcagagatccgtgagcgcgaggactggtcccttcttgggttgggtctcttctccagctcgcgagttcgccactggttgacactgattgtagcacttcgtggtgcctgattggatcgcgggtgcggtttgccctccacaaatttgggtttggttccactgaacccccatgacccaagcgaagtccgctcctggaaggaaggagatgggccgtgggcggtcgccggaaccgctcgatttcttcatatggactgtcgaggatgttggattatggctggaagaaattaaccttggtggctacagacaagtatttgaagaaaatggtgtcaacggagaatatctagaaagcttgtccatgtttactactgagcagattctgcgttttattaggcggtgccatatgaaatggggagactttatcacactgtgcaaagagttgaggcgcattaaagtcgcctgcctcaaaggggagcaagaagtccgcaggccatggtgggcgccggcatgcctctccatagtgttcgtgagggcagccaagcagaacaggaagtcccgtgtcgtctccttgaagctggaaccataatgcttgtcaagcacttggaatcgtcgccgcctgtgctccaatcctccagctctataggaggcagcctgcgcacaccatcgtgcgctagtccagagtggcatggaagctgtctgttttcgctcttggtgcatcatgcacaactggtctctctctctctctctctctctctctctctctctctctctctctctctctcttatcccttgctacttgttcttcatatataggtttggaacagtagtatgttgtagacaaagaaagaaacatataatgtgcagatggtctctggtctgctcttttcttgcaaatcttcctgagtagttatggtggtgcatgcgatttgctaaaagaataaaagattgtctaccacttagttgtccagtgcacctacttcacgaattctggacttat

SEQ ID NO: 111627 - DNA, 1098 bp, Zea Mays
tggagatgctctaagagaagaaccttattttctaagaatttttatttttccaagtaaaattaacttaatttttgtcagaaaaataaaaatcccttaaaaataggactaaactaaccctaagtatacgaaacccaaagtttacggtcctaaaaatcaattatctcacccacgagcgatcgctttctacctcgctatgcccacgagctcgctttctactagctctcgacgcgtcgccgccgaccacagcacggctggcgtgtggatccctcccgctctcctcgccggatctccacccgcctcgctctctctgagtccagtggggcagagatccgtgagcgcgaggactggtcccttcttgggttggatgttggattatggctggaagaaattaaccttggtggctacagacaagtatttgaagaaaatggtgtcaacggagaatatctagaaagcttgtccatgtttactactgagcagattctgcgttttattaggcggtgccatatgaaatggggagactttatcacactgtgcaaagagttgaggcgcattaaagtcgcctgcctcaaaggggagcaagaagtccgcaggccatggtgggcgccggcatgcctctccatagtgttcgtgagggcagccaagcagaacaggaagtcccgtgtcgtctccttgaagctggaaccataatgcttgtcaagcacttggaatcgtcgccgcctgtgctccaatcctccagctctataggaggcagcctgcgcacaccatcgtgcgctagtccagagtggcatggaagctgtctgttttcgctcttggtgcatcatgcacaactggtctctctctctctctctctctctctctctctctctctctctctctctctctcttatcccttgctacttgttcttcatatataggtttggaacagtagtatgttgtagacaaagaaagaaacatataatgtgcagatggtctctggtctgctcttttcttgcaaatcttcctgagtagttatggtggtgcatgcgatttgctaaaagaataaaagattgtctaccacttagttgtccagtgcacctacttcacgaattctggacttat

SEQ ID NO: 111628 - DNA, 1106 bp, Zea Mays
aaaaccctaccacgtctcaaaaccctcgcgaatcgtcatttccgctctctgccacgccggagcccccactgcccaccacccgttcccgcggcctcgccctttgcgtggttgaagaagcgaaagatgctcggggcctctaggcgatccctcagtgccgccgccgccgcccgcagccgcgtggctgccggcgctgcctccgccgtctccgccgacgccgccgcctcaatcccgccccgacccgcgagcaatggagcgccaggggttcatcagcagcagaagaggctgctctcagtgcttgtagcgcccaaggttgcaggaaccagcaatgttgtgtccctcaagctgatgggtggtgcccttactgggagacgctatgaatcgagtgcggcagcagttgactccacggacccgccagctgagaagcatgagtaccaggctgaggtcaacaggctcatggatttgatcgtacacagcttgtatagtaacaaggaagttttccttcgagaactggtcagcaatgctagtgatgctcttgataagttgcgttacctgagtgttacggatcctgagcttctgaaggatggtccccaacttgatattcgcatccaaactgacaaggataatggaataataacaattactgattctgggattggtatgacgaaacaagagcttattgattctcttgggactattgcaagcagtggaactgccaagttcctgaaggcattgaaggagagtcaagaagcgggcatggacaacaacttgattggccaatttggtgttggtttctattccgcatttcttgtttcagagaaggttgttgtatcgacaaagagcccaaaatctgacaaacaatatgtttgggaaggacaagcagattctggttcttataccattagagaggaaaaagacccggagcagctcattcctaggggaactcgccttactctctatctcaagtgtgatgataagggttttgctcaccctgagaggattcaaaaacttctaaagacttactctcagtttgtttcctttcccatttacacatgggaagagaaaggcttcacaaaagaggtcgaggttgatgaagatccagcggaagc

SEQ ID NO: 111629 - DNA, 1816 bp, Zea Mays
aaacctaatcctttgataccatgtagaagagtgaactgttggattgataggagatggggtacatatatatagggactcaaccctaaccctaatgggccctaaccctaatgggccggcagcccaacagtggtgccggcccacacactactcacacatagtctaacatgtatgatcccaattcccaaagaacatcttcacacgcaagtgataatacttgatctaatttgacacagggtgaggtagaatttaggtcaattctttttgttcctgctacaaggaaggaagatgtaactgctgatagtaggaagaccaagaatatcagactatatgttaagcgtgtattcatatcagatgactttgatggagaattgttcccaagatatttgagctttgtgaagggtgttgttgactcaaatgaccttccattgaatgtttctcgtgagattcttcaagaaagtcgaattgttcgtataatgagaaaaaggctggtgcggaaagcctttgatatgatacttggcatttcttgcagtgaaaatagagatgattatgaaaggttctgggagaactttggaaaatttttaaagctgggtgccatggaagataaggaaaatcacaagagaattgctcctttgttgcgcttcttctcttctcaaagcaacaatgaattaattagcttggatgaatatgtggaaaacatgaaacctgagcagaaggacatttacttcattgctgcagatagtatgagcagtgccataaatgctcctttcttagagagactaacagaaaaagactatgaggttctacttttggtcgaccctatggatgaattggctatccagaatctgagctcctacaaggataagaaatttgtggacattagcaaggaagatttggatttaggtgataacaatgaggaaagagagaaggagataaagcaggagttcagccaagcctgtgactggataaagaatcgcttgggtgacaaggttgcacgtgttgacatatctaatcgtctcaggtcatcgccatgtgttcttgttgcagcgaagtttggttggtcagccaatatggaaaggctgatgagagcacagtctatgggtgatacagcctctttggatttcatgcgttcgaggaaagtttttgaaataaacccagagcatgagataatcaaggccttgaatgtggcatgcaggaataaccctgatgatcctgaagccctaaaggctctggatgttctctttgaaactgctatgatttcaagtggcttttcgcctgacaacccggcggagctcagtgggaagatttacgagatgatgacctctgccatcgctggcaaatggtcctcacagccacaggcgcaggcgcaacctgccgacccaatcccacagcacgacgcacctgtgaggtcagacgagccgcttgaagctcaagtggtggaggcagagcccgttgaggctggtcagcagaagtgagggcctgttcgtgcagaatctttgtacggagtagttttgaaccgttgtgcacaacatggctgagaatttcgagtatttgttttgacggcctgtatctgtgtcatgagctgttactggtaatgtaagacgtattggttagaaattaggagattaggaataatcgggtagctggactacttgaactggttcctgaaccatcaggagggttatggactcatggttagcttctactgcgtccttgggggcagtagtaattttgaagccaattcgttgttttgtaggctctatttctgtttggctttaatacatattggtttctactgtttctacagcgttttgtctct

SEQ ID NO: 111630 - DNA, 195 bp, Zea Mays
gtgggccaaatataccagaaatttgagtgcaaagatcgatcagatggtggaactgtgaggaatgttgtaaggtggagcatcgagaacttgctggagatgtctgtctaccgagagggcacattgactatgcggccagctgtgctgcaccagtctgttctaagtccaaatgcaattttggataatgagccagcgtag

SEQ ID NO: 111631 - DNA, 923 bp, Zea Mays
gctggagacaaccttaacgcactgctaaaagagctcgacgactacgttgtatgctgatcgattcgtctccgatctcctccttcgaccgccgccaccttcgtctccgagactccgacgatgtcctccgccgccgatgaggatgcgttgtcgtctgacaaggggaagaagagggaggaggacggcactgacgggaggagccaacgtcaggagggtgtcgaggtggccgacgggaaagtggatctaggagacctgtacggcgcggcggcggggtgggtagaggcgcggaccagctgcccgcacatcggcaccatgccacccgctggtgctgacgacctcgcgcgcgtgccttcgcccgactctccgtgctccagatgtaatcaccctgctgaaaactggttatgcttcatatgcaaagatgtgctttgcagccgttttatcaacaaacatatgttgtgccatcatcaagaaactggtcactgtcttgctttgagcttcagtgatctgtcagtttggtgtttctcatgtgattcatacctagatgttcaagccattttagaattgcgcccagtgtatgaagttgcacatttgttgaagtttggacaacgtccaccatttcgatcacttgatgtacaggattctggcactggtgaaagtggaagtgtgtcaagggcttagttatatgtattccagtaatgagtttcttttcatgatacttcaatcagattcagacagacagttgtctactatcctggcatttcttaagctgcagtgcaatataattcatttgagaagccttgtttttttgctctttacttttggttagtatattttgatagctcaaagcatccttacatagtcatcgttgcgtagtttgctgtgtcgagcatgaagcagacgacaggtgtaaagcctgtgtaccatag

SEQ ID NO: 111632 - DNA, 2350 bp, Zea Mays
gctggagacaaccttaacgcactgctaaaagagctcgacgactacgttgtatgctgatcgattcgtctccgatctcctccttcgaccgccgccaccttcgtctccgagactccgacgatgtcctccgccgccgatgaggatgcgttgtcgtctgacaaggggaagaagagggaggaggacggcactgacgggaggagccaacgtcaggagggtgtcgaggtggccgacgggaaagtggatctaggagacctgtacggcgcggcggcggggtgggtagaggcgcggaccagctgcccgcacatcggcaccatgccacccgctggtgctgacgacctcgcgcgcgtgccttcgcccgactctccgtgctccagatgtaatcaccctgctgaaaactggttatgcttcatatgcaaagatgtgctttgcagccgttttatcaacaaacatatgttgtgccatcatcaagaaactggtcactgtcttgctttgagcttcaggttgagtgggacatcacacaggaaaccacatattgtctttcgagaacggaggaggtagtacaatgttttgggcaaagtccatttccatttcagaatttaataatcgtattaaaaatcctgaactggcacctaaagagttccaaatttgcttagttttcaagtatgtcataaaataaatttggaggcttctatgttctctttttttttcctacagattgttaagtctttgttttcataccctaccattcaagttcacacttcatctgatcgtggtagtggttgaacgacagtgtcacccttcaaatgacatgtgtcgcataaaggcaccagggccacttaatactttaactagtgagatgtgtttctataacgtactacatgatagcaccagatgaagcatctgttgcacaagtggttgctgagatgctgcatagtacttgatcagctaggacaagcgtgcattcggtagacggtgttgagcagatttgttgtcactgttgagaacaagaaaggggttgcttaagccacttgccaaaggaccccaattgtttggtcagatgtccatgtcagatgcacagcaggttgtgcactaaggactcccattaactggtgaatgtcaacatcaacggaatcagatcctctgactttcacttgaacaggtacggcatgcctttcatgtatcattattattattattatggatgaatatatctgatgagaaattgggacggtcaataaagcttatgctctggtgacttttgaattccatttgtttatttgaactccggttgctattttgttgcttgtgacgatgaaacgcgtcataatatttgccaaaaagaagggaacatgttcaggtgtgatttttaggccgaggaaaaggttttcatgctatcttgatttgctttggcggactagatctagtgcaacctgactgcaccagtttagactgagacgttgtcagatgtttcaactgcaaccatacgtctgtgcaggtttagctaacgctttggggaccatttgtgccatacgtagcttgccaaatgccatgatggaagtgggctctactggaccaatttttgtacgtgtctcatgtctaatatagatctgtctgtaatcaatgctaatgtatttgtaatatagatctagtgtttgtggttgatactccaaacatggtgaaagtagtggaaggctttccttgcaaaatatagagtaactagagacattagatctgatatggacggtaatgatttaatatgtacaccatccatcacaaaatggttgccgtacctgctgtctaccttagcagaaaaggtagtagataagagatgagtcatgaaccatgatagctacagcgtgtggtctcccgacccttcttttgatcactgcacaaatgtattggaggcacccagaaataataattccggatcgacaacgcagacagtgagcaacaggagagtaggctagtgatattattgcttctggaaccctagcctctttttgcagcaaactgattcattcactcttttttgaccgaactttctacgagagacatgcttgcacaattcctcttccctgccggccaatctttctttcttttctgcaacatgagcagttcattccactacctctggccggtagctttcgtgtatgatgacttcaaatagtttatccttagaaatttcagtctcctgcttgtgatccaagagtctctcaaatagtttatcgcgttagaaatagtttggaatgaatctcttttggcgttttctcagacatgccatttttctaatctcgattttacaatttctcaaggacatctggaagatttgttttttttcttgaatttttaaata

SEQ ID NO: 111633 - DNA, 443 bp, Zea Mays
tgttattagttgaaggcacacttgcacacccttacttgcatcacttcattacataactgatgagccagtttgctcgatgcccttcaggacaagtctgttaatccctggacaaaaaaatcaagaatgatgatggtattgagctgatgatacctgcacaaaatcctgatttggttccaaacatcgtttatccatggatcaaaagtaaagaagttgacattagagttagtatgtttcacatatttatctttatcccatcctttaaaataaaatctaacgtttttcccaatagatgtcactgctcaaagtcgccaactccaattcttagaaattgattgaacattaaaaaaaatatacaacagtggctatccatcggcacaccactgaacaaaacaacatgtaaactgcaaacggtacactaatgcacaatataaggaaacattggg

SEQ ID NO: 111634 - DNA, 999 bp, Zea Mays
accagatttgatgcacacggcatgcaaatcctgcaggctgttgcttctcagcagggccaaaagctgtgcctttggcctagcagtagctaccactagtaccaggagatcttcccgtcccaacatcttcgacagaggaatcagctgtgggagctcgtgaggcagagggcgggcagagacaagatggagaaggaacacatcaagatggccatgctgaggcaagagcaaacattcaggcagcaggttcacgagctgcaccgcgtgtaccaggttcagaagcagctgatgacgcagacgcagattacccagcaccaccagcaacggtgtggtagctcaggcaagacggaggaggaggaggacttcaacctggagctgacgctggcaacaggggctggaaggacgcggcaggagaagccatccacttcagactccgaagcgaccatgtcgtcgtcgacatctgcagaatcagagcaagctcagaggttcatgcccagttccaatgtaacaaacctaaggttccagggcgagagcaataggcatgatgatcatcaggtcatgcagtctgcttggcgctatcaatgtttaagtctcaagatggcgtgaagggattaattagacagggttggcatgggagtgccctaaacaaaagcaagtgcattgctgcatgtatgtatgtatattacgatttcattgcaactgtaggaacgagctcaaaaaagaaggaaatgataggcaaactaaaatgaaccagacgagaagaaaaagaatcaaatcgtgtctgttgttgttttgtggcaaagagaacagggccacttacatctagataaccagatacagagagtttagttcaagtaaatgtacttttgagcaacaggatcaaagaccgtacaaagatgtcatcatacaagaccaatggacctagtgtaatttgcccaccccttggatccgcctctggtggacataagtgaatgaacgcattggaagcaattcctctatctaaaa

SEQ ID NO: 111635 - DNA, 689 bp, Zea Mays
ccagtgcatcctgataaacaccccagcctgcattcatgggtcgccatgcgcttgcgaaatcggcagctctgctccgggaagttaagaacaagcaaaggactaaccttgtgaagcgactggagcctacagaagcgaggtctccacaaacatcattgtgggtaccacacccaaggacagggatctactaccccaagggctttgaatgggtcatggaggatgtccccagcagcgcagcttcattccagcagtcatactggttcaggactggggaggcagagccagcaagctctattacatcaaagaatgattctacttcctttgaccatccatttgcttgatatatgagaggctttgcactggaataaaaaccattgaaagacacagctgtgtgctttcaggaagaaaagagatacagttgtgcaagtcatcaccatcatggcaggtccatggatgcttcatgcttaccagttgttctgattcccagggtgcagtcgcagcaaccacctacagatcggaaacaatgtccgcctttcttttgtatttttttcttaaccttctgttggttcaacttgaaagacctgtcctaaactgtacctttagagcagcagttattttattttatttttaagcttgtcctaagaaaagaaaccaatcaaagctttggttctcatactgttaaaggagaggca

SEQ ID NO: 111636 - DNA, 147 bp, Zea Mays
atggcgctgtccgcgtcggcagcgtcgaccggccgcgggtcgcgggcggagaaggtgaggaggatcttcgagcgctttgacaccaatggggacgacgggctagaccgcaacgagatggccgccctcgtcgtcgtcgtcaaccctcag

SEQ ID NO: 111637 - DNA, 1100 bp, Zea Mays
gccagagccatggagaagagccgggtgctggtggtgggcggcaccgggtacatcgggcggcggctcgtgagggcgagcctggcgcaagggcacccgacgctagtcctgctgcggccggagatcggcctggacatcgacaagctccagatgttgctctccttcaaggcccagggcgcgcggctggtggaggcgtcgctggaggaccacgcgggcctcgtcgccgccgtagcgcaggccgacgtggtggtctcagccatgtccggggcgcacatccgcagccacaatctctccctgcagcataagctcgtcgaggccatcaaggaggctgggaacatcaagcgttttataccatcggaattcggcatggatccatccaagatggggcatgctcttgaaccaggaagggttacatttgatgaaaagatggacctaaggcgtgcaatagaagatgccaacattcctcacacctatgtttctgccaattgctttgctgcttacttctgcccaaacctatgtcagatgcgcacccttttgccgcccaaagaaaaagttcatgtatatggagacggcaatgtcaaagctatattctgtgatgaagacgatgttgcaacgtatacaatcaagtctgttgatgatcctcgcgcattgaacaagacactatacataagaccaccagaaaacatcttgactcaaaacgatgttatctcgaagtgggaaaagctttccggaaacgttctggagaaaatccacattcctgcagatgaattcttggcttcaatgaaaggtactgacctggccaatcaagccggagtgggacactattaccacattttctatgaaggctgcttgacaaattttgaaatcggcgacgatggagcagacgctactctgttgtacccagaggttcagtatacccgcatggatgagtacatgaagaggtatgtgtaacgctaaattgaactgttggcttgtccgaacgaattcatatatggtggtggttgtatgtgatgactctttcagattattgatgctatgttgtgtattacctagtctcggtatttcatatttttaatattattcgcagctcctttgtttgattc

SEQ ID NO: 111638 - DNA, 2262 bp, Zea Mays
ctccataatataaatacacctatttaaatttgtactagcttcgccacctgtagccacgggtaaaaaaaaagttcacatccaacttgcactctatgtcgcggggaaaatgtgcacatcgtcctgcctacgcaccgcggggaagagagtgcagagaggagagcgaggacaaccaaacaaatcgagccggatgttgcgggaatatcttcctggttgatcgggcgggaacggggaatctgtccaagtgctctccagatctggagtcaaaggatactgccctatttggtctgtccatcccagcctccaagaatacaagcagctgtagaccacgaaactctgcttcgatagcaggagcagcagagagagagacgcacgccggctatcagttcagttcttctgggcatctctcaactcaaggaggagacacgacttggctcttcttcctctccggcgcggcgcggcgcgtgcgtcctattctctctcaggtgctccaggaacaagtgccgtccaccagatccaggctcggcatgttcgtgatcgaggacaagggcggcgccatcgcgctgatgctggcgtcgctcctgttcctgggcacctggccggccgtgctcaccctgctggagcgccggggccgcctgccgcagcacacgtacctggactactccatcaccaacctcctcgcggccgtgctcatcgcgctcaccttcggccagctcggggacagcaggcgcggcatgcccaacttcttcacgcagctcggccaggacaactggccctctgtgctgttcgccatggccgggggcgtcgtgctcagcgtcggcaacctctccacccagtacgcttgggcctatgtgggcctctccgtcactgaggtcatcagctccagcatggtggtggtcataggcaccacgctgaactacttcctggacaaccgcatcaacagggcagagattctgttccctggtgtggcgtgcttcctcgtcgccgtcatccttggctccgctgtccattcctccaatgcagctgacaatgagcagaaactcggtgcctccacgaatgcctacaaactcgggacaagtggaaatgtggaaccaagcaaacaagctgtagacagaggtagtataacatgtgaaaactgctgctgatttgttgcagatttttttcccagtaacttatctagtttcaggtgttcattgtctatctgaagaagaaagaacaaatctaatttcagatgctcccaaagacttggaggagagtggagcctctggaatccggcaacctgacaaagctgaggcaggcactgcagagtacctcattgagcttgaagaacggcgatcaattaaggtattcggttcaaacaccttcatcgggctggggatcgtcttcttcgcgggcgtgtgcttctcgctcttctccccggcgttcaacctggccactaacgaccagtggcacacgctcagggacggcgtgccgcacctggtggtgtacaccgccttcttctacttctccatctcctgcttcgtcgtcggcgtcggactcaacgtcctgttcctctaccgccccatggccggcgtgccccgctcctccctcggggcctacctcagggactgggacggccgccagtgggcgctcctcgccggcctgctctgcggcttcggcaacggcttccagttcatgggcggccaggccgcagggtacgccgccgctgacgctgtccaggccctgccgctcgtcagcaccttctggggcgtactgctcttcggggagtaccgcaagtcgtcgcggaagacctacgtcctgctcggcttcatgctcttcatgttcgtcgccgctgtcgccgtgctcatggcttcgtcaggtcacaggagcacagagtgaattgcaagtcttgttcgtcctctgcttgttgcaagcccttccacttgcgattgatccacggaaagatccatcgtcttcgtgaagcaggggaaatccattccttccagccattaatgagatcttcagaacaatggaatggagatgtacaaaaaaatggttgttgtatgattgatcaaatgtatagaactatttatattctttccaagacaattggctgataggataggaactgttccaggggtggaaaaaatctctatctttatgaacagggtaaaagcaatgttcagaaaaaagtagtttgtgcctagtatgacagattcagaatggtatcagtactcccgctgttttggaatgttcaagagaaaactagtggatgctctaaatctt

SEQ ID NO: 111639 - DNA, 2104 bp, Zea Mays
cgagcggagggtcactgtcatcggcccaaattattttccacggcgatgacgagtgcatcgctcgtccgttccttcctctctcctcctcctcctttccctgctccatccagactccaactaaacgccattggtgaatggatcccaaggaggtcaaactgatgcagagcaagttggacttttcagtcagtggcctggccttgcagatcgctcccgcgaggctggccgaagaggcagggggcttgttagtagtccagtcgctgctataaaataaagcggccatgaaccgtgttctcgctctcgcgtgtgcgtcttctctgctcacatgccgcgaggtgctccaggaacaagtgccgtccaccagatccaggctcggcatgttcgtgatcgaggacaagggcggcgccatcgcgctgatgctggcgtcgctcctgttcctgggcacctggccggccgtgctcaccctgctggagcgccggggccgcctgccgcagcacacgtacctggactactccatcaccaacctcctcgcggccgtgctcatcgcgctcaccttcggccagctcggggacagcaggcgcggcatgcccaacttcttcacgcagctcggccaggacaactggccctctgtgctgttcgccatggccgggggcgtcgtgctcagcgtcggcaacctctccacccagtacgcttgggcctatgtgggcctctccgtcactgaggtcatcagctccagcatggtggtggtcatagcagtggttgtctgacagaccaagtttcgtttctgttctgtcagctttgaaatggaagaaaaagtctttgttttgatttccacgtcttccaattcttgtgttcttcaggcaccacgctgaactacttcctggacaaccgcatcaacagggcagagattctgttccctggtgtggcgtgcttcctcgtcgccgtcatccttggctccgctgtccattcctccaatgcagctgacaatgagcagaaactcggtgcctccacgaatgcctacaaactcgggacaagtggaaatgtggaaccaagcaaacaagctgtagacagagatgctcccaaagacttggaggagagtggagcctctggaatccggcaacctgacaaagctgaggcaggcactgcagagtacctcattgagcttgaagaacggcgatcaattaaggtattcggttcaaacaccttcatcgggctggggatcgtcttcttcgcgggcgtgtgcttctcgctcttctccccggcgttcaacctggccactaacgaccagtggcacacgctcagggacggcgtgccgcacctggtggtgtacaccgccttcttctacttctccatctcctgcttcgtcgtcggcgtcggactcaacgtcctgttcctctaccgccccatggccggcgtgccccgctcctccctcggggcctacctcagggactgggacggccgccagtgggcgctcctcgccggcctgctctgcggcttcggcaacggcttccagttcatgggcggccaggccgcagggtacgccgccgctgacgctgtccaggccctgccgctcgtcagcaccttctggggcgtactgctcttcggggagtaccgcaagtcgtcgcggaagacctacgtcctgctcggcttcatgctcttcatgttcgtcgccgctgtcgccgtgctcatggcttcgtcaggtcacaggagcacagagtgaattgcaagtcttgttcgtcctctgcttgttgcaagcccttccacttgcgattgatccacggaaagatccatcgtcttcgtgaagcaggggaaatccattccttccagccattaatgagatcttcagaacaatggaatggagatgtacaaaaaaatggttgttgtatgattgatcaaatgtatagaactatttatattctttccaagacaattggctgataggataggaactgttccaggggtggaaaaaatctctatctttatgaacagggtaaaagcaatgttcagaaaaaagtagtttgtgcctagtatgacagattcagaatggtatcagtactcccgctgttttggaatgttcaagagaaaactagtggatgctctaaatctt

SEQ ID NO: 111640 - DNA, 2112 bp, Zea Mays
cgagcggagggtcactgtcatcggcccaaattattttccacggcgatgacgagtgcatcgctcgtccgttccttcctctctcctcctcctcctttccctgctccatccagactccaactaaacgccattggtgaatggatcccaaggaggtcaaactgatgcagagcaagttggacttttcagtcagtggcctggccttgcagatcgctcccgcgaggctggccgaagaggcagggggcttgttagtagtccagtcgctgctataaaataaagcggccatgaaccgtgttctcgctctcgcgtgtgcgtcttctctgctcacatgccgcgaggtgctccaggaacaagtgccgtccaccagatccaggctcggcatgttcgtgatcgaggacaagggcggcgccatcgcgctgatgctggcgtcgctcctgttcctgggcacctggccggccgtgctcaccctgctggagcgccggggccgcctgccgcagcacacgtacctggactactccatcaccaacctcctcgcggccgtgctcatcgcgctcaccttcggccagctcggggacagcaggcgcggcatgcccaacttcttcacgcagctcggccaggacaactggccctctgtgctgttcgccatggccgggggcgtcgtgctcagcgtcggcaacctctccacccagtacgcttgggcctatgtgggcctctccgtcactgaggtcatcagctccagcatggtggtggtcataggcaccacgctgaactacttcctggacaaccgcatcaacagggcagagattctgttccctggtgtggcgtgcttcctcgtcgccgtcatccttggctccgctgtccattcctccaatgcagctgacaatgagcagaaactcggtgcctccacgaatgcctacaaactcgggacaagtggaaatgtggaaccaagcaaacaagctgtagacagaggtagtataacatgtgaaaactgctgctgatttgttgcagatttttttcccagtaacttatctagtttcaggtgttcattgtctatctgaagaagaaagaacaaatctaatttcagatgctcccaaagacttggaggagagtggagcctctggaatccggcaacctgacaaagctgaggcaggcactgcagagtacctcattgagcttgaagaacggcgatcaattaaggtattcggttcaaacaccttcatcgggctggggatcgtcttcttcgcgggcgtgtgcttctcgctcttctccccggcgttcaacctggccactaacgaccagtggcacacgctcagggacggcgtgccgcacctggtggtgtacaccgccttcttctacttctccatctcctgcttcgtcgtcggcgtcggactcaacgtcctgttcctctaccgccccatggccggcgtgccccgctcctccctcggggcctacctcagggactgggacggccgccagtgggcgctcctcgccggcctgctctgcggcttcggcaacggcttccagttcatgggcggccaggccgcagggtacgccgccgctgacgctgtccaggccctgccgctcgtcagcaccttctggggcgtactgctcttcggggagtaccgcaagtcgtcgcggaagacctacgtcctgctcggcttcatgctcttcatgttcgtcgccgctgtcgccgtgctcatggcttcgtcaggtcacaggagcacagagtgaattgcaagtcttgttcgtcctctgcttgttgcaagcccttccacttgcgattgatccacggaaagatccatcgtcttcgtgaagcaggggaaatccattccttccagccattaatgagatcttcagaacaatggaatggagatgtacaaaaaaatggttgttgtatgattgatcaaatgtatagaactatttatattctttccaagacaattggctgataggataggaactgttccaggggtggaaaaaatctctatctttatgaacagggtaaaagcaatgttcagaaaaaagtagtttgtgcctagtatgacagattcagaatggtatcagtactcccgctgttttggaatgttcaagagaaaactagtggatgctctaaatctt

SEQ ID NO: 111641 - DNA, 1997 bp, Zea Mays
cgagcggagggtcactgtcatcggcccaaattattttccacggcgatgacgagtgcatcgctcgtccgttccttcctctctcctcctcctcctttccctgctccatccagactccaactaaacgccattggtgaatggatcccaaggaggtcaaactgatgcagagcaagttggacttttcagtcagtggcctggccttgcagatcgctcccgcgaggctggccgaagaggcagggggcttgttagtagtccagtcgctgctataaaataaagcggccatgaaccgtgttctcgctctcgcgtgtgcgtcttctctgctcacatgccgcgaggtgctccaggaacaagtgccgtccaccagatccaggctcggcatgttcgtgatcgaggacaagggcggcgccatcgcgctgatgctggcgtcgctcctgttcctgggcacctggccggccgtgctcaccctgctggagcgccggggccgcctgccgcagcacacgtacctggactactccatcaccaacctcctcgcggccgtgctcatcgcgctcaccttcggccagctcggggacagcaggcgcggcatgcccaacttcttcacgcagctcggccaggacaactggccctctgtgctgttcgccatggccgggggcgtcgtgctcagcgtcggcaacctctccacccagtacgcttgggcctatgtgggcctctccgtcactgaggtcatcagctccagcatggtggtggtcataggcaccacgctgaactacttcctggacaaccgcatcaacagggcagagattctgttccctggtgtggcgtgcttcctcgtcgccgtcatccttggctccgctgtccattcctccaatgcagctgacaatgagcagaaactcggtgcctccacgaatgcctacaaactcgggacaagtggaaatgtggaaccaagcaaacaagctgtagacagagatgctcccaaagacttggaggagagtggagcctctggaatccggcaacctgacaaagctgaggcaggcactgcagagtacctcattgagcttgaagaacggcgatcaattaaggtattcggttcaaacaccttcatcgggctggggatcgtcttcttcgcgggcgtgtgcttctcgctcttctccccggcgttcaacctggccactaacgaccagtggcacacgctcagggacggcgtgccgcacctggtggtgtacaccgccttcttctacttctccatctcctgcttcgtcgtcggcgtcggactcaacgtcctgttcctctaccgccccatggccggcgtgccccgctcctccctcggggcctacctcagggactgggacggccgccagtgggcgctcctcgccggcctgctctgcggcttcggcaacggcttccagttcatgggcggccaggccgcagggtacgccgccgctgacgctgtccaggccctgccgctcgtcagcaccttctggggcgtactgctcttcggggagtaccgcaagtcgtcgcggaagacctacgtcctgctcggcttcatgctcttcatgttcgtcgccgctgtcgccgtgctcatggcttcgtcaggtcacaggagcacagagtgaattgcaagtcttgttcgtcctctgcttgttgcaagcccttccacttgcgattgatccacggaaagatccatcgtcttcgtgaagcaggggaaatccattccttccagccattaatgagatcttcagaacaatggaatggagatgtacaaaaaaatggttgttgtatgattgatcaaatgtatagaactatttatattctttccaagacaattggctgataggataggaactgttccaggggtggaaaaaatctctatctttatgaacagggtaaaagcaatgttcagaaaaaagtagtttgtgcctagtatgacagattcagaatggtatcagtactcccgctgttttggaatgttcaagagaaaactagtggatgctctaaatctt

SEQ ID NO: 111642 - DNA, 2042 bp, Zea Mays
cgagcggagggtcactgtcatcggcccaaattattttccacggcgatgacgagtgcatcgctcgtccgttccttcctctctcctcctcctcctttccctgctccatccagactccaactaaacgccattggtgaatggatcccaaggaggtcaaactgatgcagagcaagttggacttttcagtcagtggcctggccttgcagatcgctcccgcgaggctggccgaagaggcagggggcttgttagtagtccagtcgctgctataaaataaagcggccatgaaccgtgttctcgctctcgcgtgtgcgtcttctctgctcacatgccgcgaggtgctccaggaacaagtgccgtccaccagatccaggctcggcatgttcgtgatcgaggacaagggcggcgccatcgcgctgatgctggcgtcgctcctgttcctgggcacctggccggccgtgctcaccctgctggagcgccggggccgcctgccgcagcacacgtacctggactactccatcaccaacctcctcgcggccgtgctcatcgcgctcaccttcggccagctcggggacagcaggcgcggcatgcccaacttcttcacgcagctcggccaggacaactggccctctgtgctgttcgccatggccgggggcgtcgtgctcagcgtcggcaacctctccacccagtacgcttgggcctatgtgggcctctccgtcactgaggtcatcagctccagcatggtggtggtcataggcaccacgctgaactacttcctggacaaccgcatcaacagggcagagattctgttccctggtgtggcgtgcttcctcgtcgccgtcatccttggctccgctgtccattcctccaatgcagctgacaatgagcagaaactcggtgcctccacgaatgcctacaaactcgggacaagtggaaatgtggaaccaagcaaacaagctgtagacagaggtgttcattgtctatctgaagaagaaagaacaaatctaatttcagatgctcccaaagacttggaggagagtggagcctctggaatccggcaacctgacaaagctgaggcaggcactgcagagtacctcattgagcttgaagaacggcgatcaattaaggtattcggttcaaacaccttcatcgggctggggatcgtcttcttcgcgggcgtgtgcttctcgctcttctccccggcgttcaacctggccactaacgaccagtggcacacgctcagggacggcgtgccgcacctggtggtgtacaccgccttcttctacttctccatctcctgcttcgtcgtcggcgtcggactcaacgtcctgttcctctaccgccccatggccggcgtgccccgctcctccctcggggcctacctcagggactgggacggccgccagtgggcgctcctcgccggcctgctctgcggcttcggcaacggcttccagttcatgggcggccaggccgcagggtacgccgccgctgacgctgtccaggccctgccgctcgtcagcaccttctggggcgtactgctcttcggggagtaccgcaagtcgtcgcggaagacctacgtcctgctcggcttcatgctcttcatgttcgtcgccgctgtcgccgtgctcatggcttcgtcaggtcacaggagcacagagtgaattgcaagtcttgttcgtcctctgcttgttgcaagcccttccacttgcgattgatccacggaaagatccatcgtcttcgtgaagcaggggaaatccattccttccagccattaatgagatcttcagaacaatggaatggagatgtacaaaaaaatggttgttgtatgattgatcaaatgtatagaactatttatattctttccaagacaattggctgataggataggaactgttccaggggtggaaaaaatctctatctttatgaacagggtaaaagcaatgttcagaaaaaagtagtttgtgcctagtatgacagattcagaatggtatcagtactcccgctgttttggaatgttcaagagaaaactagtggatgctctaaatctt

SEQ ID NO: 111643 - DNA, 1941 bp, Zea Mays
tgaaaatgcttccttttctctggttgagatcttcccctccccctgccggatctgaatctcatccccgggtggggccgtgggggggactctagctggaggggcactttcttgttcaccatgtttgtcgtgcccttaatacattttttgtagtaccttcctgtcaaaactacaagaaatggagattttggatggatgcatgtgtacatgtctctcggaaggaaaagcccgcaagatcggatcgatcacttacttggctactgctgcctgctgctgcaggtgctccaggaacaagtgccgtccaccagatccaggctcggcatgttcgtgatcgaggacaagggcggcgccatcgcgctgatgctggcgtcgctcctgttcctgggcacctggccggccgtgctcaccctgctggagcgccggggccgcctgccgcagcacacgtacctggactactccatcaccaacctcctcgcggccgtgctcatcgcgctcaccttcggccagctcggggacagcaggcgcggcatgcccaacttcttcacgcagctcggccaggacaactggccctctgtgctgttcgccatggccgggggcgtcgtgctcagcgtcggcaacctctccacccagtacgcttgggcctatgtgggcctctccgtcactgaggtcatcagctccagcatggtggtggtcataggcaccacgctgaactacttcctggacaaccgcatcaacagggcagagattctgttccctggtgtggcgtgcttcctcgtcgccgtcatccttggctccgctgtccattcctccaatgcagctgacaatgagcagaaactcggtgcctccacgaatgcctacaaactcgggacaagtggaaatgtggaaccaagcaaacaagctgtagacagagatgctcccaaagacttggaggagagtggagcctctggaatccggcaacctgacaaagctgaggcaggcactgcagagtacctcattgagcttgaagaacggcgatcaattaaggtattcggttcaaacaccttcatcgggctggggatcgtcttcttcgcgggcgtgtgcttctcgctcttctccccggcgttcaacctggccactaacgaccagtggcacacgctcagggacggcgtgccgcacctggtggtgtacaccgccttcttctacttctccatctcctgcttcgtcgtcggcgtcggactcaacgtcctgttcctctaccgccccatggccggcgtgccccgctcctccctcggggcctacctcagggactgggacggccgccagtgggcgctcctcgccggcctgctctgcggcttcggcaacggcttccagttcatgggcggccaggccgcagggtacgccgccgctgacgctgtccaggccctgccgctcgtcagcaccttctggggcgtactgctcttcggggagtaccgcaagtcgtcgcggaagacctacgtcctgctcggcttcatgctcttcatgttcgtcgccgctgtcgccgtgctcatggcttcgtcaggtcacaggagcacagagtgaattgcaagtcttgttcgtcctctgcttgttgcaagcccttccacttgcgattgatccacggaaagatccatcgtcttcgtgaagcaggggaaatccattccttccagccattaatgagatcttcagaacaatggaatggagatgtacaaaaaaatggttgttgtatgattgatcaaatgtatagaactatttatattctttccaagacaattggctgataggataggaactgttccaggggtggaaaaaatctctatctttatgaacagggtaaaagcaatgttcagaaaaaagtagtttgtgcctagtatgacagattcagaatggtatcagtactcccgctgttttggaatgttcaagagaaaactagtggatgctctaaatctt

SEQ ID NO: 111644 - DNA, 911 bp, Zea Mays
tcaactgccgagggcggtgagcgacggatatttttggggcccacagtggagatgatcggtgatcgcagtgtctgggtcaccgaggctgtgttccctgtctgcaatttcgggcaagcctaggggcccaagcggaaaaggtaagccgactccgtcggcggcggcggcgatcatggccgcgcagagggagaagtccgcggccgtggcggtcgccccagcacacggcgctgcggtttcggggtctccttctccttcttcctcatccggaggcccggcagtgtcggcgtcctcgtcgggagaccggtggtgcgccgcgatcggtaaccttggggagctcggcgccaacgtggacgcgctgcagaagctgctcgggcggaaagccgtcttcgtagacgatgacatcttctccaaggcctccctcgccgccgaccaggcccgcaccattaaggttcttgaccagagggtgcagtctctggaacgtgaactcgatgctgccatttcagcagctgctcgagctcgtgtagagaaacgtcaggcggaagctgcgcaacgagctgcagagttacgcacacgggaggtcacagaagaactggagaacactgctagtatgcactgtcctgtttctacactagcatttgcaggcatagcatttgattatctagcatttttcaagaaaatgctgtctttgatcagtggtcacaattacatctggcaggggtgtttgagctgcacatggaggagttgcggctgaagcaagaggatattgcgaagaaagatagcgatatcaaggtgttagaagcgatcatacgaacccttagtagtaaagatgatgatggatccagcgaataattgccatgcacagggagcgaataaattgtttcgattgaaattcagatagtttcagaggaacataa

SEQ ID NO: 111645 - DNA, 853 bp, Zea Mays
tcaactgccgagggcggtgagcgacggatatttttggggcccacagtggagatgatcggtgatcgcagtgtctgggtcaccgaggctgtgttccctgtctgcaatttcgggcaagcctaggggcccaagcggaaaaggtaagccgactccgtcggcggcggcggcgatcatggccgcgcagagggagaagtccgcggccgtggcggtcgccccagcacacggcgctgcggtttcggggtctccttctccttcttcctcatccggaggcccggcagtgtcggcgtcctcgtcgggagaccggtggtgcgccgcgatcggtaaccttggggagctcggcgccaacgtggacgcgctgcagaagctgctcgggcggaaagccgtcttcgtagacgatgacatcttctccaaggcctccctcgccgccgaccaggcccgcaccattaaggttcttgaccagagggtgcagtctctggaacgtgaactcgatgctgccatttcagcagctgctcgagctcgtgtagagaaacgtcaggcggaagctgcgcaacgagctgcagagttacgcacacgggaggtcacagaagaactggagaacactgctagggtgtttgagctgcacatggaggagttgcggctgaagcaagaggatattgcgaagaaagatagcgatatcaaggtgttagaagcgatcatacgaacccttagtagtaaagatgatgatggatccagcgaataattgccatgcacagggagcgaataaattgtttcgattgaaattcagatagtttcagaggaacataagcactcttgtcttgtgttacttgtgtttacctgtttatatcaaggctactaa

SEQ ID NO: 111646 - DNA, 1010 bp, Zea Mays
ccaaagcccccaaaacccaaaaccctgcgaccccaagataccaaagccagcagcagaagccgatgcccatgcagccgcaggcgccatcgatgaccccggccgccggaatcaccacggagcagatccaaaagtatctggatgagaataagcagcttattttggccattttggaaaatcagaacctaggaaaattggcagaatgtgctcagtatcagtcacaacttcagaagaacctcttgtatctcgctgcaatcgcagatgcccaaccagagactgctgtaagccggcctcagatggcgccgcctggtgcatcgcctggagtagggcagtacatgtcacaggtgcctatgttcccgccgaggacacctctaacgccacagcagatgctggagcagcaacttcagcaacagcaagctcaattgctaaacttcagtggccaaatggttgctaggcctggcatggttaacggcatgcttcaggccatgcaagtccaacaagctcagccatcgccggtaatgaacagaccggatgctggtgggatcgcctcggagccctctggcactgagagccacaggactagcactggtggcgataatggcggtggaagcgactagtccaaagagtcttgaggatttacgagctagccttgtaggttgcaaaatatgcacgtatactgccgatgaccaaagagaggatcgatcctgcgcccttagttgataagtggccatgatctttgcatggatgatcagtagctgtcacggttttatctttgttgccagtctgtagaacacacgtatagattgttgtgacatttatttgcttgctgtttccacaatgtactgtcgtagacttggagccatatgctagtttatggcttcaggagctggatttcagttacgagctgtgatggcaaaactttcaactcttcaggtagctggattcatttatgttatatgttacaagtttcatatctgtcaccaaattggaagcagtacggattctcatagcta

SEQ ID NO: 111647 - DNA, 4222 bp, Zea Mays
atggcgaggacggcgggcgacgacgacgacgacggcccgccgccgccctacggcggacagcgcgggccccggcgcgacccgcgcctcaaggacctcggcatctcctgcatgctcaacaccgaggtgggcgcgctgctggccgtcatccggcgccgcccggacccatactcgtacctaccgccggccgtcgccgccgccgaggaggccacgttcgcggcgctcatcaactcgctcaaggccctccgcgggctcctcttccagccccggcacggcgcgtggcgctgctccgatccgtccacgtacctcaccccgttcctggacgtggtgcagagcgaggaggccccgccggccgccacgggcgtcgcgctgtcctccgtgctcaagatcctccgcatcgacgtgttcgacgagtgctccccgggcgcgcgcgacgcggtccacgccatcctcaccgcgctcaccaactgccggatcgagcgcatctccgacgccggcgccgaggaggccgtgctcctgcgcgtgctccaggtgctcgccgcgctcctgcggacccgcgccgcgccgctgctgtcggacagctctgtgtgcacggccgtcaaacacgtgcttccagatcgtgcagcacgccgccagtagccgcggcagcgagctcctccagcgcacggcgcgccactgcatgcacgagatcctccaggccgtcttcgcgcggctgccggacatccgcgacgatgccgacgccgatgccggcgacccgtccctcggttccggcgctggcttcggcgcgcgctgcatggtcgacgtcttcaacttcctctgttccctgctggtgagcgccagcgacatggtaataaccccggatggccagggggccttcacctccgaggaggatgtgatgctattctctctcgtgctcgtcaacaccgccgtcgaacttggcggcgaggccatcggcaagcaccccaagctcctgcgcctcatccaggacgacctcttcttccacctgattcactacgccaccgaatacagccccctcgtcctctcgatgatctgcagtactgcactcaacctgtaccacttcttgcgccggttcctcaaattgcagctggaagccttcttcatgttcgtgctgctccgcgtgtgcggcggcggcaacgggccgcagctgcaggaggtggcgatcgagggcctcatcagcttctgccggcagccgacgttcgtgatcgagacgtacgtgaactacgactgcgacccgctgctgcacaacgtgtttgaggaggtgggcaagctgctgtgcaaggcggcgttcccggcgtcggccccgataacgacgatccagctgcaggcgttcgagggcctcgtcaacatgatcaccaccatcgccgacaacgtcgagatcgacaagacccccgaacacggcgcctacgccgtggacgtgtcggagttccgcctcttctggaccgagcgctgggactctgccgccgccgccggcggccagcgggagacgtgggtggacttcgtgcgcaagcgcaagctgcggaagaagaaggtggccgtcgcggcgaaccactacaaccgcgaccagaagaagggcgtggagttcctcaagctgtgccacctggtgccgacgccgccggatcccaggagcatggcttacttcctccgctactcgccggggctcgacaagaacaagatcggtgagttcctgggcgaccctgacgagttcagcctcaaggtgctcaaggagttcacggagacgttcgatttcacgggcgccatcctggacacggcgctgcgcacgtacctggagacgttccggctccccggcgagtcgcagaagatccagcgcattctggaggccttctccgagcggttcttcgagcagcagacgacgggggtgttcgccaccaaggacgccgcgttcatcctctgctactcgctcatcatgctcaacaccgacctgcacaacccgcaggtgaagaagaagatgtcggaggaggacttcatccggaacaaccgcgccattaacgacaagaaggacctgccgcgggagtacctgtcggagctcttccactccatctccaccaacgccataaccgtcttcagcacgtcggcgacggcggtggagatgacgcagagccggtgggtcgacctggtgaagcggtcgcgcgccctggagcccttcacgccgtgcgacttcaagcacaagctgagccgggaggtgttcatcgcggtgtcgggccccaccgtcgcgacgctggccgccatcttcgacagcgccgacgacgaggagacgctgaaccagtgcgtggaggggctggtatccgtggcgcgcatcgcgcggtacgggctggaggacgtgctggacgagctgctttgctgcctctgcaagttcaccacgttgctcaacccctacgccaccacggaggagacactcttcaccttcagcaatgagctcaagccacggatggccacgctcgcgctcttcaccatcgccaaccgcttcggcgagtcggtgcgcggcgcgtggaagaacgtcgtcgattgcctactcaagctcaagcggctcaagatgctaccgccgtcactgatcgacccggacggcagtggcgcccacggcggctcggatcagcggtcgggacatcggcacaggccgtccgcctccgacgctggcgtcatcttccccccgacgcaccgcggcgcggggacgagccggcacgtgtccggcatgatcggccggttctcacagttcctgtcgctggacagcggcggcgagtcgctgctctccgtcggtagcgagttcgagaacaacctcaaggtcatcaagcagtgccaggccgggagcatcttcacggagagcgccaagctgccggacgaggcgctgcagaacctcgggcgggcgctcatcttcgctgcggggggaaagggccagaagttcagcacgcccatcgaggaggaggacacagtcggtttctgctgggacctcctggcgctccttgcgacggccaacctccagcgcttcgcgaccttctggccgccgctgctcgagtgcttcagcgccgtgtcacagctgccgctcttctcgccgtccccgttcgccgagaaggcgatcgtggcgctcttcagggtcgccgtgcggctgctgtcgacgccgccgccgctgcgcccctccgacagccgcgtctccgaggagctagtgttcaagtcgatcaacatgatgtggaagctggacaaggagatccttgacacgtgctgcgaaggcatctcggagaacatcgtgaagttgctgacggagcacaccgacggagtgcagacgccactcgggtggaagacgttgctccaccttctcaccgtcacaggccggcacccagagacgttcgaccagtccgtggcggcgatgatcaagctgatgaccgacggcagtgccagcatcacacggttcaactacgccgccgtcatagaggccgccttcgggttcgcggcgctcaagatcagcccgctggacgtcagcacaaagatcctggagctcatggccgagtccgtgaactggctgatccagtggcacaagtccggctactccgaccctggaaacagcggcggcttcagcggcagctcttcgtcccagacgtcggtggaagatgcgtcgcggatgggcaacctggcagtcaacatgttcatcaagctcgcggaggcgctgcgcaagacgagcctagtccggcgcgaggagatccgcagccaggccgttttcgagctcggccgcgccttcaacctggccgcgacgggcgacctcgacttcgggccggccggctgcctcgcctgcttcaacctcgtcatcttcgccatggtggacgacctgcacgagaagacgctcgagtactcgcgtcgcgagggcgcggagcgggagacgcggagcatggagggcacgctggccgctgcggctgagcttctggcggactacctgcccgcggaggcgcaggaaccggggttccggaccttctggctcggagtgatacggcgactggacacatgcatgaagtgggatctcgatacgaaaggcggttctgggcagatgcaggagcttgtgccgcggatgctcaagcggatgatcatggagatgaagtcgaagggggtgctggtgccgcgggaaggcgatgagctctgggagattacccacatccagattcagtggatcgcaccggccgtcatggacgagctattcccgtag

SEQ ID NO: 111648 - DNA, 843 bp, Zea Mays
atggctaaatttaataatattgccacccaggtggaaatactcgcaaaaaggaagttatcgtactgtcatttggcccaaatgaagtatttgtttcgagaagcaatccagattaagagggtacttctacatgacgagaaaagcctgtgcatgtatgctgatatggaaatcatacttgtaatggatgttgtggaatacacaagtcctgatcactctccatccatggcaatttgcgatgctttttactcgaagcttttgacatttttggatgctcatcaaaaggtcccagccaaagagcaagttgatgcactatcaaaggaattgtttgcgctttcaactgtcacaggtccattcaagatcaatggagtaccgatccgtcgtgtcaaccagacctatgtcattgctacatcaaccaaggttgacatctctggtgttgatgtctcgaagtttgatgacaagtactttgccagggagaaaaagcagaaggtgaagaagatcgagggtgagctttttgagacagagaaggaggcgtccaagtcgctgcctgatttcaaaaaggatgaccagaaggccgtggatgctgctctgatcaaggctattgaggctgtcccagagctgaaggcctatcttgtcgctcggttctcccttagggatggtgacaagccccacgagatgctgatacagatatgtatatgcagaactaagaaaggatggttccctactggttctgtatataggaaggcggtcggacttgggtacaaatatgtagcacactttctaattgccaagcataataacaaacaattgcccactgatatagtgaacaacgcggaggagctccaataa

SEQ ID NO: 111649 - DNA, 281 bp, Zea Mays
gtaatatataatttaagcaagatgtaccctatttgagacatttgttggagttgctctaacactcacattttgtcgaatattttgtacgccgttgcaacgcacgggcatatacctagttactatgtatgcctgtacaagttccatttcaaacaattcatagttcgcctactgatcttattgttttaaatttgttgaaggtgtcatacatgatcctcgccagggtatccccagtcacacattcagtgggcaattgcgtcaagcgtgtggtggtcattgtgacc

SEQ ID NO: 111650 - DNA, 1665 bp, Zea Mays
gaactgacatgtgcactttggtccagtcttgctgaagaagaaagcgggaggaagccgaagccgagtagaaaggaaccaaataagacctcggtcaaaatttggagaaaggaaccaaacaccccattttttgccgcttcggaggcaccttcgaacaaagcccaaaagcagccagcgcaccgcatgtcctcgtcttcggcgcaccagaaggcgtcgccgccgatagaggaggaagcgacggagcacggacccttccccatcgaacagctacaggcatctggaatagctgcacttgatgtgaaaaaactcaaagatgctggtctctgcacagtggaatctgtagcatactctccaaggaaagaccttttgcaaattaaagggattagtgaagccaaagtcgacaagataattgaagcagcttccaagttggttccactcggatttactagtgctagccaacttcatgcacagagacttgagatcatccagcttacaactggatctagagagcttgatcaaattttggacggtggaatagaaacaggatctatcacagagatgtatggtgaatttcgctccgggaagactcagttgtgccacactctctgtgtcacatgtcagctcccattggaccaaggtggtggtgaaggaaaggctttgtatattgatgcagagggtacattcaggcctcaaagaattctccagatagcagacaggtttggcttgaatggcgctgatgtactagagaatgtggcttatgccagagcatataacactgatcatcaatcaagacttttgctagaagcagcctccatgatggtagagaccaggtttgctctcatggttgtggatagtgctacagccctttacagaactgatttctctggtagaggggagctatcagcaaggcagatgcatctggcgaagtttcttaggagccttcaaaagttagcagatgagtttggagtggcagtggtaatcacgaaccaagtagtggctcaagtggatggtgctgcaatgtttgctgggccacagatcaagcccattggagggaacatcatggctcatgcttccacaactaggctctttcttcgcaagggaagaggggaggagcggatctgcaaagtaatcagctctccctgcctggctgaagctgaagcaaggtttcagatatcatctgagggtgtcactgatgtcaaggactgaaagcatcctcatttgcagtccacagcataacttgccaattcagacgaatctctgatctgctgcactcgtgtcggtcccttgtacaatcaaaataccagtacaggcttccagaatgcgaatgcaaatccgttggagtgtggcactgtcatcctgttgtctttaggtaccatctaaagttggcattgttgtaaagtggtagagcgcaaggctctactttgtagccgtggattcgagccctatggtgggcgttatttaatttttttggcgaaaaagcctttaattgagttgtttaggtgatatgaataactctttaggtcatggagttcgactccatgggagtttaagctgggttaaaaaaaattatggtcacgatctttttcacatgggctactgtaacatctcgtctactcctgaaccgatgttaagctttttaggactatagatcatcttcatatatcaaca

SEQ ID NO: 111651 - DNA, 1734 bp, Zea Mays
cccggcgacctccttcccaaatcctagcccccccccaccctagcaccaccgcggcctgccttctctgggcgggtccttcccagatccatcacgggaggttaaaaaggaggcgggcaggtggtggatggacgggccgaagcgacacctgcgggtgcgcctccgcgtcactgcgcgccggcggggcgcctacggcgatggcgctggaggcgcgttggggcccaggcggcggaagtgccggatggagacccccgttctcaactccgctgccaagcttcagcgccgcgagatcgggggtcgccagctcgcggcacgcggcggcggccccgccgccgccgtgcccgagcgcttccggaacatgcagctccaggaggagttcgatacatatgatgacaatgctaacctatttgtgaagctgcagtttcttaaaagaagatccaaaattaatgagattgttgcagcaaaggatatcatatttgcccttgctaattctgggctttgtgctgcttttaaccgagtaacaaacaagcgcataggcttcttgaatttgagcccagatgaagtgattcggagcttgttctacaacaagaacaacgattcccttattaccgtttcagtttatgcatctgacaatttcagcacattgaagtgcagaacaaccccggttgagtatattagaaggaaccagttagatgctgggtttcccctctttgaatcagagtctctgaaatggcctggatttgtggagtttgatgacgtaaatggaaaagtactcacatattcagcgcaggatggtatatataaggtctttgacttgaagaactactacttcctatattcaataccagatgaaaatgtgcaggagataaagatcagtccaggaatcatgctcttgatatacgacagaacaccaagttatgtcccattgaagatattatctattgaagatgggaaacaactgaaattttttaagcacttgttacatcgcaacaagaaaattgatttcattgagcagttcaatgagaagctccttgtcaagcaagaggacgaaaacttccagatacttgatgtgcggagttctgagctaattgaagtcaatgtctccaagtttatgaccccttcagcattcatttttctttatgagaacaatctcttcttgacattccgaaacagaacagtcgctgtatggaacttccgaggagatcttgtgacttcatttgaggaccatttactttggcatcatgattgtagcaccaacaatatttacatcactagcgaccaggatcttattatctcatactgcaaatcggaggcagtggctgaggatggtacagttggatccatcaacatgagcgagatcatgactggcaagtgtatcgccaagattactgccaacgatcctgccctaagtgcgccccctcgcagaaatggtcgcagcaagcggcggtcctcggtctggagcaccgttccagaagctctggaggacgtcacggcactgttctatgacgaggacaggaatgagatctacaccggcaacagtcatggactggtgcatgtatggtctaactagatggtaacatgtccatacatctcgcccttttgatttgacttggctagcctgactgcattctgtataatccccggcttggggctcacctagattttgtatttggcaatagaatgtgtttccttgagaaattgtgaatgcaaatcgttataaatatctcatgttcgtct

SEQ ID NO: 111652 - DNA, 1743 bp, Zea Mays
cccggcgacctccttcccaaatcctagcccccccccaccctagcaccaccgcggcctgccttctctgggcgggtccttcccagatccatcacgggaggttaaaaaggaggcgggcaggtggtggatggacgggccgaagcgacacctgcgggtgcgcctccgcgtcactgcgcgccggcggggcgcctacggcgatggcgctggaggcgcgttggggcccaggcggcggaagtgccggatggagacccccgttctcaactccgctgccaagcttcagcgccgcgagatcgggggtcgccagctcgcggcacgcggcggcggccccgccgccgccgtgcccgagcgcttccggaacatgcagctccaggaggagttcgatacatatgatgacaatgctaacctatttgtgaagctgcagtttcttaaaagaagatccaaaattaatgagattgttgcagcaaaggatatcatatttgcccttgctaattctgggctttgtgctgcttttaaccgagtaacaaacaagcgcataggcttcttgaatttgagcccagatgaagtgattcggagcttgttctacaacaagaacaacgattcccttattaccgtttcagtttatgcatctgacaatttcagcacattgaagtgcagaacaaccccggttgagtatattagaaggaaccagttagatgctgggtttcccctctttgaatcagagtctctgaaatggcctggatttgtggagtttgatgacgtaaatggaaaagtactcacatattcagcgcaggatggtatatataaggtctttgacttgaagaactactacttcctatattcaataccagatgaaaatgtgcaggagataaagatcagtccaggaatcatgctcttgatatacgacagaacaccaagttatgtcccattgaagatattatctattgaagatgggaaacaactgaaattttttaagcacttgttacatcgcaacaagaaaattgatttcattgagcagttcaatgagaagctccttgtcaagcaagaggacgaaaacttccagatacttgatgtgcggagttctgagctaattgaagtcaatgtctccaagtttatgaccccttcagcattcatttttctttatgagaacaatctcttcttgacattccgaaacagaacagtcgctgtatggaacttccgaggagatcttgtgacttcatttgaggaccatttactttggcatcatgattgtagcaccaacaatatttacatcactagcgaccaggatcttattatctcatactgcaaatcggaggcagtggctgaggatggtacagttgttccagttggatccatcaacatgagcgagatcatgactggcaagtgtatcgccaagattactgccaacgatcctgccctaagtgcgccccctcgcagaaatggtcgcagcaagcggcggtcctcggtctggagcaccgttccagaagctctggaggacgtcacggcactgttctatgacgaggacaggaatgagatctacaccggcaacagtcatggactggtgcatgtatggtctaactagatggtaacatgtccatacatctcgcccttttgatttgacttggctagcctgactgcattctgtataatccccggcttggggctcacctagattttgtatttggcaatagaatgtgtttccttgagaaattgtgaatgcaaatcgttataaatatctcatgttcgtct

SEQ ID NO: 111653 - DNA, 756 bp, Zea Mays
atgaacagcgagctgagctacaacaagcgatgtcttgatgtggatgaacaacgacgacacgcgaagtcggaacaacagggtgaggtgcatggccagctagcaaagatgagcgcccatggcacggaagcgaaagcagaagtcgatggccggcttgaagacgcgccgacgcgcgtgaccgacaagctgaggttgatgttgaatgacaggagccgggagaaaactattggcttcccattttgggggtgtttggttgctcctgctaaaacttcaaggcgagcacgcgcaccaaggcagggagcgagcgcagccaagcctacgcccgaggcaaggaccagaggtgaggaccggcgagccccatggcgagctgggagcagtgttcggcgacctggcgtcttgcacggtgacaggagtaagcagctggttgcgaggtcgccgaggagcatggccgcgcagccaggccaagctgaggaggagcagggatggcgcgggccaaacaccgagccgtggctagaagggactcgccatggccgagcagagagggacgcggtccgagcggaggagcgcggcaaacctgaaggtgagcaggcaggggcggacgcgccaggaacaagagagcaggtgccagggacacgacagcagggaggagcaggaaggttgggcggccgagaaggagaagtcccagcaccatgggaagcatgggagctctggccggcgcgtaggaagaagacgagggaggccgtggcgagtgaacactag

SEQ ID NO: 111654 - DNA, 109 bp, Zea Mays
atttatataggctgggaggtgggtggttacataatagatctagtatggtacttatctattacaaccatatcctatatattaggaactctaacaaactcgaacccaaatc

SEQ ID NO: 111655 - DNA, 368 bp, Zea Mays
gattgggtcaaccaggccagatcataagttcaatagtttgatcgggtcgaccaggtcaggccagatcatgagtgaatagaaaatcgaaaatgtacatagctgttccagcggaaatactttgtttaattctaccacttctactaggagtagcctttttagtgctagctgaacgtaaattaatggcttccgtgcaacgtcgaaagggtcctgatgtagtgggatcgttcggattgttacaacctctagcatatggttttaaattgattctaaaagaacctatttcactaagtagtgctaatttctccctttttagaatggctccagtggctacatttatgttaagtctggtcgcttgggccgttgtacct

SEQ ID NO: 111656 - DNA, 1680 bp, Zea Mays
gtggctctgccacctagcgcccgtctggacgccggctctctccccgcgctcctggctggccttgcccgtcgcgcaatgacccccgcagcggcgaggcagctccaagtgcagctcctcgtccggggtctccctctccccgctcgcgccgccgtctccctcatagcctcgtcccattctccgggccacgcccgcgcagtcttcgacaacgccgtccccaccgcctgtgagaacgtctacctctggaccgccaccatcgctgcttacgccagacacgcctcgtcctctccgtcggtagccgaaggggcgctcacgctgttccggctcatgctccggcatggtgtccctcgcccgaacgccttcacggcgagctccgtggtcaggtgctgctcggcactgcgggccgttcgagtggggatccaggtgcacgggttcttggtgaatgctggactcggacgcgctgagcacgtgagagccgcgttggttgacatgtacggcaaccatggccgggtagcggatgcgaggagggtgttcgacgaaatgtctgccacaagtgtggtcctggggaataccatggtggcgtgctacgtcagggcaggggatgtggagtctgggcgggttgtgtttgataggatggtggaaagggacctaatctcttggaacacgctgatgatggggtacttgcggcaggggggtgcaggtgtggcaagggaattgtttgaagagatgccagacaggaatgtgaacagctggaacatggcgattgctgcatactcgcaggagaggtcatgggctgatgcagttgctgtgttcaatcgtatgcgcctcgccagattccaacctgatcccgcgacgatggctgtgctgatgtctgcctgtgcacagcttggttctttgtcagttgcaagacaggtgcatgggattttgaggaaaggctgtgtcgaaatgaacttccatgtgctgaattcattgattgacatgtatgctaagtgtggtagtatcagccaagctcatttgttgtttgttgagacacatttaaaggacacagtgtcttacaatgtgatgatctgtgctcttgcacgccatggacatggcagagatgcacttcaggtcttcgatgagatgtctaaggaacgattgcagccagatgcggtcactttgcttggcgttttgtcagcttgtgctcatgctggactagttcatgatgggaagttctactttgaatctatgaaaacaaattatgcaattgagcaatccccagatcactatgcatgcatggtggatctctatggccgagctggactcattaaggaagcatacgaattagcacgggcaatgccaatggaaccacatgcaggtgtctggggagccttgatcaatgcatgcaggaagcattgcaatgttgaagtcggtaaggttgcagcgagagagctcattgctattgaacccaggaatcctggaacttatgtactccttgccaacacgttggctcgtggtcagcaatgggaatttgttgagactgtgtggcaatcaatgagaggaaagggtattgagaaaacagcagggtgcagttggcttgaagtggaaaatgttgttcatgagttcttgatgggagagtccagccaccctaattccgatgagatttacagcatccttgagcatctgtatctacaactgacttaa

SEQ ID NO: 111657 - DNA, 538 bp, Zea Mays
actacagtcccaatctccaactatgaagcacgacatcaactagaaacaaccaatcctcgtagacaagtccatcagatatctggaaagtgtttttgtcccaaacacagcaatagtgtggggggtcttattgcagtattagaccaacatactgcacacagaagctggctctttagagtaacccactaggtatatcaaccctgtctgtggccagtcttggtcagaagaataaagttagcttttgtacaaacatctctatccaatacagctacaaaaatgtaactctagagcatcattcctttggatgccatgtctgcggaggaaccacggcctaacaaatcagctccctttgaaacaacccactaacacttacatataaaataccagcagaagcatgtttcaatgcagtgagattgttgaactacagttacagcactgctgaattatcaacgcctggtgattcgaggaaaatgtaaagtcgggagatgggtgcaggttaagcttctgaggaaggttgcatcacagacacatggcctgcaga

SEQ ID NO: 111658 - DNA, 1510 bp, Zea Mays
gcatgccatccaagattgcacagattcagccatggaaaaactccagtcgtccacgatcgtcgtcaatgcagttaggtacagcagctagtacgtccaacacttaccgtatgtttagggtttagcaccttgtgaggtctctgtagaaactacgtacattggcgtacgcgtacgccccctctataaaacgcggcagagccgaagctaccaaaaccagctcttagcttgctttctagctagcttgtcgatctttaattttagcaatacaatgacgacgcgagcgtgcttgttggttgcgctcgccatggctctcgcgctgctcttacaggagcatgcagcaggtgcagaggctcacgaacagaagcagcaggtgcagaggctcctcaggcgcctcaacaagccacctgtcaaaacgattgagagcccagatggagacatcatagactgcgtgcacatcaccaagcagccggccttcgacaaccctcttctaaagaatcatacaatccagatgtggccttcatctcacccacgaggaggccagctgaatgaagactattccaacactgcatccagcatcacccaaacgtggcaccagaatggcagcaggtcgtgtcctgagaacaccatacccatccgtaggaccatggaggaggacgttcggagggccgactcacccaggagctatggcaagaaggagaggcggccgaaattcacccccgtcgatggcgctggacagccaacgactgtgaccagtggccaccagtgggcccaggcatctgcgcagggtggcagtacgtactatggaaccgaggcgaccttcgatctttggcagcccgtcgttgagacggccagtgacttcagcttgacccagttctgggtcgtcagtggatcctaccaagccaatgacctcaacaccattgaagcaggatggcaggtttccccgaatatgtatggcgacaacagccctagacttttcatttactggactcgcgacgcgtatcagacgacgggatgctacgacctcaagtgctcgggtttcgtccaaacaaacaatgccatcaccttcggtgtcacccaactgtccccggtctccacctatggtggcccacagaacgacatcactattttagtttggaaggatccaaagacggggaactggtggttgcaagtgggaaaagatcttctgggctactggccgtcatccctcttcaccaacctggcgagcagtgcctccaacatccagtggggcggcgaggtatactcgcctgacgcgggccaaacatccacacagatgggcagtggacatctccccgaggaagggctcgggaaagccagttacatccggaacatccaagtggtcgatgcgtccaacactcttctgtcgccaagtggtggtctgggtctgttcgcttcacgacccaactgctataatgtgctcaatggtgctgctggtaacagctttggcacctacatctactatggggggccagggaggaaccctaactgccagtag

SEQ ID NO: 111659 - DNA, 888 bp, Zea Mays
cttgggggcttcacctgctgtatctcattaccatctgcatctggttgcccgttgattgagaaggaggagctgagggccatggcgaccgagaagcccatcctgtacaacgcctggatcagctcctgctcccaccgtgttcgcatcgcactcaacctcaaaggtgtggattacgagtacaagtcggtaaaccctaggacagatccagattatggaaaaatcaatccaattaaatatattccagcattagtagatgggggcatagtcgtttctgattctcttgccatctcactgtatttggaagataagtatcctgagcatccactcctgcctaaagatctcaagaggaaagctcttaatcttcagattgcaaacattgtttgttcaagcattcaacctcttcaaggctatgctgttattggtctgcatgagggtaggatgagcccagatgagggccttcatattgttcaaagttatattgacaagggattcagagcgatcgaaaagctgttggaaggatgtgagagtaaatatgctactggagatgatgtccaattggcagatgtgttccttgaaccacagatacatgccggcataaatcgcttccaaatcgatatgtcgatgtacccaatcttggagaggctccatgatgcatacatgcaaattcccgcattccaagccgcgcttcctaaaaatcaaccagacgcaccttcatcataatcatcaagattatctcaataatttgcatgtcattttgtaataatttggatagggagccactgcttcctccatcccgttgtggatcaaaagggtgaacgattggcacttacctgcatggtccaatacctattatatttcttaaacagatactatttacggctattgtaattt

SEQ ID NO: 111660 - DNA, 98 bp, Zea Mays
taacatacaacatgcacatcatgcaaccacaaactctagttctcatgcaacaaacaaccagtgaacttcgcaatactcaaatacaagttattttataa

SEQ ID NO: 111661 - DNA, 1398 bp, Zea Mays
gtcatcctcagcctcagctcagtctcttccactctcccttgacctgtctccttcacctgctgattgctgtgccgctccgctccgctccggtggcatctgcatctgcatctccatccctcgatctgtcttctctcagggtggaataagcgtgacaatggaggctccacccgtggcgctgttcgacaccctcaaggcagccaaaccgttcttcttgttggctggtcccaacgtgattgaatcggaggagcacgtcctgaagatggccaaacacatcaaagcaattacgaccaagcttggaattccgctcgtgttcaagtccagctttgataaagcaaaccgtacatcatcaaaatcattccgtggtcctggtcttgaagaaggtcttaagatccttcaaaaggtgaaagcaacatatgaccttccgatagtcactgatgtgcacgaaagccaccagtgtgaagctgttggaagagttgctgacatcatacagattccagccttcctctgtcgccagactgatcttctagtggctgctgctaagactggaaaaattatcaatatcaagaaaggacaattctgtgcgccttctgttatggtgaactctacagagaaagtaaggcttgctgggaatccaaatgtgatggtctgtgagcgtggtaccatgtttggctacaatgatctatttgttgacccaaggaaccttgagtggctgagggaaagcaactgcccagttgtagctgatgtaacacatgctctacagcaaccagctggaagaaagcttgatggtggaggtgttgcaagcggtgggctacgagaactaataccgtgcattgcaaggacttctgttgctgttggtgttgatggtattttcatggaggtacatgatgaccccttgaatgcaccatgcgatggcccaactcaatggccgttgcgcaatctggaagagctgttggaggaattaattgcaattgctcgagttaccaagggaaagaagccattcaagatcgacctcactccgttccaggagtgatctgctttggttgatagaaagcacaatgccaccatccatggaattccacagggtggatttcaatatgaattgagtacttgctattgttgggagtatacctgcagtggatgacttagactatctctagcagattctttatctcattccgtattttatttcctttttcaaactccactccgcaaacagtgtcaaacagtgttgtcatctacagtttcgcattccctgttttaccctatctactcgagacagtcttatcaccgaacaaactattgtgttgaaacctgccggattggtttgtgttatttcaccagttgtgccatgttggactaacaatatcgctaaacaaatgcaattgttggttatgttct

SEQ ID NO: 111662 - DNA, 976 bp, Zea Mays
aatctgagcatatatttgtccaatatttttaatggaaaaaacaattatccatacatctgctgtctttatattcctggttaaggcttgaagataattattttaccagatttacttgtgttacttttcttactgcatgtgcttgtcaaagtgaacatttacatctccaggttatggtgaactctacagagaaagtaaggcttgctgggaatccaaatgtgatggtctgtgagcgtggtaccatgtttggctacaatgatctatttgttgacccaaggaaccttgagtggctgagggaaagcaactgcccagttgtagctgatgtaacacatgctctacagcaaccagctggaagaaagcttgatggtggaggtgttgcaagcggtgggctacgagaactaataccgtgcattgcaaggacttctgttgctgttggtgttgatggtattttcatggaggtacatgatgaccccttgaatgcaccatgcgatggcccaactcaatggccgttgcgcaatctggaagagctgttggaggaattaattgcaattgctcgagttaccaagggaaagaagccattcaagatcgacctcactccgttccaggagtgatctgctttggttgatagaaagcacaatgccaccatccatggaattccacagggtggatttcaatatgaattgagtacttgctattgttgggagtatacctgcagtggatgacttagactatctctagcagattctttatctcattccgtattttatttcctttttcaaactccactccgcaaacagtgtcaaacagtgttgtcatctacagtttcgcattccctgttttaccctatctactcgagacagtcttatcaccgaacaaactattgtgttgaaacctgccggattggtttgtgttatttcaccagttgtgccatgttggactaacaatatcgctaaacaaatgcaattgttggttatgttct

SEQ ID NO: 111663 - DNA, 1995 bp, Zea Mays
gaagagcaagactcaatacacaagcagagctcaaacaattcttgcttcccgctagctagctcgcaagaaataatggctccacttcttcttgcttctcgcacagcctgtcgtcctggccttacaagccgccatgcccatgataatggccggcacggcctgtcttcttcaccaccaggaagtcgtagtaagcgaagccgtagccttagcttgaggccacgagctgaaaagacgacgacaggcggtgggggtcatgttgtgagcgaaaagctgagcccctggcaaatccccaggagggagtggttcccccctagctttatctttggtgctgccacttcagcataccaaattgaaggggcttggaacgaaggtggaaaggggccaagcacttgggacgacttctgccacaaccatccggagtggatagcggacgggagcagtggggatgttggagcaaactcctactatctgtatagggaggacgtcagattgctgaaggaaatgggtatggacgcctacaggttctccatctcttggcccagaatattgccaaaggggacactcgagggaggcattaaccataaaggcatcgagtactacaaaaagctgatcaacttgttgaaagagaacggcatagaaccatatgtgacacttttccactgggacacacctcaagcgctggtggacagctacggtggcttcttagatgataggattgtaaaagactacacagacttcgccaaggtgtgctttgtgcacttcggcgacgtcgtgaagaactggtttaccttcaacgagccacagacattctcctctttttcctacggaaccgggatctgtgccccagggcggtgctccccgggacagaaatgtgctaacccagttgggaactcgctcaccgagccgtacattgttggccacaacctcctccgagctcatgctgagactgtccatcagtacaacaagtactacagaggtaacaaggaaggccacatagggatggcgtttgacgtgatgggtcgtgtgccatatgaaaagatgttcctcgacgaccaggcccaggaaaggtccatcgactacaacctagggtggttcgtggagccggtggtccgtggtgactaccccttctccatgagatcgttggtcaaggatcggttgccctacttcaccgacgaagagaaagagaagctagtggggtcgtatgacataatggggataaactactacacctcgaggttctccaagcacgtcgatatctcgacaggctacacgccggtactcaacaccgacgacgcatatgccacccaggaaacgaaaggacctgacgggaatactattggtccatctatggggaattcgtggatctacatgtaccctaacggcctgaaggacatccttatggtcatgaagaacaaatacgggaacccacctatctacatcactgagaatggaatcggggatattgacagcaaggagaaacctctacccgtaaaagatgcgttgaatgaccacgcaaggctagattacctccagcgccacatctcagtgctcaaagacgcaatagacctgggagcggacgtgcgtggccacttcacctggtctctgctggacaacttcgagtggtgcggcggttacacggagcgttacggcatcgtctacgtggaccgtagcaacggctgcaagcgccgcatgaagcgctcggccaaatggttgaagaaattcaaccgagccgcgcattccaagaagaaagacaagacgggcattattccgccgccgtcggcttattaattaattacaacagtgcgctggcatatgtttttagatatatataatatatataatatacatgtgtggtctgtggtacgtacggtgtacgtatgttgcttgtaaaataaacccacctgtgttgtgggaacgtactaaagtgaaatactcaacggatcggaggcctttggctgtttcctatacataatcacataatcgcaccgattcgtctta

SEQ ID NO: 111664 - DNA, 846 bp, Zea Mays
acatgtttttaccgattaatcgtgattaaacggaaatcggcgggggctggtttttgaggggttaccggtttggtgcgttttcatttccccgccgcctccagatcacgactctgtccttcccaattctcaggcaaccccgtcgtcttccgccatgatccggttcatcctgctgcagaaccggcaggggaaaacacggctggccaagtactatgtcgctctcgaggactccgagaagcacaaggttgagtacgaggtgcatcggctcgtggtcaaccgggaccccaagttcaccaacttcgtcgagttccgcacgcacaaagttatatataggagatatgcaggactttttttctctatatgtgtggacatcaccgacaacgaattggcatacttggaatgtatccatctgtttgttgagatattggaccatttcttcagcaatgtgtgtgaacttgatttagtatttaatttccacaaggtttacttgatattggatgagttcattcttgctggagagcttcaagaaacaagcaaaagggcaattatagagaggatgggcgagcttgagaagctggaatgaaaagaaacaatggtgtagtgtacattagcaatttagcataggtccggagctagttctgcccaatcgacaaattacctccatatttttcacaattctttgtacctgttgtgcatcatctttgcttcacttaaacctttatcaagccgtgaatcggtgtatgtctttttaacgtttcctgaggttactgagggtttttgaactgcatgtgaggattttagtttgatggcaaagcgaaagatccaccgcatgaagaaaggatatgtgtc

SEQ ID NO: 111665 - DNA, 973 bp, Zea Mays
acatgtttttaccgattaatcgtgattaaacggaaatcggcgggggctggtttttgaggggttaccggtttggtgcgttttcatttccccgccgcctccagatcacgactctgtccttcccaattctcaggcaaccccgtcgtcttccgccatgatccggttcatcctgctgcagaaccggcaggggaaaacacggctggccaagtactatgtcgctctcgaggactccgagaagcacaaggttgagtacgaggtgagcctgctggactgctggtggagaagaaagatttgatcttgatgccggattctggttccgtctttgatttgggcggtgctgactccctgttgctgtttcttggccttggttgtggtgaatccaggtgcatcggctcgtggtcaaccgggaccccaagttcaccaacttcgtcgagttccgcacgcacaaagttatatataggagatatgcaggactttttttctctatatgtgtggacatcaccgacaacgaattggcatacttggaatgtatccatctgtttgttgagatattggaccatttcttcagcaatgtgtgtgaacttgatttagtatttaatttccacaaggtttacttgatattggatgagttcattcttgctggagagcttcaagaaacaagcaaaagggcaattatagagaggatgggcgagcttgagaagctggaatgaaaagaaacaatggtgtagtgtacattagcaatttagcataggtccggagctagttctgcccaatcgacaaattacctccatatttttcacaattctttgtacctgttgtgcatcatctttgcttcacttaaacctttatcaagccgtgaatcggtgtatgtctttttaacgtttcctgaggttactgagggtttttgaactgcatgtgaggattttagtttgatggcaaagcgaaagatccaccgcatgaagaaaggatatgtgtc

SEQ ID NO: 111666 - DNA, 643 bp, Zea Mays
atttccccgccgcctccagatcacgactctgtccttcccaattctcaggcaaccccgtcgtcttccgccatgatccggttcatcctgctgcagaaccggcaggggaaaacacggctggccaagtactatgtcgctctcgaggactccgagaagcacaaggttgagtacgaggtgcatcggctcgtggtcaaccgggaccccaagttcaccaacttcgtcgagttccgcacgcacaaagttatatataggagatatgcaggactttttttctctatatgtgtggacatcaccgacaacgaattggcatacttggaatgtatccatctgtttgttgagatattggaccatttcttcagcaatgtgtgtgaacttgatttagtatttaatttccacaaggtaactttatgcttcactaggctaatctagcaatctgcaataattcaatactttttatcttttcacatcttgtatttaaactttaaagagcagtttccaactaaatattctctttatcaacatgttctttggtaaccaaatttgcatatattgagctggtgttagttgttactgtattctggctaagacttaaaaaagactgctggcattgattgtgttaatcatgtactctgcctgtctcaatata

SEQ ID NO: 111667 - DNA, 223 bp, Zea Mays
ctctctctctctcaaacaagcttggattcctgacagtgcaagcaaagcaaagcaagcagagccgaagcttggagtatttctcttgcttcatcccctctcttatttacacaacacatctgagagacatacagcaagctctctccccattggccatatctagctcgtagtctacactgcctctaaaccttgacatttcctttgtattcccctttccaatttgcag

SEQ ID NO: 111668 - DNA, 1729 bp, Zea Mays
tgtgatgcaagcctttgcagagagcagcccctgtatccatcttactaaactcctagcattctagttctactgctgatcttctgcatggccatggtgaggaacccaagagaccttgaaacatactaggagtactagcagtagaggatttaaacctatcttggagtttgcaactggtatcttcttgcaagatcccaaggccaccgtaagatttgttgcagcgtgagacaggagctgcggctgcggaggaagtgagcaaaagcatggatctttccggcacgcagggcgagctgccgatggcaacaatgcacgccggcgggtcgccgtacctggggctgcaccacgggcacccacagcagcacaaccatggcgcgaacggccggcacatgtcgccgccggatgtggtggcggaggaggccaagaaccggcagctggcggtggtgcccgtgggcacaggaggcggaggcggggcaggggtgaggtaccgcgagtgcctgaagaaccacgcggctgccatcggcgggagcgcgacggacgggtgcggcgagttcatgcccgcgggcgaggaggggtcgctggacgcgctccggtgctcggcgtgcgggtgccaccgcaacttccaccgcaaggagccgccgggcggcgacgggcggcagctgtacgggcaccaccaccaccacccgctgagcccgctggccgcggtgcacccccaccatcaccgggggctgctggtggcggcgcttcccccggcgccgacgcgcatggtgatgccgctgagcgccgccatgcaccatcaccagcagccgccgcagcagcaccacagctcggcgtcagcggactccgacgacgcacacgtgccaggggtgcgcgggggggaggtgcagcagcagcagcaggcaccggcacggaagcggttccggaccaagttcaccgcggagcagaaggcccggatgctggggttcgcggaggacgccgggtggcggctgcagaagctggacgaggcggcggtgcagcgcttctgccaggaggtcggcgtgaagcggcgcgtgctcaaggtgtggatgcacaacaacaagcacaccctggcgcggcgcggccacgccgggctccccggcgacccggagctgctggggccgcacgacggccagctcggcatgccgctcccggagccggcggcggagcccgcagctgctgctgcggctgcggctggacttggagtgaccgaccaagccatgtctttcgggactggacgacattgatcaagagagtctaatgctgactgaatcagccttgcggcatagggaagctgttttctttgttaatctgctgctgatctcatcaatctagccgtagctttagctgcattcgcattccactgttccatccatccatcctagctatccatcaaccacaaactgatgatgcggagtctccatggatttctattccttgttgatttctgtagctgctctccccgctcttgactttaattttttagtgctcgagtgactggtggtttgggaggtgagactgaatcactcactcttccgccttatgtgttgttcctttcatttcatcatgctactgtcgttgtggtgtttagtcagccagccagagagtgagtgctacactagtactagtgattgatcaacagctggtaatctgatacgcctggctgccgtgcatgcttagcaggcctgtaaccgaaagaatctactagtaaattatgatc

SEQ ID NO: 111669 - DNA, 356 bp, Zea Mays
tttttttgaagaggccgtttttaactttccagttcaaagtaaaaaagatttcaacaaagaggttagacttaggtcctacgataataggagagaagattggccgaagtgcatgcatggtgaggattgcttcgtgtagatgttcgttgagggtggaattgatggaggccggcgtttctttagatgtccttatgcatatgtaaaaattaatttctagtcctttgttctaaatacgttttttgttcattgaaactaactataaacatttatacaacattcattggtcaaggagaattgtgggttcactcgttgggtagatcctcgtccgatttttcctcatgcggaatacatatcctacc

SEQ ID NO: 111670 - DNA, 967 bp, Zea Mays
cggaggaggagagccatgtccagccccacgcacgcccgcaaggccatccacctggcctccctgcgagccaggctcgcgcagcagggcaaggccggcgtggcgctgcgcctgctcctcgccgccgcgctcgccggcttcctcctcgtcttcgccgcgcgcaccctggtcacgtcgcctgtcccggcatcgccctcgtactcatactcgtcggagccgcagccgcatccgctgccgctgcccgtggcggaggcgctggtgcactacgccacgtccaacgcgacgccgcagcagacggcggaggagatcggggtggcgctgcgcgtgctgcagcggcgcgcgccctgcaacttcctggtgttcggtctgggcctcgacagccccatgtgggcggcgctgaaccacggggggcggaccgtgttcctggaggaggacgcggcgtggatcggcagcgtgcggggcaggcacccggcgctggagtcccaccacgtggcctacgacacggcgctggccgacgccgacgcgctgctagggctccgcgcccacccggcctgcgtcgcgcagcccgacctcgcggcggccgccgccgcgtcctgccgcctcgcgctccggggcctcccgcccgtcttcgccggcctcgactgggacctcgtcatggtggacgcgcccacggggtggacgccccgggcgcccggccgcatgggcgccatctacaccgccggcatggcggcgcgcgcgcgcaggccaggggccggccccacccacgtcttcgtccacgacgtcgaccgccccgtcgaggacgccttctccagggcgttcctgtgcgagggctacctcgccgaacaggtcggacggatcaggcacttcgtcatcccgtcacaccgcgacaaggacggcacgccattctgcccttgacaagagtttgttctgctttggtttggatcccacggtgccaattgccaaactacta

SEQ ID NO: 111671 - DNA, 462 bp, Zea Mays
atggcgactctgacgagagggaagaaacggctggtcgtcgacgtcgatgtcgaggtcgacagtgaggccgaagtggctgccgccttcagtcgattgtccgtgtcaatcgtcgccaagcctacaggcgacggtagcggcaaggagcactccaccggcaaggatgtcacctgcgcggccacatcagttgggaaggagttgaaagatttggtcggagacgagattatggattcaccagatacggccaaagaggtgtcagtgaacttcgcaatgtggcgcgtgtatgagcttgctcagtcacttgagaaggaagcacaacgtttagaagatctcgaagctggtccgtcgccaccattatctgagtatttcaataaccaatttgctgaagatgaagatatgggtggtggggaatgggcactggatgatgtcaattatgaagagattcgggatcgtcagaggaagtag

SEQ ID NO: 111672 - DNA, 711 bp, Zea Mays
atggagcctggcgcgcttctcggatgtcgtggtaacgatccatcgaccttgcctcgtgtacaaagcctggatgtagcccttcctttccccaaccggttcatcctcagctcaatttccctagaccccttgtcgtgtggcaccgccgcgtgccgtggagtgtggaagatgtgctcacgccgccaccgtcgcatgcgacaattcctgccgttcggatcccagggtggggtcgcgaagggccatcaacctgtgtggaatacgtgcgcgcgagcccttgatccgagaacctttggagctcgcgaacagggagcacccgacctcagcgccgcgcgccattcaccgccaccgtcgacatgcgcattcactggcgatgttgcctcggtgggagtcccagatggggcggcaaaccatgtgggagatgtacaggaccattgtcgaccgaaggagtgcgtgctggtgggggaatttctcgtcgtcgcgcagcgacgccatgaacccaccgtgccgcgtggacagcttcacccagcctcccagccatcggtaatgccccttggatcgattcgatacctcctctgtattgtttatcacctagttacggttcgaatcaagtccgggcgcgccaactcatcgcgctgcgatgagctcgccggcgatgctccggttgccctctctctgtcgcaaccgggaggtgggaggcgaaccattgttcgttga

SEQ ID NO: 111673 - DNA, 804 bp, Zea Mays
atgtcaggctcatatggtgaaaatgctaggagaaagccacacacaccatccgctattgttattggtggtgggtttgcaggtcttgctgctgctgatgcgctcagaaatgcatccttccaggttattcttctggaatctcatgatagaattggtggcagagttcacactgactactcttttgggtttccagtcgatttgggagcatcttgtagaacaattgatcacacacaagaagttcagatcagaaaatgcaggctgtcgctactcccgtcaggttctcggattagtcaagggctgaccatggagaagagcacggtggtggtcagtatccctgttgttgtcatggccgagactgctgagatcgactacagctcgagcttctcggtgttcacaatggaggcttacgacctactcggtgatgacgtgtgcagcgcgcagatgtactcggaggccaagctcgcctcagtggcagcaacagtgagtaggagggtggagaaggtggagagggactacctgtcgcacgacaagccaagaactttagagcttttgttctttgtgatggcttcgcaaacagactcatgtgttcttgtagcctgccaggttgtgagagacctcgatgggaagtttgtgttcatcctttataacaccctgtcgaagtccacctttgtcactgttgacattgatggtagcatccctttcttctggggtgttgactccgaaaaccatcttgtgttctctaacgatgccggaatcctcaagacaagatgtgacaacttgtacgtgtcatttccgaaaggaacataa

SEQ ID NO: 111674 - DNA, 2108 bp, Zea Mays
atcgaccaattcatccaatagtggatactttgtctccaagtctcaaaacccaattcgacccacttggaaccggccttgttccccgttggatccagcctaataaaattccccattccaacacacacagatctcgcatcccggcagtggcgacgaatctcgcggggcggaggtggtggcgcgacagaggcggtgtcgactccgacgaactcgcagccaccggtggatacgcaccagcagcaccggcgcactccaccgacgttcatatttaaggacttggtttggatagttctactcgtcaacaaaagtgattaaaaatggtggttcttgcagcttcaatcgtttcaaagtcggggaaagcacttgtttcaagacagtttgttgacatgtctcgcataagaattgaaggattacttgctgcgttcccgaaactggttggaactgggaaacagcacacttatgttgaaactgaaaatgtgcgttatgtttatcaacctattgaaggattatatcttctacttatcacaaacaagcagagcaatattcttgaagatctggacacattgaggcttctctccaagcttgtgcctgaatactccccttccttggatgaggacggtatttgtaaaacagcatttgagattatatttgcttttgatgaagccatctctcttgggaacaaggaaaatgtgacagtgcaacaagttaaacaatattgtgagatggagagccatgaagagaaggcacacaagctgatgatgcaagccaaaatcaacgaaaccaaggatctcatgaagaagagggctaatgaacttgacaaaatgaggatggaaagaggcaagcttgacaaaggaggatactcatcaatatctggtccacgcgtgattgaaaaaacgtttagtgacatgagcatcagtggttctggatttggtagtggttctggattaggtggactgagcactgatatggactcatttgccagcaagcccaaaggtcgtccatctacagcagctactgcacctggtaaaggttttggtatgaaattaggcaagacacagaagacaaatcaattcctcgagtctttgaaagctgaaggagaagtcattttggaggatgtacaaccaagtgcagtttctacaagatcatctgctcttccaccaagtgaccctgtcacagtgaacatagaagagaagctcaatgttgttgttaaaagagatggtggtattagtaactttgatgttcaaggaacacttgctcttcaggttcttaatgatactgatgggttcatccatttgcagattgaaagccaagatatgcctgggcttagcttcaaaacacacccaaatatcaataaggatttgtttaacagtcagcaaattttgggagcaaaagatccaaacaggccctttccgagtggtcaaaatgaaactcctctggtgaaatggagaatccaggggatggatgagtcatctttacctctgtcagtcaattgctggccgtcagtatctggaaatgaaacctatgtgaacattgaatatgaagcttctgagatgtttgatctgcacaacgttgtcatatctatacctctgccagcacttcgggaggctccgagtgttagacagatcgatggagagtggaagttcgactcaagaaactctgtgttggaatggtctattctccttatcgatcagtcgaatcgcagtggttccatggaatttgttgttcccccagctgacccatcatcgtttttccccatctccgttggattttctgcatcgagtactttcagtgatctgaaggttactggaattcttcctctgaaggaaggcaaccctcccaagttttctcagcgggctcgtttgctcactgctaactaccaagttgtttaacgcttgtaccgcgagtgttggtccacttgaatgctccaatagcagatgttattgccgtggacttatgcaagccatggcacgggagattattttgtgtttggaaaatttctttactatgcgcttctcattgttatagcatattgcacaaatgttgttctaatgtattgccaccagagaaataagtaatgttcttgcattttgttggcatgcattttgtacccg

SEQ ID NO: 111675 - DNA, 782 bp, Zea Mays
atggccgccgccgccacaatcatgttcgctgggaagttggccgggagctcggtggcaaatgcaaccatctccttttggatcaacaaagctttcacctgcctgactgactactggaaggctgatggcttggaagatgtcaagggtagggtgctgcagtcagtgaagaaggtccaggttgtatttgatatcgttgaccctgaatacatcaaggaacaaagctctgcccttgatctttggctgtggcagttcagggatgcagttgaggaggcagaggatgttatagatgagcttcactacgatgagcttagagagaaggcaaaggatcataaggtcagtgactggggctcctcttctgctaaactgaagcataagtttgtcaaatccgttaaacatgctggtgtcgtgggtaagactgtgaaagaattttactcaccgtgggcacactcaagaggctgaggaaagtcttggagggattagaaaaggcagccaccgaaattgtggctatcctcacagacacaccacatctcacatacattgggtcatgtagtaaaaggcaggtgaatttttgtgatcaagacgataagaaggagaaacaaaagattgtgcaatggctgattgaggcgccagtggaagcatctgaaattgtgaggagtactcaccatgttcctattctctcgttagttggccatggtggaatggggaagactacattagctcaatatgtatgtgaagaggctgaagttgtcaatgatttcaagatttagtgcaacttccgtgacaag

SEQ ID NO: 111676 - DNA, 2217 bp, Zea Mays
aaaaaatcaaaatccttgcggattcggatgaaattttgggagaacaccatctccattttcctaaacttgctgatttaaagcatcttcgttatgtctatctgcataggatatcacttgagggaatgcgtgggcttgttaaacttcatcacttacagctagttgattgtttgaatgattgtggggaggaactaaggcaagtgatgtgtttggggaacattgatcatctgcgatatgtaaattatgggtcgcgtagaattggtgagtttccaattggtagactcacttcacttcaggagctgcacaactatcgggtacagggaggtgaaggtaacaaaataagtgatatcaagaacctgggtgctcttcgcgaactagatgttttcagcattgagaatgttgaaagtcttgaagaagctgataatgccaagttaaaagaaaaaccatatctcaactctctatctctcatgtggtcagcacgtgctgatgcgaaaaatgggaaagatgatttgattcttgatcatcttgagccacatgcccacattcgaaacctgaatatttctggttattgtggtgcaaggcctcctatttggattgaaaatctccatgtgaagaacctggtgtcacttgagttagcaagatgcatgtattgggaacagctgccttcactcggagaattagaatgtcttaagaaacttttgttggagtgccttcctagcctacaacagattggtcaaccatctcaactttccaacattagctgtattggttcataccttcctccacatcttgacacattgattataagacattgcaaagaactgaagcagatccctatcctaccaccctgcttggttcatttggaaatatgtagggttgggttgaccgaattcccaagtataggcaatatacatggtgagagtatcgaaagcaggccatctaaaatgcagtttgtcagtgttgaagaatgtgaaagtctgaccttacctaaaggaagccctctgttgcaaatacactacatcagaacaatccatgtcctacacattagtgactgtaaagaactggaatctgctcccctgttcgatgaaatgagaaaccttagagagctcagcatcataaattgccctaagctgagggcatcaagcgaaactgaaggcaagaacctgtcaccatcactaaagaatcttataatcaagcagtgtggtgatctagtgcattttcttattaagtcactacatggtctcgttaacctttcagagctggtactagaaaattgccccggccttctatcccttccgtcagctgatgtgttcaagagtctcaagtcgctgaagttcttggaggtaattgggtgtgagaatctttcgtcatttggtggactcagttccctttgttcccttgttacactgaagattagctcctgcagtaagcttgcagctccacctgtactgggtggtgctgcgtctggtcctgctaattatgatgatgatgttatagaagaagagaatatggtgttgcctgttaattccttgcagatcgactatcttgaagttgatctcccatgtgtattgaacattgaacctctcagtagactttgccacaccaaaggattggtaattggaggcgggacacagatggtgagcttgccagagcaatggcttctacagaaccacaaagaactgcagtcactaaaggtgttatgtgccagttcattggagtctctgccaccaagtatgcgagccctgagagcgctcaacttcttcttgttgtcaggagctgggaaacttacatcacttccagacatgccctcctccctacaatggctccatgtcataggctgctgtccagagctggtgacccagattagagtgaaggacaaccctgaatggagaaagatctccacagttcccaaggtgcacatagctgctgccaagactgtccactcttctcctcatacttttcatggtggttattgcttcatgtatggaaaagagtgcagtgaagagacaatatatgaagtaaccaataaccattgaattataagcttgatccactccgtgtaattcaaatatggggtaactattgttgttcttgctaatgtgtttactagattcttcttatacgatagctctggtactttacactctttactatattcttcttgctaatgtgtttactagattgtgcacgatagcatattgaggttgtagctattccttt

SEQ ID NO: 111677 - DNA, 378 bp, Zea Mays
attacatacctccaagatgattatgataagatggtttggtatgtcctaaacaattgttcagaggtcgagccatatataaagatgtataaggaagagttagagaatgaagggattgttaatgtggaaaaaaccattcagaagcacttttcctcctggtttaagaagcatattgcaagtttgtgttttgtcgagggagaagacattgatgatgacctatatgcattggcatgcgaaccggatttgcgagttcgaattttttctgcatgtcttgttgatggtgtccggtaccacatcattgaccgtgagagaaatagaagaacccaaaacagtggagtcatggttgagggcacccataataatgaatgcattgatttttat

SEQ ID NO: 111678 - DNA, 1736 bp, Zea Mays
catttctatgacaaccatcttaataaaaaaaaaaccccaccgaagccgaaaaagaaaaatcctcgccgacgttcctcaccacggcgacggccaccgcgacctcggccccgacgttgcctacggcagccaccatgtcggcgagctccgttgtccccacgctgctgccagatgagcggcccgacatcctctcactgctcgacgccgccgcccgcccgctcgccgacgtcgtcgccgacttccttgctcggttcccccgcgagcgccgcctccgtgtctgcggcgccctctgcttcctcctcgaggacaagatgatgctccatcctactggccggttaattgcatttgcaattcttcatcagagttattcgccgcagacagcaaatccatatattcctatattgttaaatgcagcctgtgatgaaacgtcagagaaatcagaacgggcgtttgtccaactattattgacttcatctagtggaaatagtaataacgaggtcctgaatcagtctgcccttgattacataaatggatctgtttcagcatctcaggtctttttgcctcgggaacaacttgagaagcaatactgcagtactggtgtacattcctcgcctcagactagtagtttcacagctcctgcagttagaagtgctataccagatccagacgtccgtcaaagttgtgcaaattcatcagagtcttcgatatcaccacctggaagcaaacagaaatctgcgtctgatgatagagatactactatttctgttttactcgaagacataccaggggggaggttgggtccgcaatggattcggcccacacccccaagacttcctttatttgatggggagctacaatggctgaaccctgacaataaccacgagctattatgggattatagcatgtgtgctgacacgaatcgaggggctgctatccgagatttgattgcaagagccttaaaaggtccacttgcacctattcaacaggagcaagtcgtagtagaactggcaaaggatcctaaactggtttattattgtgggatgactccacagaagcttcctgatcttgttgaacacaacccactcattgctgttgaggttctttcaaagctaattcactctcctgacatttctggttactttgatgttcttgtgcacatggaaatgagcttgcattctatggaagttgtgaacagactcactactgccgttgaccttccaacagaatttgtccatgagtacatcacaaattgtatccaatcatgtcaaaacataaaggataaatacatgcaaaacagacttgtgagactagtttgtgtttttctgcagagtcttatccgaaacaagattataaacgttcaagaccttttcatcgaggtacaagcgttctgtattgaattttcacggataagggaagcagctggtttgttccggctactcaagtcgttggagtgaaagaattcgtgtgttttttacttgccgtctctgtaccatactgcatcgtgtatgtttctacttacattctctggaccatactgcatcttttttccccctaatctatgtacatcttcattgtcatggttaagtcagatgcctcaagggcattggatgcgaggatcatgtgttgtattgaaaattttccatggaaccatttttggaactttatgggctgattgctactaagatttcgagttgtcaggttgtaccgacttggaaagtttgaagtttgcctgttctggt

SEQ ID NO: 111679 - DNA, 1710 bp, Zea Mays
catttctatgacaaccatcttaataaaaaaaaaaccccaccgaagccgaaaaagaaaaatcctcgccgacgttcctcaccacggcgacggccaccgcgacctcggccccgacgttgcctacggcagccaccatgtcggcgagctccgttgtccccacgctgctgccagatgagcggcccgacatcctctcactgctcgacgccgccgcccgcccgctcgccgacgtcgtcgccgacttccttgctcggttcccccgcgagcgccgcctccgtgtctgcggcgccctctgcttcctcctcgaggacaagatgatgctccatcctactggccggttaattgcatttgcaattcttcatcagagttattcgccgcagacagcaaatccatatattcctatattgttaaatgcagcctgtgatgaaacgtcagagaaatcagaacgggcgtttgtccaactattattgacttcatctagtggaaatagtaataacgaggtcctgaatcagtctgcccttgattacataaatggatctgtttcagcatctcaggtctttttgcctcgggaacaacttgagaagcaatactgcagtactggtgtacattcctcgcctcagactagtagtttcacagctcctgcagttagaagtgctataccagatccagacgtccgtcaaagttgtgcaaattcatcagagtcttcgatatcaccacctggaagcaaacagaaatctgcgtctgatgatagagatactactatttctgttttactcgaagacataccaggggggaggttgggtccgcaatggattcggcccacacccccaagacttcctttatttgatggggagctacaatggctgaaccctgacaataaccacgagctattatgggattatagcatgtgtgctgacacgaatcgaggggctgctatccgagatttgattgcaagagccttaaaagcaagtcgtagtagaactggcaaaggatcctaaactggtttattattgtgggatgactccacagaagcttcctgatcttgttgaacacaacccactcattgctgttgaggttctttcaaagctaattcactctcctgacatttctggttactttgatgttcttgtgcacatggaaatgagcttgcattctatggaagttgtgaacagactcactactgccgttgaccttccaacagaatttgtccatgagtacatcacaaattgtatccaatcatgtcaaaacataaaggataaatacatgcaaaacagacttgtgagactagtttgtgtttttctgcagagtcttatccgaaacaagattataaacgttcaagaccttttcatcgaggtacaagcgttctgtattgaattttcacggataagggaagcagctggtttgttccggctactcaagtcgttggagtgaaagaattcgtgtgttttttacttgccgtctctgtaccatactgcatcgtgtatgtttctacttacattctctggaccatactgcatcttttttccccctaatctatgtacatcttcattgtcatggttaagtcagatgcctcaagggcattggatgcgaggatcatgtgttgtattgaaaattttccatggaaccatttttggaactttatgggctgattgctactaagatttcgagttgtcaggttgtaccgacttggaaagtttgaagtttgcctgttctggt

SEQ ID NO: 111680 - DNA, 2036 bp, Zea Mays
catttctatgacaaccatcttaataaaaaaaaaaccccaccgaagccgaaaaagaaaaatcctcgccgacgttcctcaccacggcgacggccaccgcgacctcggccccgacgttgcctacggcagccaccatgtcggcgagctccgttgtccccacgctgctgccagatgagcggcccgacatcctctcactgctcgacgccgccgcccgcccgctcgccgacgtcgtcgccgacttccttgctcggttcccccgcgagcgccgcctccgtgtctgcggcgccctctgcttcctcctcgaggacaagatgatgctccatcctactggccggttaattgcatttgcaattcttcatcagagttattcgccgcagacagcaaatccatatattcctatattgttaaatgcagcctgtgatgaaacgtcagagaaatcagaacgggcgtttgtccaactattattgacttcatctagtggaaatagtaataacgaggtcctgaatcagtctgcccttgattacataaatggatctgtttcagcatctcaggtctttttgcctcgggaacaacttgagaagcaatactgcagtactggtgtacattcctcgcctcagactagtagtttcacagctcctgcagttagaagtgctataccagatccagacgtccgtcaaagttgtgcaaattcatcagagtcttcgatatcaccacctggaagcaaacagaaatctgcgtctgatgatagagatactactatttctgttttactcgaagacataccaggggggaggttgggtccgcaatggattcggcccacacccccaagacttcctttatttgatggggagctacaatggctgaaccctgacaataaccacgagctattatgggattatagcatgtgtgctgacacgaatcgaggggctgctatccgagatttgattgcaagagccttaaaaggtccacttgcacctattcaacaggagcaagtcgtagtagaactggcaaaggatcctaaactggtttattattgtgggatgactccacagaagcttcctgtatgtgatcttgttgaacacaacccactcattgctgttgaggttctttcaaagctaattcactctcctgacatttctggttactttgatgttcttgtgcacatggaaatgagcttgcattctatggaagttgtgaacagactcactactgccgttgaccttccaacagaatttgtccatgagtacatcacaaattgtatccaatcatgtcaaaacataaaggataaatacatgcaaaacagacttgtgagactagtttgtgtttttctgcagagtcttatccgaaacaagattataaacgttcaagaccttttcatcgaggtacaagcgttctgtattgaattttcacggataagggaagcagctggtttgttccggctactcaagtcgttggagtgaaagaattcgtgtgttttttacttgccgtctctgtaccatactgcatcgtgtatgtttctacttacattctctggaccatactgcatcttttttccccctaatctatgtacatcttcattgtcatggttaagtcagatgcctcaagggcattggatgcgaggatcatgtgttgtattgaaaattttccatggaaccatttttggaactttatgggctgattgctactaagatttcgagttgtcaggttgtaccgacttggaaagtttgaagtttgcctgttctggtagttctgtggccactgcccttgaggagggtgttccggtgtgttacgtgcattgtctttgactcgttgcccttgaaagagtggccaaaacgagtatagcaagagcagaatctcaaattgttggtgcttaagcttgtactgtgtaggctcatttgtgctttggtaggctctttgttttgtaacgtaaacaacgctccaatctatttgatttaccgttcttgtcaagttacatcatgcttgtcggtcattgttggttatatatatgcagacaagatatcaagaaactctatacgttc

SEQ ID NO: 111681 - DNA, 2567 bp, Zea Mays
catttctatgacaaccatcttaataaaaaaaaaaccccaccgaagccgaaaaagaaaaatcctcgccgacgttcctcaccacggcgacggccaccgcgacctcggccccgacgttgcctacggcagccaccatgtcggcgagctccgttgtccccacgctgctgccagatgagcggcccgacatcctctcactgctcgacgccgccgcccgcccgctcgccgacgtcgtcgccgacttccttgctcggttcccccgcgagcgccgcctccgtgtctgcggcgccctctgcttcctcctcgaggacaagatgatgctccatcctactggccggttaattgcatttgcaattcttcatcagagttattcgccgcagacagcaaatccatatattcctatattgttaaatgcagcctgtgatgaaacgtcagagaaatcagaacgggcgtttgtccaactattattgacttcatctagtggaaatagtaataacgaggtcctgaatcagtctgcccttgattacataaatggatctgtttcagcatctcaggtctttttgcctcgggaacaacttgagaagcaatactgcagtactggtgtacattcctcgcctcagactagtagtttcacagctcctgcagttagaagtgctataccagatccagacgtccgtcaaagttgtgcaaattcatcagaaaatctgcgtctgatgatagagatactactatttctgttttactcgaagacataccaggggggaggttgggtccgcaatggattcggcccacacccccaagacttcctttatttgatggggagctacaatggctgaaccctgacaataaccacgagctattatgggattatagcatgtgtgctgacacgaatcgaggggctgctatccgagatttgattgcaagagccttaaaaggtccacttgcacctattcaacaggagcaagtcgtagtagaactggcaaaggatcctaaactggtttattattgtgggatgactccacagaagcttcctgatcttgttgaacacaacccactcattgctgttgaggttctttcaaagctaattcactctcctgacatttctggttactttgatgttcttgtgcacatggaaatgagcttgcattctatggaagttgtgaacagactcactactgccgttgaccttccaacagaatttgtccatgagtacatcacaaattgtatccaatcatgtcaaaacataaaggataaatacatgcaaaacagacttgtgagactagtttgtgtttttctgcagagtcttatccgaaacaagattataaacgttcaagaccttttcatcgaggtacaagcgttctgtattgaattttcacggataagggaagcagctgccagcgagcattctcctttcacaaatgctgagctgctctgcattggttccatggtcgctcagagttgcaccggtgcgaccgacgtggccgtggccgtggcgtctggtttcgatagacaattcaaacacttgaacaccaaataccgcaaactactcaacagctagcatcatgaattggtctcatgttcacagatcaggaaaaagaaaggattcctagacacatgatgagggctcctttgaattgcaagattttttccacttcctgggttgcgttttttctgtgaaaataaactgttctgtaaaaaatcttatatgatttttccgaaattcctacaaaccaacccacccagggcaacaagatcaccgcaaataacttgctcaaagtccgcgaaataaacaaaaattaaaggacgaggaaaaatagctaatcgccggctccgactcgatcgatgcacaagtgtatatatagccagctaaatcagcaaggcagtcctaataatcaccgccggctgaaggctgcgtcatgagtcacgacgaggccgccgcctcggcatcatagccgcggcagcgcgggctctcggcgaagtcgtcgatcgggaacgacgtggcgacggggccgatgtagaagctgagcgtctccccggcgcggtccacctcgccgacgccgagccacaggaacagcaccttcacgctgatcccccgcagcgccgtgagcgagccggcggcgacggacccggacacgcgcgcctcgtagcggaccagccacgtcctcgccagcaggaactcgcaggcccgcgggaagtacacctcgaaggcgccgtccgcgccgagctcgtaccctgtcacgcccgccggcaggatgccccgcgggaagccgtaccgctccagcatctcgtacgccgtcggcgacgtctcggtcgcgttgccgccgcctccggacgcctcggcggctgcttcttctgctacggccgtggccgccagcagcaggagcagcatgagggagtagtagctgctggccatggaggagcagagcagagcaaagtaggtggggggactggctcctccgattattccgagctggctgctagtgtttgcgcttcgcttacttgtcctttggaatctggaatggcttggtgagttgctattggatggatctatgtcgtgctgttcgggtagtgat

SEQ ID NO: 111682 - DNA, 1554 bp, Zea Mays
cgacgttcctcaccacggcgacggccaccgcgacctcggccccgacgttgcctacggcagccaccatgtcggcgagctccgttgtccccacgctgctgccagatgagcggcccgacatcctctcactgctcgacgccgccgcccgcccgctcgccgacgtcgtcgccgacttccttgctcggttcccccgcgagcgccgcctccgtgtctgcggcgccctctgcttcctcctcgaggacaagatgatgctccatcctactggccggttaattgcatttgcaattcttcatcagagttattcgccgcagacagcaaatccatatattcctatattgttaaatgcagcctgtgatgaaacgtcagagaaatcagaacgggcgtttgtccaactattattgacttcatctagtggaaatagtaataacgaggtcctgaatcagtctgcccttgattacataaatggatctgtttcagcatctcaggtctttttgcctcgggaacaacttgagaagcaatactgcagtactggtgtacattcctcgcctcagactagtagtttcacagctcctgcagttagaagtgctataccagatccagacgtccgtcaaagttgtgcaaattcatcagaaaatctgcgtctgatgatagagatactactatttctgttttactcgaagacataccaggggggaggttgggtccgcaatggattcggcccacacccccaagacttcctttatttgatggggagctacaatggctgaaccctgacaataaccacgagctattatgggattatagcatgtgtgctgacacgaatcgaggggctgctatccgagatttgattgcaagagccttaaaagcaagtcgtagtagaactggcaaaggatcctaaactggtttattattgtgggatgactccacagaagcttcctgatcttgttgaacacaacccactcattgctgttgaggttctttcaaagctaattcactctcctgacatttctggttactttgatgttcttgtgcacatggaaatgagcttgcattctatggaagttgtgaacagactcactactgccgttgaccttccaacagaatttgtccatgagtacatcacaaattgtatccaatcatgtcaaaacataaaggataaatacatgcaaaacagacttgtgagactagtttgtgtttttctgcagagtcttatccgaaacaagattataaacgttcaagaccttttcatcgaggtacaagcgttctgtattgaattttcacggataagggaagcagctggtttgttccggctactcaagtcgttggagtgaaagaattcgtgtgttttttacttgccgtctctgtaccatactgcatcgtgtatgtttctacttacattctctggaccatactgcatcttttttccccctaatctatgtacatcttcattgtcatggttaagtcagatgcctcaagggcattggatgcgaggatcatgtgttgtattgaaaattttccatggaaccatttttggaactttatgggctgattgctact

SEQ ID NO: 111683 - DNA, 103 bp, Zea Mays
gtcaaccaaactttttgtggtatgttcctacactatgtaaatctatatgtatcattttgggacaattataacaatgttttcaatagccagtagatttagttcg

SEQ ID NO: 111684 - DNA, 1107 bp, Zea Mays
atggagaggttgggcgtcggcgtcggcgtcggcgagctgccgccggggttccgcttccacccgacggacgaggagctgatcacctactacctcctctgcaaggccgtggacggcggcttctgcggcggccgcgccatcgcggagatcgacctgaacaagtgcgagccatgggagctcccggacaaggcgaagatgggggagaaggagtggtacttctactgcctccgcgaccgcaagtacccgacgggcctgcgcaccaaccgcgccacggcggccggctactggaaggccaccggcaaggaccgcgaggtccgcagcggccgcagcggcgcgctggtgggcatgaagaagacgctcgtcttctaccggggccgcgcccccaggggccagaagacgcgctgggtcatgcacgagtaccgcctcgacggcacctacgcctaccatttccttcccggctctacgagggacgagtgggtgatcgcgagggtgttccagaagccaggcgaggtcccatgcggccgcaagcaccgcctgggcggccccagcgccgccgccggcgagtcctgcttctcggactccaccacctcggcctccatcggcggcggcggcggaggaggagcgtccgcgtcgtctcgcccgctgctcaccgtcacggacacttcctcgccgtcgctgttcgtggccaacgcgaacgccgccgccagcaacaacaacggcaacccggtcaccgggcgagagctcgtgccctgcttctccactaccgccagtcccctggaagccgcggcgctcggcgtcgtcgggcacccgtacaacgcggccccgctgcgtctgggcttggacttcgaggcgccgtccccgggcttcgtcgtcccgaacctgcgttccctgcaagtgcaggacgacggcggcctgccgctgttcctctcggcagcagcaggcggcggcatgtcgtccgcgacgctgggaataatggggtcgctgggcgggtctctccactgcccgccccacgccggcatggatgtcgtcaaggtcgagggccgcgccgcgccgccgcagatggctgtcggccccggcctcctcgatggcgccttcgcctggggcttctag

SEQ ID NO: 111685 - DNA, 1128 bp, Zea Mays
tatttgtctgccgagcgcacatcacaaccagtcaaccacacacaacacaacacaaccgatacgaagaagcttcttgtctagctagccgcgcccgcgcgccatgtcctccatgaagagaagcattgcgtctagcgtcatcgtcgtcctactggtgctctcccttgaagccaccttcgctgacgctgtccgcgtcatacccgacgccccggccggcggcgccatcgtccgccttccgagcgacggcgaaagaggagtgactacttcggcggcggcggcggacgacaagaagcagctccggtggtgcgagcacccaatctgcttccctgagtccgacatctgcttctgcccctacacccgcgccgaccggacgacgacggagagcggccgcggcgccaaggacgagctagtgcatgacagtctcgtagtgccgccgcgcgcaccagcaccaccatgcgagcacccgttctgcatttttatcaggggagagccggtgtgcaggtgcctcgacggaacccggccggcccccagcagcagcgtcgaaatgaggatgatgatgcacgcagacatggagagagccagcagctagcgtgccactgagccactgatgtacgtggttttggtttgtttgttcttggtccagcagtaacagtgatagtgtcgtgaatgagctagcacactgtcgagtctgtcaggatgatgctcattctcagtgtcaggtcgtctgtccgtgtcgagaccgatcgtacttacgtctttgttttggtataataaagcgtcgtgcaaacgagttctgttactatgccagctcgtgatcaatcactagagaagccaacaccagatgattcactggagaaggtgcagccagaagctgatacacgaaccatcgcctgacttgccacagcgtcgggaggcgggtgcaagggttcgacgcaccaactgccgtgagtggtccggactccggagtcggcgtagctgtcgcgtgtgtgtctcggtctctgctgtgtggggtcggctgtcgcgtgtgtgtgccttgctgctgcagtgaagggtttatgtattgtaaagtgtgatctgtgaacggaatgtaaacaaacagataatacaattccagtcgattgctcccctatg

SEQ ID NO: 111686 - DNA, 973 bp, Zea Mays
taagagtcttaaacaatatcataatcaaagtacaacataagtaacatgggcgatctcccacaggaagcacatgtgactccaacggaacctattatagttatccttcgcataatccattcaaccatttgaacactaaacatattccacattcaccaacacaatcacacatcacatgcataaaaccagtacactcttcgcataaatgtctatcgatgcattcctcacaacataatctgcattttaaacttagtcctcacatcaaacaacttggcccacttgggtcgcgcatgttatccatcggctcgagccacaacatcatcaaggggttgcgagcaacgacatacacagttacagatttggtcaaatagtctaatcgaggagcgtgggatagcgaggagcctcaccggggtttgacaatgtcatggccagggctgtgtagatcgaggtggagcacgcaatgtggagatcccacagctattgtgcatgccaaggcatcggcttgggccgagctcaacgaggcggaacgtgcaacacatagaaggtctgtggccgctgctgctcgcgcgtggaggaggtcgagtggcgctctacaacgatcgtcgctggcggacccaacattgggctgggctcagccaaaatgcagagaaggacatgcctagaagctcgtgtcggtcggaggagctgcgtgtgtcggggctaagcgccggcaaggatctcggcgcgcaacctagggcctggcatggccaagctggaaagaagaggatcggttgggggaactcaggctcgggtccaaggcgcctgctcgcttgtgcgcccgtggagggaagcagaggcatgggcgtgtgggagaaagctcgtcgtggagagcgtcgagcggggctgtacagaggcggctttggagtggtggccgaggagggagatgggggcgcacggctggaggagcacggcatggaagaaggtgctgctgcagcca

SEQ ID NO: 111687 - DNA, 689 bp, Zea Mays
atatatatatatactaccgatcgagaagaggaagaggctggctgctacatccatggcgccggcggccatggcggcgaccggcagggcggaggaggcggggcggatgtcgtcgtccatagagtgggagcccaagacgctgaccgtcgaccagatcaagttcgcaagggaggcggcgctgtacgtggtgagcaccaagacggaggaggaggcgatccggatcttcaccgagggcatcaagcccgtgcggacggctgtccgcaagtccacctccaccgactcctcgtcggacgacgacgtggagctcggctgctgctcctcctccaccaaacgctgttgcggcgccgccggcgctcatgctcgacgacgacggcgctccaccgacgacgacgacagggacgacgtcgctacagcgccattctagctcgatcgctagccagatagctgttccctctcctccttagctgatgtggtctagctagtccagactccagagtctactgcgtgcattttcttcttcctttcgaaaacccgccgtcccttcccttacatttgcctgctggcgggctggcggcctgggctatttgaaggatcggagccggcgagtttggcccccgcttttttagcgcggcgaatttttgaggcacatggctctcagtactcctagcatatagaggaggacatatcttgtg

SEQ ID NO: 111688 - DNA, 994 bp, Zea Mays
tttttttgttgttcttattattttattatatcatgccggaatgacgtcgtgctgatgtcatgaatgaggtcatcacgcaaatcacatcgctcggctgtgcgtttctccgtgtcgctgctgggctctagaagctttcatccttccggcttggaactgaaacgcgagctcggcgtaaccacctcccggtagattcgatgcagtatatatctatctctattagcttctcgcctcatctgatcaccagcgctatctttctcatcgcgctcgcgaagccagccgtaacaaacgccgagaccagccgtcctcacccgaacacccctatctctgggtatataaaaagcgagtcctctacacctcctggctcatctaagtccacgtcgaggaaaagaagagagagatcggagcatgcacacagagagagatcgaggagggcaggagggaaccgccgccagggaactctgactcgctgtcgaccgagcttttggggattggtcagggaccctcgcgagcatgtcagggagtcgcttcggcctcaaactggcagatgacatcgtgggctggttgggtggcacggaataaccaccaccggtggccgcgcaagaggccctggacccttcgactgaagcctcgtccgggtaggcatctacctttccttcccttttagttctcgttcttcagtgcgtaatgtcgatccactgcgggttgggtgcccgggaccgccgtgcgaggcttcgccggtgcgtgcgccatttctctgcacggatgcgccgccaccctgtgccggtgtgctcgccgccgtgcgtgggttttgcgccgccgccgtcggtagcatttgggaagaaaggcgcgctaccgtccgatgtccaaggaacgactctgattagatcgcgcttaccggttcgttcagtttacgtgtcgaccgtccgatcgggatcggatggtggctactcgtgctgggactcattaaatcgggaccatcggattgttatctgag

SEQ ID NO: 111689 - DNA, 995 bp, Zea Mays
tttttttgttgttcttattattttattatatcatgccggaatgacgtcgtgctgatgtcatgaatgaggtcatcacgcaaatcacatcgctcggctgtgcgtttctccgtgtcgctgctgggctctagaagctttcatccttccggcttggaactgaaacgcgagctcggcgtaaccacctcccggtagattcgatgcagtatatatctatctctattagcttctcgcctcatctgatcaccagcgctatctttctcatcgcgttcgcgaagccagccgtaacaaacgccgagaccagccgtcctcacccgaacacccctatctctgggtatataaaaagcgagtcctctacacctcctggctcatctaagtccacgtcgaggaaaagaagagagagatcggagcatgcacacagagagagatcgaggagggcacgagggaaccgccgccagggaactctgactcgctgtcgaccgagcttttggggattggtcagggaccctcgcgagcatgtcagggagtcgcttcggcctcaaactagcagatgacatcgtgggctggttgggtggcacggaataaccaccaccggtggccgcgcaagaggccctggacccttcgactaaagcctcgtccgggtaggcatctacctttccttcccttttaggttctcgttcttcagtgcgtaatgtcgatccactgtgggttgggtgcccgggaccgccgtgcgaggcttcgccggtgcgtgcgccatttctctgcacggatgcgccgccaccctgtgccggtgtgctcgccgtcgtgcgtgggttttgcgccgccgccgtcggtagcatttgggaagaaaggcacgctaccgtccgatgtccaaggaacggctctgattagatcgcgcttaccggttcgttcagtttacgtgtcgaccgtccgatcgggatcggatggtggctactcgtgctgggactcattaaatcgggaccatcggattgttatctgag

SEQ ID NO: 111690 - DNA, 543 bp, Zea Mays
atggggaaaaagctgaccatttggatgccacaagtgaagaagtttcgtttggcaagagaggagggtacgagtttgatgaggctgattttttgggtctcgacttctttgagaaaaaaacgttctaaaggtctaccacctgggctggctccagcttttgagcctttacgagatgacgattttcctgaggtggacataatagttggagacccgagcaaattcgacaagtctcctcgccgaactgaaatccaaccggtaaacaacagggagttaggggaagcatctcaatcgactactaaaccaaatgaagctgacaaggctgggatagcacccccttcaactgttattgagacagaagaagatggagatgtttatagacccacagttatatcatggggaatgtttccgaggccacaaaatatttcaaaggcggtaagatatagttgtagcatctcgtattttgtatttgcatctttcttacatgatgtcaaatattatgccatgagcaatgcctccaccagaaatcaatactgcacatatagttag

SEQ ID NO: 111691 - DNA, 1703 bp, Zea Mays
ttagaaacaattgcaatcatcattcacgtatagtatgtacccaaacttttaggtgcacttgccgatgccacctagcaaaaaccgccacataaacaaattcttcggagctatagcgcgcacctacataacgtgctcgccttccgcttcctccgaccgatacatacgccaacccgatgccgacgacgacgagcgcatcgacgacgggggcggcgcagcgccgccggagacgctgcaagggtacaccaccacgccagccatggtgctgctccttaggcctcgacccctccacggtcgccgccaccgccaccgctgccggccggagccccctccccgcaccgccgcaccaggtcgcgccgccgctctcccgccgcatccgctccccgggacgcgtatcccccatcgacgacccgaccttgcctgcctccgtgggttcgtctgttcccgtgcggctgtcgtccgtcaccgaatgcccgcctcctgccctgctgggtccgccgccgggcgctgtggagaagccgagggaaattctgaacctgaggctggtcgacaaaggcgtgatcttggaggtgaatgagttggagagggtgcgcggggagagcgaggtggtgaggaaggttgttggggaactaggcggcgagttgacggtggaagggatggtggaggtggaggccttcagggaagcggtggacatgatgttggaagacggagacgaggccgctgagatgaggcggctcgctcgtggtggtgtcgcgcgagccatcgacgtgctcgaggtatcattgtcactcgtgtttgacagaggggttaagagctgtgtaaggtacctggacgctgttccgtggagcgaatctgaagaggagacaatcaagaggctgatgtctcagcatccttcgtacaatgcagctttgagaaacctgctggcggcgaggctgcagcccgccgagaggcctgcctcgtcggcagaagcagaactggtcgttgaactggccgactccatcacgaaggggaccaacaacaacgcccggaaagagctgcggaacctagtcaacgggatcctgtccaagtcatccgtctacgtaaagcagggtgacaaagagctggaccggaggagcatctaccgcatctgccattcgtgcctgaactctctggcgcgattgctgggaggagaatccccggggccggatcagacgtccttgccatcagttggaagaggaggagtaccgccacctgagactgagagcatctacaggctagtcgaggacatcaactggctgctgcagattctgatcgacaggcagatgggggaggagttcgtcgagctgtgggccgaccaaacgagcctcagcggcgtgcacggacgggcgtcgccgatggtgcgccacgagctgagccggatctcggccacggtcttcatcgccatggggagcggcaggctccagtgcgccggagccagacggttcggcgtcttccaggcctggttcaggccgatgctggcggacttcagttggctccggaggtaccccaagggcctgaacgtgacggccctggaggaagggatcgggcaggcgctgctgacgctcacgctggagcagcagcaggcgctgttcttggagtggttcggggctttcggcagccacggccgggagtgcccggacctgatgagagccttccaggtctggtggcggcggtcgttcgtgagatga

SEQ ID NO: 111692 - DNA, 1763 bp, Zea Mays
ttagaaacaattgcaatcatcattcacgtatagtatgtacccaaacttttaggtgcacttgccgatgccacctagcaaaaaccgccacataaacaaattcttcggagctatagcgcgcacctacataacgtgctcgccttccgcttcctccgaccgatacatacgccaacccgatgccgacgacgacgagcgcatcgacgacgggggcggcgcagcgccgccggagacgctgcaagggtacaccaccacgccagccatggtgctgctccttaggcctcgacccctccacggtcgccgccaccgccaccgctgccggccggagccccctccccgcaccgccgcaccaggtcgcgccgccgctctcccgccgcatccgctccccgggacgcgtatcccccatcgacgacccgaccttgcctgcctccgtgggttcgtctgttcccgtgcggctgtcgtccgtcaccgaatgcccgcctcctgccctgctgggtccgccgccgggcgctgtggagaagccgagggaaattctgaacctgaggctggtcgacaaaggcgtgatcttggaggtgaatgagttggagagggtgcgcggggagagcgaggtggtgaggaaggttgttggggaactaggcggcgagttgacggtggaagggatggtggaggtggaggccttcagggaagcggtggacatgatgttggaagacggagacgaggccgctgagatgaggcggctcgctcgtggtggtgtcgcgcgagccatcgacgtgctcgagtggttttatgctaactctattctcaacatgtttgacttgacgagtaaacaaatttctcaggtatcattgtcactcgtgtttgacagaggggttaagagctgtgtaaggtacctggacgctgttccgtggagcgaatctgaagaggagacaatcaagaggctgatgtctcagcatccttcgtacaatgcagctttgagaaacctgctggcggcgaggctgcagcccgccgagaggcctgcctcgtcggcagaagcagaactggtcgttgaactggccgactccatcacgaaggggaccaacaacaacgcccggaaagagctgcggaacctagtcaacgggatcctgtccaagtcatccgtctacgtaaagcagggtgacaaagagctggaccggaggagcatctaccgcatctgccattcgtgcctgaactctctggcgcgattgctgggaggagaatccccggggccggatcagacgtccttgccatcagttggaagaggaggagtaccgccacctgagactgagagcatctacaggctagtcgaggacatcaactggctgctgcagattctgatcgacaggcagatgggggaggagttcgtcgagctgtgggccgaccaaacgagcctcagcggcgtgcacggacgggcgtcgccgatggtgcgccacgagctgagccggatctcggccacggtcttcatcgccatggggagcggcaggctccagtgcgccggagccagacggttcggcgtcttccaggcctggttcaggccgatgctggcggacttcagttggctccggaggtaccccaagggcctgaacgtgacggccctggaggaagggatcgggcaggcgctgctgacgctcacgctggagcagcagcaggcgctgttcttggagtggttcggggctttcggcagccacggccgggagtgcccggacctgatgagagccttccaggtctggtggcggcggtcgttcgtgagatga

SEQ ID NO: 111693 - DNA, 2368 bp, Zea Mays
ggctccatgtttggtcgtctacaccaggcagcagagcagattcgcccctgctgaaaacgcactcgatggcgtccgcgacgggggtttcctcctcggagatggcggtggaccacgcgacggggccgggcgccgtggagaagccgcggttcgatgctctgacgccgaatgagatgagcggcgggaggccccaattccggaaagtgcccatgccgcagcaccggttcgcgccgctcaagcgatgctggatggaaatctacaaacccgtatacgagcacatgaagatcgatatacgcatgaacctcaaggtactggactggagtctacccatattgggctttcttgttttatgtgaatgagcttttcgtgctctattccttgcaagaaccatagattgtatacttcagatcgccgtcaagaagctcaacccggagagcgtccagggcctgcagagtggcaggataacatggagaacttcaaccctttcggtgagaatggagagtagggtacagggtcaccatagaatgttctgggctcttcagtactcctgtactaacaacgttgtttgaaatgataaagaaagttaaagtacattcaacgtgatccttccatgcgatgttaacttagatgacataatttcagggtacatacctaacagctgccctgcccttagtgacgcaagagaaaatgattgcttgagggtccaactttagggagcttcaatgtgagttttgtggaatgttcgctagcacacagggttctgagatagtatgttatttgcttcaaagttttgctgctgattagacatatggagcttcttctttggacgggatagagtgtattttgtagtcaccctatgcttacaattgtcttcggtccatcacattgaattgtcgttcaagattctgccaggataaacagtggccctgcattttttaactataataataatgttggtagggataccaatggtgctcctctgttaatggtgcttattgccatattgtcatattggaggaagggcttattgtcatattgaaggaagggcttgaagctcaatggaagtgataatagattctgcaaatgctcctcaataggttccagttagtcatctggtattcatagttcatggcattagacagaggctggagaaagctaatcttgttgatgttgtcaattttccatcgtgtaaccgtgttcaagggcatattatcaggcggggtcgagatcggcattgtctccactgtcatatcgtcgagcaaagactggtccaggagcgcagaaacatgcttcaagaaaaaggtttatggctagcaacatcttgttcgattacttcctgtgatgttttaatccataaaatacagataggggttacactgttcagtttggttacttcgattttgggactgcttgcgatcttctgtagtgtttattcttgttcgattacttcgattctaggactgtgattttagttcgattacttcgattctgggattaccaaaatacagataggggttacactgtttacttcgattctaggactgccaaatgtctctactgtttgaaggcggtgtttattcttgtttattatttactagatgtctctgtatgcttgattatgcaagtagattattcaggtagtacatacatttttagttgtatttattcttgtttctattcggtgcttcattcaagtctgcaactttccaatgtctctgtgtgcttgatagcatattatcctatattcttgcgcaagaatctttttggacgcacaagtagttctatagagtttactacatcctttgatgttttaatccatgaaatacaaacttgtatctatctgttttggactgcgttccagagaaagaaatgtagtttagttatgtggttttacagacctatatctatttgtgtaatgcatttgcctgtatatgtgcagcttatgtccataattcttcaagtctgcatatgactgcatcattcttcagccttctagactccttccacttctgccccctcggatacaaggacttcccagacttaggtaacacaacctcttctcttctttcaacatgttgtcatgtggtgctcgagttatggtacaactggagttgggtgaaagcgacatggagccttgaagtggagagttgagctcatgaagcaggacaagagagccaaggtgttgtgccttcatggcttctgcacgagtgagagttttttgaagagtagatcaacaactggcactcttccactcgttatggatatgggtattgcgatgaggcctcatgagctatttgaaaacatttatgtatagttgtatactaatttatgttttatagttgaggctatctaatatattgaaatgtctgaa

SEQ ID NO: 111694 - DNA, 258 bp, Zea Mays
caggaggtctctgacaataactgtgtctatcggaacgaggtgcaccacactgctggggaacgaacccaggtcttgcaggatgtagcttctgatccaactcttcccagaaccaagactgtccgctgcaatctctgtgggcatggagaggttgttttcttccaggccgcggcaagaggggaggaggggatgaccctgttctttgtgtgctgcagccctgattgtggttatcggtggagggaatgatgcgatgaaatcttc

SEQ ID NO: 111695 - DNA, 4955 bp, Zea Mays
aggattttctactgctctgctgactgctactgccttctctccccttcctttcgttcgcttcccttcccttcccttcctccggtagctcccgctcccgctttcctcctcctcctcctcctgctcgcggggaagtccagcggagtcgccctcgccggagtgcggcccggcccggcccggcggcgccacctcggcgccggaggaggcacgtttgcgcgcccgccgcggagggtcgaggcccggatcgacgtggcgcggaggcgggctgtaatccccgcggtggctgctctgcttctggagacgcggggcgcgctgtggacctcccgtgcgcgcttcggttctgaccaacccgcgcctgctttccttgcccctcggccctcgggctcggccggcctctgctcggtgctgcagtactgcactgcaactcgcccagtcagtcgctcgctcgcttccgctgggattccaggacggaaggtggcgtgtggaggcgcgcgcgtttcgcccggctccggttttctgccgggcgccggagtcgctcgcagcctcgcctagatttgccgcgcgccgcggcggatgttccccgacgcgcggcggatctcggcggtttttgctgcggcgcggagtgaagcgtgaaggtacggtccccgactggatttcggggagatggtgccgtcggggcagcccaacccgatgggccctggacagcaggtgggcgcgtcgctgctccggacgacctccagcctcctcggcggcgcaggcggcgaccagccggggatggggatggtcggcgccggcggggtgctgccctcgcagtcgtcgcccttctcgtcccttgtctcgccgcgcacgcagtatggtggcggcagtgggaacggcttgctggccggcgcgtccagtgtcgcgtccatgctcagcaggcagcactcgtatgggaatggggggactggggcaatgccgggcagcggcgccggtctccccatcggtgggctgcagcacagaggcggccttgatggtgttggtgatttggttggcactggagggcccgattccatggtgttctcctcctcctcctccgcccctggtagtttcggcaatcagcttggtgccgacggcttacaacagcagcagatgcagctggatgcaccacacgattcacaaaatcaacagcagcagcaacagcaaatgccaatgacatataatcagcagcatatgatgccacaaactcagcagcagcagcagcctgcagtgaagctggagaatggaggcgtcctgggtggggtcaaactggagcagcagatggggcagccggatcagagtgtttccacacagatgcaacgcagttcgagtggcggtgtgaagcttgagccgcagttgcaagcgctgaggagcttgggtgctgtcaagatggagcaccaaagctccgatccatctgtggtcctgcagcaacagcagcatcaacagcaacgacatatgttgcagctgtctaagcagaacccccaggctgcagctactcagctgagcctcctacaacagcagcagctgttcttgcaactgcagcagcaacagcaacaacatcaacaacaacagcagattctcaagaacctgcctttgcagagaaaccaattgcagcagcagcaacagcagcaacaacaacagcaacatcagcaccagcagttgcttcgtcaacaaagtctaaatatgcgggctggtaaaacacctgcttatgaaccagggacctgtgcaaagagattgacacattacatgtatcaccagcaaaacaggccacaggacaataacatcgagtactggaggaactttgtcaatgaatactttgccccgagtgccaagaagaggtggtgcgtatctctgtatggcaatggccgtcaaactaccggagttttccctcaggatgtttggcattgtgagatatgcagtaggaagccagggcgaggttttgaaacgacagttgaggtcttgccacggttgtgccaaatcaaatatgccagtggtacacttgaggaacttctgtatgttgatatgccgaaagagtcccagaattcatctggacagattgttttggactataccaaagcgatccaggagagtgtctttgagcaactgcgtgtagttcgtgaggggcatctaagaattgtattcaaccaagaccttaagattgcatcgtgggagttctgtgctcggcgtcatgaggaacttattcctcggagatcaatcattccacaggtcagtcaacttggtgctgtggtgcaaaagtaccagtcttccgttcaaagttcagcgtcactctcaagtcaggacttgcaaaacaattgtaactcgtttgtggcatgtgctcgtcagttggctaaggcactggaagtgccattggtaaatgatttaggatacacgaaaagatatgtccgctgcctccagattgcagaggtggtcaattgtatgaaagatttgatcgatcacagcaggcagactgggtctggtccaatagagagcttgcataagttccctaggagggggaattcaggggttagttctgttcaagtccagcaggagtctgaggggcagaaacctgtcccacagaattctaaccagagtggccaaaattctgctcctgcaactggaatggaagcctctgcctccggcaatggtgatgctacgtcaaacaattcactcaattgtgcaccatgtacttccgcaccatcttcttcatctgttgttggtctcctccaaggctcagtaagttacagacaagaccatccaacaagcagtggcaatggtatctataatggcggaaacagtggtccagctgccaaggccaactcaacgaactccatgcaatcaaatggaccggcatcgtttcccttgccagcaccctcagcatcaaatggcaatatgatgcctgctccccagcactctagccaaatgaattcgccgaccatgccatcaagcctacctcctatgcaaacgcctgcaagtcggcctcaagaacccgagccaaacgagcctcaaagctcagtccagaggatactgcaagacctgatgatgcagtcccatattaacagcgttgggccagtgggaagcaatatgaagacagcaaacacggttggtcttaacggtgccaactccttagctggcaatcccatgacaaatagccctggaatcatcaacggaatgggattcggggctatgggtggccttggtcagcagatgagaacagcaatggggaacaacgcgttggcgatgaatggaagggccggcaccatgaatcacagcgcgcatgacctggcacagctgagccaccagcagcagcaacagcgagatttaggaaaccaattgctcgggggccttagggctgccaacagtttcaatagcctccagtacgactggaagtcgtctcagtagagtgagcaggagccagagagctcgcacctgatatttatactcgttgggtccatcactgacagcataaacgttacatccctcagaagcggcgggttcttatgttacagcaaaaaggaaacattagcaatgttacgacaagtgtctgtatggctgtgttcctttgtaatccgcaaataggaggaccgtacccaacccattgggggttgggggcaagtgtcggcggattccaaactggggggaagatcagagcgtctttcccctgttttttttcgggttggatgacgatgatttctctcttgcagtctgtgtaccatggctcaccgtactcttgtgtaccttttgatggccaagaatctcactgtagctgtgctatactatgtataagctgttatttactagtggaaagcatgaggaaaagtttctgaatcttggatgacgacccatctgtgtaactgtttttcttttcttttctgatgaatgttcactagtattaattaatatgtacacagatgaattaatacacacagatgcattaatatatatatatatatatatatatatatatatatatatatatatatatatactgaatcgaaatcgtgaactgaaactaattaatgtactctggattcgacatggaggtatggtatatataacacagcagtagcagacggctggctgcttgaattgatcatatcccgtatgcaaaggctactagagatacacatatgtgtttagtcgtcgatgcatgtatgcatggcatggcatggcatgctcatgaactaccgatgtacttgtcgatgagggtggtgagcgtggacttcgggacggcgccgatgacgctctccttcttctcgccgcccttgaagatgagcacggtggggatgctgcggatgccgtaggtagacgccacgttggggctgtcgtccgtgttcaccttgcagcacgtgatcttgccggcgtagtccttggccagctcgtcgatcaccggcgcgatcatccggcacggcccgcaccacggcgcccagaactccaccagcaccggcgtctcgcacgccatcaccaacccgtcccagttcttctcgtccgccaccacaactgccccgacaagcatatatcgccgagggtcatcgtcagtcagttcacttcatatatacatatatattggcagctagcaactgtgtatccaattattacctttcgtccactgcgttcttggactggcagacgtgccgcggccggcgcgtggcgacgcgggcccacggacagcggcgcgagcgcccgcttcgacggcagcaccaggttgccgacgaggagcctgtcctttgctgcccagcgggggcgtgcagcgcccacgctctgaagcacgtctccatggccattgttgtctctggtggacgaacgtgactagtgatgactagctaggtgggtgagtgaatggccggggcgtaggaggggataggatttgtttccctgccagatatttgggagcagcaacgtgaggtgggcagggccttcgtctctgcgtgtggatgaggtgtttt

SEQ ID NO: 111696 - DNA, 3292 bp, Zea Mays
gctcgcggggaagtccagcggagtcgccctcgccggagtgcggcccggcccggcccggcggcgccacctcggcgccggaggaggcacgtttgcgcgcccgccgcggagggtcgaggcccggatcgacgtggcgcggaggcgggctgtaatccccgcggtggctgctctgcttctggagacgcggggcgcgctgtggacctcccgtgcgcgcttcggttctgaccaacccgcgcctgctttccttgcccctcggccctcgggctcggccggcctctgctcggtgctgcagtactgcactgcaactcgcccagtcagtcgctcgctcgcttccgctgggattccaggacggaaggtggcgtgtggaggcgcgcgcgtttcgcccggctccggttttctgccgggcgccggagtcgctcgcagcctcgcctagatttgccgcgcgccgcggcggatgttccccgacgcgcggcggatctcggcggtttttgctgcggcgcggagtgaagcgtgaaggtacggtccccgactggatttcggggagatggtgccgtcggggcagcccaacccgatgggccctggacagcaggtgggcgcgtcgctgctccggacgacctccagcctcctcggcggcgcaggcggcgaccagccggggatggggatggtcggcgccggcggggtgctgccctcgcagtcgtcgcccttctcgtcccttgtctcgccgcgcacgcagtatggtggcggcagtgggaacggcttgctggccggcgcgtccagtgtcgcgtccatgctcagcaggcagcactcgtatgggaatggggggactggggcaatgccgggcagcggcgccggtctccccatcggtgggctgcagcacagaggcggccttgatggtgttggtgatttggttggcactggagggcccgattccatggtgttctcctcctcctcctccgcccctggtagtttcggcaatcagcttggtgccgacggcttacaacagcagcagatgcagctggatgcaccacacgattcacaaaatcaacagcagcagcaacagcaaatgccaatgacatataatcagcagcatatgatgccacaaactcagcagcagcagcagcctgcagtgaagctggagaatggaggcgtcctgggtggggtcaaactggagcagcagatggggcagccggatcagagtgtttccacacagatgcaacgcagttcgagtggcggtgtgaagcttgagccgcagttgcaagcgctgaggagcttgggtgctgtcaagatggagcaccaaagctccgatccatctgtggtcctgcagcaacagcagcatcaacagcaacgacatatgttgcagctgtctaagcagaacccccaggctgcagctactcagctgagcctcctacaacagcagcagctgttcttgcaactgcagcagcaacagcaacaacatcaacaacaacagcagattctcaagaacctgcctttgcagagaaaccaattgcagcagcagcaacagcagcaacaacaacagcaacatcagcaccagcagttgcttcgtcaacaaagtctaaatatgcgggctggtaaaacacctgcttatgaaccagggacctgtgcaaagagattgacacattacatgtatcaccagcaaaacaggccacaggacaataacatcgagtactggaggaactttgtcaatgaatactttgccccgagtgccaagaagaggtggtgcgtatctctgtatggcaatggccgtcaaactaccggagttttccctcaggatgtttggcattgtgagatatgcagtaggaagccagggcgaggttttgaaacgacagttgaggtcttgccacggttgtgccaaatcaaatatgccagtggtacacttgaggaacttctgtatgttgatatgccgaaagagtcccagaattcatctggacagattgttttggactataccaaagcgatccaggagagtgtctttgagcaactgcgtgtagttcgtgaggggcatctaagaattgtattcaaccaagaccttaagattgcatcgtgggagttctgtgctcggcgtcatgaggaacttattcctcggagatcaatcattccacaggtcagtcaacttggtgctgtggtgcaaaagtaccagtcttccgttcaaagttcagcgtcactctcaagtcaggacttgcaaaacaattgtaactcgtttgtggcatgtgctcgtcagttggctaaggcactggaagtgccattggtaaatgatttaggatacacgaaaagatatgtccgctgcctccagattgcagaggtggtcaattgtatgaaagatttgatcgatcacagcaggcagactgggtctggtccaatagagagcttgcataagttccctaggagggggaattcaggggttagttctgttcaagtccagcaggagtctgaggggcagaaacctgtcccacagaattctaaccagagtggccaaaattctgctcctgcaactggaatggaagcctctgcctccggcaatggtgatgctacgtcaaacaattcactcaattgtgcaccatgtacttccgcaccatcttcttcatctgttgttggtctcctccaaggctcagtaagttacagacaagaccatccaacaagcagtggcaatggtatctataatggcggaaacagtggtccagctgccaaggccaactcaacgaactccatgcaatcaaatggaccggcatcgtttcccttgccagcaccctcagcatcaaatggcaatatgatgcctgctccccagcactctagccaaatgaattcgccgaccatgccatcaagcctacctcctatgcaaacgcctgcaagtcggcctcaagaacccgagccaaacgagcctcaaagctcagtccagaggatactgcaagacctgatgatgcagtcccatattaacagcgttgggccagtgggaagcaatatgaagacagcaaacacggttggtcttaacggtgccaactccttagctggcaatcccatgacaaatagccctggaatcatcaacggaatgggattcggggctatgggtggccttggtcagcagatgagaacagcaatggggaacaacgcgttggcgatgaatggaagggccggcaccatgaatcacagcgcgcatgacctggcacagctgagccaccagcagcagcaacagcgagatttaggaaaccaattgctcgggggccttagggctgccaacagtttcaatagcctccagtacgactggaagtcgtctcagtag

SEQ ID NO: 111697 - DNA, 3507 bp, Zea Mays
ggcccggcccggcccggcggcgccacctcggcgccggaggaggcacgtttgcgcgcccgccgcggagggtcgaggcccggatcgacgtggcgcggaggcgggctgtaatccccgcggtggctgctctgcttctggagacgcggggcgcgctgtggacctcccgtgcgcgcttcggttctgaccaacccgcgcctgctttccttgcccctcggccctcggatggtgccgtcggggcagcccaacccgatgggccctggacagcaggtgggcgcgtcgctgctccggacgacctccagcctcctcggcggcgcaggcggcgaccagccggggatggggatggtcggcgccggcggggtgctgccctcgcagtcgtcgcccttctcgtcccttgtctcgccgcgcacgcagtatggtggcggcagtgggaacggcttgctggccggcgcgtccagtgtcgcgtccatgctcagcaggcagcactcgtatgggaatggggggactggggcaatgccgggcagcggcgccggtctccccatcggtgggctgcagcacagaggcggccttgatggtgttggtgatttggttggcactggagggcccgattccatggtgttctcctcctcctcctccgcccctggtagtttcggcaatcagcttggtgccgacggcttacaacagcagcagatgcagctggatgcaccacacgattcacaaaatcaacagcagcagcaacagcaaatgccaatgacatataatcagcagcatatgatgccacaaactcagcagcagcagcagcctgcagtgaagctggagaatggaggcgtcctgggtggggtcaaactggagcagcagatggggcagccggatcagagtgtttccacacagatgcaacgcagttcgagtggcggtgtgaagcttgagccgcagttgcaagcgctgaggagcttgggtgctgtcaagatggagcaccaaagctccgatccatctgtggtcctgcagcaacagcagcatcaacagcaacgacatatgttgcagctgtctaagcagaacccccaggctgcagctactcagctgagcctcctacaacagcagcagctgttcttgcaactgcagcagcaacagcaacaacatcaacaacaacagcagattctcaagaacctgcctttgcagagaaaccaattgcagcagcagcaacagcagcaacaacaacagcaacatcagcaccagcagttgcttcgtcaacaaagtctaaatatgcgggctggtaaaacacctgcttatgaaccagggacctgtgcaaagagattgacacattacatgtatcaccagcaaaacaggccacaggacaataacatcgagtactggaggaactttgtcaatgaatactttgccccgagtgccaagaagaggtggtgcgtatctctgtatggcaatggccgtcaaactaccggagttttccctcaggatgtttggcattgtgagatatgcagtaggaagccagggcgaggttttgaaacgacagttgaggtcttgccacggttgtgccaaatcaaatatgccagtggtacacttgaggaacttctgtatgttgatatgccgaaagagtcccagaattcatctggacagattgttttggactataccaaagcgatccaggagagtgtctttgagcaactgcgtgtagttcgtgaggggcatctaagaattgtattcaaccaagaccttaagattgcatcgtgggagttctgtgctcggcgtcatgaggaacttattcctcggagatcaatcattccacaggtcagtcaacttggtgctgtggtgcaaaagtaccagtcttccgttcaaagttcagcgtcactctcaagtcaggacttgcaaaacaattgtaactcgtttgtggcatgtgctcgtcagttggctaaggcactggaagtgccattggtaaatgatttaggatacacgaaaagatatgtccgctgcctccagattgcagaggtggtcaattgtatgaaagatttgatcgatcacagcaggcagactgggtctggtccaatagagagcttgcataagttccctaggagggggaattcaggggttagttctgttcaagtccagcaggagtctgaggggcagaaacctgtcccacagaattctaaccagagtggccaaaattctgctcctgcaactggaatggaagcctctgcctccggcaatggtgatgctacgtcaaacaattcactcaattgtgcaccatgtacttccgcaccatcttcttcatctgttgttggtctcctccaaggctcagtaagttacagacaagaccatccaacaagcagtggcaatggtatctataatggcggaaacagtggtccagctgccaaggccaactcaacgaactccatgcaatcaaatggaccggcatcgtttcccttgccagcaccctcagcatcaaatggcaatatgatgcctgctccccagcactctagccaaatgaattcgccgaccatgccatcaagcctacctcctatgcaaacgcctgcaagtcggcctcaagaacccgagccaaacgagcctcaaagctcagtccagaggatactgcaagacctgatgatgcagtcccatattaacagcgttgggccagtgggaagcaatatgaagacagcaaacacggttggtcttaacggtgccaactccttagctggcaatcccatgacaaatagccctggaatcatcaacggaatgggattcggggctatgggtggccttggtcagcagatgagaacagcaatggggaacaacgcgttggcgatgaatggaagggccggcaccatgaatcacagcgcgcatgacctggcacagctgagccaccagcagcagcaacagcgagatttaggaaaccaattgctcgggggccttagggctgccaacagtttcaatagcctccagtacgactggaagtcgtctcagtagagtgagcaggagccagagagctcgcacctgatatttatactcgttgggtccatcactgacagcataaacgttacatccctcagaagcggcgggttcttatgttacagcaaaaaggaaacattagcaatgttacgacaagtgtctgtatggctgtgttcctttgtaatccgcaaataggaggaccgtacccaacccattgggggttgggggcaagtgtcggcggattccaaactggggggaagatcagagcgtctttcccctgttttttttcgggttggatgacgatgatttctctcttgcagtctgtgtaccatggctcaccgtactcttgtgtaccttttgatggccaagaatctcactgtagctgtgctatactatgtataagctgttatttactagtggaaagcatgaggaaaagtttctgaatcttggatgacgacccatctgtgtaactgtttttcttttcttttctgatgaatgttcactagtattaattaatatgtacacagatgaattaatacacacagatgcattaat

SEQ ID NO: 111698 - DNA, 967 bp, Zea Mays
atatatatactgaatcgaaatcgtgaactgaaactaattaatgtactctggattcgacatggaggtatggtatatataacacagcagtagcagacggctggctgcttgaattgatcatatcccgtatgcaaaggctactagagatacacatatgtgtttagtcgtcgatgcatgtatgcatggcatggcatggcatgctcatgaactaccgatgtacttgtcgatgagggtggtgagcgtggacttcgggacggcgccgatgacgctctccttcttctcgccgcccttgaagatgagcacggtggggatgctgcggatgccgtaggtagacgccacgttggggctgtcgtccgtgttcaccttgcagcacgtgatcttgccggcgtagtccttggccagctcgtcgatcaccggcgcgatcatccggcacggcccgcaccacggcgcccagaactccaccagcaccggcgtctcgcacgccatcaccaacccgtcccagttcttctcgtccgccaccacaactgccccgacaagcatatatcgccgagggtcatcgtcagtcagttcacttcatatatacatatatattggcagctagcaactgtgtatccaattattacctttcgtccactgcgttcttggactggcagacgtgccgcggccggcgcgtggcgacgcgggcccacggacagcggcgcgagcgcccgcttcgacggcagcaccaggttgccgacgaggagcctgtcctttgctgcccagcgggggcgtgcagcgcccacgctctgaagcacgtctccatggccattgttgtctctggtggacgaacgtgactagtgatgactagctaggtgggtgagtgaatggccggggcgtaggaggggataggatttgtttccctgccagatatttgggagcagcaacgtgaggtgggcagggccttcgtctctgcgtgtggatgaggtgtttt

SEQ ID NO: 111699 - DNA, 1254 bp, Zea Mays
atgggcactaaaagcactcagcatactgcatgtcatacctgcaacattggtggcctcagtggtaccttttcactcacgggcactcttgttatggatcagataggatacaatgctggtcgcacaccattcacagacatctcaaacaccatcattacaggtaatcaaaatgaatcgaactcgcttggaccaattgtcgatgctaaggaacgtaagaggcaaagggatagggaaagatatgttgcgatgactgttgaagaaaagaatgagaaaaataggaagcgtcgtgaagcacgtcaacgaaataaaggactatcgatggagccactctcatctagagccttttgtaaatgggtgacatatgaagaagacgttaatacggaccaggcatgtgaggtggttagctttccagatgactctagcaccattgatttcacaaatttgtcaacacaagacattgcaggtggagacgaacaagtaaatctagatgcatatgatgacagcaattggttgcataggaatgagacattccaggcaaacaacattgccgcaagtaaagaccttctgacaccaggttgtgtgcatgaaactgttgataacatacctaagcatactatgaaaagggccgcctactttagtgagcggtacaaaaacatgactcccatcgagagggagtctagacgtgtacgccttaggttgtataataagacaccaagacggaaagatgctaacaaagagtgcagcagaaaacgtagagcactgcagggtgacactttgaatcaggagtccatcgccatggagaacccattatatacccctaaggttgtacgtcctacaacatatggaattgaaccatatggatcctcagttaccacttgtgactgggttatccctgaattcgtcatgacatctttcctgccaacttcaacacagactaaggatgttggttcactcgatatgtctactgagccactaagacgtagacatcatgtgctatctgagacacgaccagctaccttaggccgtcgaaaccaacaatttgaagccggcattgcaaggaacgtggctacagtgaccgaggatactatttgtgacgctatggaagaagacgattggacacaaccccatctgaatgcagagatccacaacaatggtgatgatgatgagggtgtcatattcgaagaggatgaggatgatgatgagaacgatggatacctattcgttgggcaatgtgtgtacctcatttttttattatga

SEQ ID NO: 111700 - DNA, 1307 bp, Zea Mays
ctgttgtagagttaccttcggactccaggccctcatccgcccctcctccccaaacgaaatgctatatttgcagaaaggtcccaatccaagtccaacaaccgaaaagaagacgacactcggagggctttcctgtaagtttcgagggcggcgaagcactagggcatccacctcggcggtggcggcggcggcctccatgtcgggcagcaacgggaacggcggcggcgcctcctccgcgctctatggcttatacggtcccaacgtgaaacctgatgttgtttttaaggaggctgctttaaactctacactaaacctgcaggatgttcagggtctagttacttgggttattggtgacggcatgctgccttcttgggtgtttgttaagaacaaacctcttatacccaaagtcgtcctactatatgttcctggccttgatgcagctttatatatgtcacaaactcgacttctctcttctctgaaagaattatgtggcaatccaaaacctgttctagcttcaagctgtataccggatgataggcacacaattgatgcactcctaacctgcagagtaaagagaaagcttgatgtaaaaacatcaaatcagtcatctaaacctgacagggatggaaaactatcaagtctggatgatcttggggacataccatttcctgttacgtattacacactttcagagaaagacttggaagataatggctaccccttcaatttaccaggttttgtccctactgtttcagctccttcaggttccttgccacataaagttcttgcacttgattgtgaaatgtgcataacagaagctggatttgagcttacaagagtgacattaattgacattaaaggatcggtggtgctagatagactagttaagcctgctaatccaatcattgattacaatacaaggttcagtggaatcactgctgagatgttggctgacgtgtccacatccctgcatgaaattcaggaagagtttgttggacttgtatatacagaaacaattcttgttggtcattctttggaaaatgaccttatggcattgcagatatcccatggtttaatcatcgacacagctgttttgtacaagtataatcgaggatctcgctgtaagattgctttgcgtgtcttgacaaaaagatttctcggccgggagatccagaacacaggatctgggcatgacagtgtggaagatgctagagctgctctagaacttgctatattgaaaataagacatggtaagaactaagaaggcatttttgctatcacttttgtttggctaacatccatttctgtaa

SEQ ID NO: 111701 - DNA, 2242 bp, Zea Mays
ctgttgtagagttaccttcggactccaggccctcatccgcccctcctccccaaacgaaatgctatatttgcagaaaggtcccaatccaagtccaacaaccgaaaagaagacgacactcggagggctttcctgtaagtttcgagggcggcgaagcactagggcatccacctcggcggtggcggcggcggcctccatgtcgggcagcaacgggaacggcggcggcgcctcctccgcgctctatggcttatacggtcccaacgtgaaacctgatgttgtttttaaggaggctgctttaaactctacactaaacctgcaggatgttcagggtctagttacttgggttattggtgacggcatgctgccttcttgggtgtttgttaagaacaaacctcttatacccaaagtcgtcctactatatgttcctggccttgatgcagctttatatatgtcacaaactcgacttctctcttctctgaaagaattatgtggcaatccaaaacctgttctagcttcaagctgtataccggatgataggcacacaattgatgcactcctaacctgcagagtaaagagaaagcttgatgtaaaaacatcaaatcagtcatctaaacctgacagggatggaaaactatcaagtctggatgatcttggggacataccatttcctgttacgtattacacactttcagagaaagacttggaagataatggctaccccttcaatttaccaggttttgtccctactgtttcagctccttcaggttccttgccacataaagttcttgcacttgattgtgaaatgtgcataacagaagctggatttgagcttacaagagtgacattaattgacattaaaggatcggtggtgctagatagactagttaagcctgctaatccaatcattgattacaatacaaggttcagtggaatcactgctgagatgttggctgacgtgtccacatccctgcatgaaattcaggaagagtttgttggacttgtatatacagaaacaattcttgttggtcattctttggaaaatgaccttatggcattgcagatatcccatggtttaatcatcgacacagctgttttgtacaagtataatcgaggatctcgctgtaagattgctttgcgtgtcttgacaaaaagatttctcggccgggagatccagaacacaggatctgggcatgacagtgtggaagatgctagagctgctctagaacttgctatattgaaaataagacatggcggaaattgacatctatactgcatgagagtgggaaaaaatgctcccttattgatgacatgtctattctagatcgatattcagatacttcttgcaattcaattgctgtcttttctgatgatgatgccctctccagatcaatgaaggaggtgaagaacgacaaagtggctttcatttggacccagttctcaggattgatctcttacttccgccgaagagctgaagatcccgaaaagttgaaatcatgtgtcgcagaggctattgcattaaaaacatgtgatacaaaaactgcttcaaaaaaagcaaaaagtcaaatttgtcctgaattaaaggaaattttgtgtgaattggataaaaagataaagcagttatatggtgccctacctgacaattctatgcttattgtatgcaccggccatggtgatactcctctagtacgaagattgcggaaaatgcttcaccatgaagaagaaacaatagatagccgggaaaatattgtccaagctctgggagatttacaagcccaagccgaagttgctctgtgcttctgctgtgttaagcattaactaactgcatctttggattaatgtactgatggatatggcttcagccattatagaaggggggtggcaaaagttccggctatatggtatcggaccatgttttcgattcataatatggcccttactatttacactcagggagactgttcatgcggggaagaacattggccactgcctacggaagtgcggtaaatggcaatatgacgcacgtgctcctgatcctgatgcagccagcctgacgaatcccaaatacgggcaggctattgggtttgttgaccccaagctgtccttggagagttgaattcattaatttatttatggctagaccaggatgttatggttgcttgttactttcactgaatcttcaagtgggttcgttgtataaataatactctcttcatttttttaatctgttgcggtatagtttaaaaat

SEQ ID NO: 111702 - DNA, 1254 bp, Zea Mays
aagctctctcatccagctaactaatggaagtagctagcaaacgtacgtattcttcttcaccatctgtttcttggggaaattaaaccccagtacgcgtacgtcacaatcgcgcgcaatggagaaggagaaggagaagtccagggccaggccgtcgaggggccactggcggcccggcgaggacgacaagctgcggcagctcgtcgacaagtacggcccgcggaactggaactccattgctgagagtctggaggggagatcaggcaagagctgccggctacgatggttcaaccagcttgacccgcggatcaaccggcggcccttcacggtggcggaggaggagctgctcctgcgggcgcaccgcgcccacggcaaccgctgggcgatcatctcccgcctcttcccgggccgcaccgacaacgccgtcaagaaccactggcacgtcgtcatggcgcgccgccgccgccgtaccctcgtcggcgaggccgcagccatcggctctgtcgttgtaccgcctcgtcatcagtacttccattttggaagctgctcgccgccgccgccgacccgctcgctgtgcttcgcggtgcctgcaggtttcggtccgctcggactcagcagaccagctgcaagttgcggtgtcaggaactgcaatgtgcccactgccgtcgcattactggacgacggccatcgtcatgacatgagcaaagaccttggtggcgacgatgacaatggcggtgatgcgcttgcaaagaggaaggacgtgcaattcttcgacttcttgggcgtcgggatctaaagcaaaataatgatgctactaatggtacattaattagtacactacatttcaacgatacactattggggtcttcttttccgtcgaagattcttttaaaaaacatcttcgacaaaatgatacaaaggatcaccgaagccaccttcagtctcgatttatctcctcaagacgaagactctgtatagagccgacagtgcaagatgccgaagctcaatggcctcagcccacatcaagcaaggaaggaaaaaggactagataggccttattggttttaattacttgtaaacaagtgttcaagggcatggatgtaattttaccgggctgcgtcccgtgactataaatagatgaacagtaccccgaccgtactattcacgctggattgtaatcactctcgcatcatcctcgttctctcaccttttggcaagccgaaagtaccaatataatatgaatattgttgatgttta

SEQ ID NO: 111703 - DNA, 849 bp, Zea Mays
acccacgatcaaaaacgtacaaaaccatcgctaccccctcaccctcactctccctgctgcaacccaaccaagcccgcacgacacgacaccaagtcgaggagctcgagagggcaccaataatggccggcgtgaactccagcgtcgtcgggctcaagcccgccgcggcagtgccgcaggccgccgccgcctcatcgccggcgaagcgggtgcagctggccgcgcccgagggccgccgcgccgctctgctcggcctggcggccgtcttcgccgtcacggccaccaccgggtcggccaaggccacgatcttcgatgagtacctcgagaagagcaaggccaacaaggagctgaacgacaagaagaggctggccaccagtggagccaactttgcgcgcgcctacaccgtggagttcggcagctgccagttcccctacaacttcactgggtgccaggacctcgccaagcagaagaaagtccccttcatcagcgacgacctcgagattgagtgcgaggggaaggagaagttcaagtgcggctccaacgttttctggaagtggtgaagcagctagcagcagcgtctgatgggaatggaggagatcatcacctgtcttgtcgaccctagatatgtccaaactgcagggaaattaaatcttcatgtgtaattgtgctcattctgtttcaatcatctcaacatccgatcatgaacctcttgcattattaactggctcgatcgtcttctcagtttaagacattggaggctgctttgtttgtttcagaggtccttcttaagatgatgctatattttgtcatggttaatgtgataaacagggtcaggtcggattattcttgaat

SEQ ID NO: 111704 - DNA, 1065 bp, Zea Mays
atggcacaacactcaccgcctacagaatgcacaaacatccccgacaacgggagcccctcacacacaacccatccagagttatcattgccgagctcgacccaagggacaagcagctccgactccgcaaaacgggccgcacatggccaaagaaaacatgacgacgcctacaaccaaacacaccagcatagaaggagaaagatcacagtgcgtcgtcgttgccaagcctcaacacaccccactagatgcatgacccttcgaaacaatccagtccatgaagaagggggctcgtcagctgtcatcattgccgagccacaacccctgatgcagcagcttcgacttcaccttgcaaagccccatcttcacccgcataccagacgccgagaatcgaaagcaaccatcgaaggcgaagctgaggccgagacaaacttcaatgcgacaccttcaggaagggagtgacatcggggacgacactgtcgcgtgtccgagatggactaggctttcgcccaaggaataaaatgttggggaatacgacgcccccaataggggaagcgacgcccacgggcgtcgccatcgtcgaggctctctcccaagaagcccccagcaccaacgtcaggccaagagctactgtcgtcgctgtcctccataccatatgcatcacacaggcacgtgctagagccgcacccggcaaccgatggcactagcacacacgaccatcgaatctagatgtcaccgagcaccctgccaccttgtgccgtcctggccactggccggcgccacccctcacaaacgtgtgacctcaagcaccgctacgctgacaccggagcgtcgagccaccaccatcacagcttcacacagccgcacgccgaggccacaaatgaccaacgtcgtcggccccggcacctgccgatgttgccaccatcatccgccagcagccacaggacgtgtgcctcaccatctcgggcgccaccccctgccctgaggccaccagatctggatggcaggccccaaaaccggcgtccctgcagacgtcgcggcctccgtgttgaccacaaccgtgagcaccac

SEQ ID NO: 111705 - DNA, 570 bp, Zea Mays
atccccacttaaagatctcagtgtcacacatagaccatacatctcacttcgccaaaaaaatttcgtcaacagttgaagttatacccatggcaaaactactcttgggtttgctccttgcccttgctattctagggacaacatcggctgctggttgtgtacaagacgcggaagacatgaaacgagagtgcaagcagtttgagctattcccagcgaacccaaagttgccaccgtcggcagcatgttgtgctgtgtggaagagggcagatgttccatgcctatgcaaatatgttaacaaggaagtagagaaggtatggtgcatggagaaggttgtgtacgtcgccaactattgtaagaggccgtttcaacctggctacaagtgcgggagttatacagttcctcttagtatgtaaaaggagtggttgggacatgtggtactctctcctagaactttaatttgagatttgtaacatgtgagagactattgagaataatatgtatggagtaatatgcttccttcttttaaactgatctaattacttccttggttttgtgttttaaaggatcaagata

SEQ ID NO: 111706 - DNA, 1745 bp, Zea Mays
ccgttcccatcttgcagttgcgtcccctctcgctcgcggccatggcgaaacctcgcggggcgccgaagctcctctacccccgccaccggcggctcctacggtcaccgatctcgcgctgcgcttgcctgttcctcgccttcgctgcgctcctcctcgtctcctccctgcaccaggtcgttcgggtcgacctactacgcccggacccgccccaccagttcaaggcaagtcagacagctacatgactgttagaagtaatggaggactcaaccaaatgcgcactggaatctgtgatatggttgcagttgcccgtttggtgaatgcaacacttgttatccctcagttagataagcgatccttctggcaagataccaggttctgagtattaggttatagtttagctattgccatatattctgtctgattgctccttatttttttgtttaacaactcccaccactatctacagtacatttaaagacatatttgatgagcctcattttattaaggctttggaaggagatgtccacattgtgagtgacttgcctggaagtttgcaatctgctccaagagcccggaaacatttcacctcatggtccggtgcaagttattatgaggaagtgaaagagctctggaagaatcagaaggtagttcacatcccaaaatctgattcgcgtcttgctaacaacggtcttccaattgatatccagagattgagatgccgctgtctttaccaagcactgcgtttttcggatctgattgaggaccttggaaagattctgagccaatgtaacacttacgaaacagaagctagtagagcgtctaagatctcatggaaaatatattgctcttcatctacgatatgagaaggatatgctagcatttacgggatgcacttacggtctgagtgatttggaagcaaatgagttgagaattatgagagagagaacaagccactggaaactgaaggatataaactcaactgaacagagatatgaaggcaactgtccactgacaccaaatgaggtgggcatttttctgcgtgctatgggctatcctgaatccacgtggatataccttgcagcaggtgaaatttatggtggtgaaaagtatatatcaaaattgagatcatacttcccaaatttggttagcaaggacatgctagcaacagaagaagagcttgcgaaattcagtaatcatgcttctcaagttgctgcccttgattacataatcgcagttgaaagtgatgtgtttattccatcacactctggcaatatggcaaaagctgtagaaggccatcgtcgatttctagggcatcgtaaaactatcactcctgacaggaaaggattggtggaactctttgatttactggaaaaaggggatctcacggaaggtcctaagctgtcggcacttgttactgacatgcacaagtacagacaagggactccaaggaagaggtatggctccttgccaggaagcaagggcagagcacggcttaggactgaggaatctttttacgagaacccgtttcctgagtgcatctgtttgactgggaggtcctgatgtatagctttgcatgatgatgacacggtgcacccatcattggaggtgtgctagtgcttcagtctggccattggagctctaccggtactttgtgatgaaaaaagctgatctggtactcaaggacacaagttagtgaaggacgtcttccttctcgtgatcaacatgcaatgcaatgaccttgttgg

SEQ ID NO: 111707 - DNA, 1987 bp, Zea Mays
ccgttcccatcttgcagttgcgtcccctctcgctcgcggccatggcgaaacctcgcggggcgccgaagctcctctacccccgccaccggcggctcctacggtcaccgatctcgcgctgcgcttgcctgttcctcgccttcgctgcgctcctcctcgtctcctccctgcaccaggtcgttcgggtcgacctactacgcccggacccgccccaccagttcaaggcaagtcagacagctacatgactgttagaagtaatggaggactcaaccaaatgcgcactggaatctgtgatatggttgcagttgcccgtttggtgaatgcaacacttgttatccctcagttagataagcgatccttctggcaagataccagtacatttaaagacatatttgatgagcctcattttattaaggctttggaaggagatgtccacattgtgagtgacttgcctggaagtttgcaatctgctccaagagcccggaaacatttcacctcatggtccggtgcaagttattatgaggaagtgaaagagctctggaagaatcagaaggtagttcacatcccaaaatctgattcgcgtcttgctaacaacggtcttccaattgatatccagagattgagatgccgctgtctttaccaagcactgcgtttttcggatctgattgaggaccttggaaagaagctagtagagcgtctaagatctcatggaaaatatattgctcttcatctacgatatgagaaggatatgctagcatttacgggatgcacttacggtctgagtgatttggaagcaaatgagttgagaattatgagagagagaacaagccactggaaactgaaggatataaactcaactgaacagagatatgaaggcaactgtccactgacaccaaatgaggtgggcatttttctgcgtgctatgggctatcctgaatccacgtggatataccttgcagcaggtgaaatttatggtggtgaaaagtatatatcaaaattgagatcatacttcccaaatttggttagcaaggacatgctagcaacagaagaagagcttgcgaaattcagtaatcatgcttctcaagttgctgcccttgattacataatcgcagttgaaagtgatgtgtttattccatcacactctggcaatatggcaaaagctgtagaaggccatcgtcgatttctagggcatcgtaaaactatcactcctgacaggaaaggattggtggaactctttgatttactggaaaaaggggatctcacggaaggtcctaagctgtcggcacttgttactgacatgcacaagtacagacaagggactccaaggaagaggtatggctccttgccaggaagcaagggcagagcacggcttaggactgaggaatctttttacgagaacccgtttcctgagtgcatctgtttgactgggaggtcctgatgtatagctttgcatgatgatgacacggtgcacccatcattggaggtgtgctagtgcttcagtctggccattggagctctaccggtactttgtgatgaaaaaagctgatctggtactcaaggacacaagttagtgaaggacgtcttccttctcgtgatcaacatgcaatgcaatgaccttgttggaccagatggagggctggggccactgcaaccaagaaaccgtacatgaactgttttgtcccccgcaaactcgagagatttggcatgtttgccattagtaacgaaagtttcgaggtatatatgcgttggcaagcatctgtacccttcgaggcaacatcagggggaaaaaaaatatagtaaaagcatttagccttagcgagcaggtttacacaagctgttgaactgctgctgcagctttgtaaccttacagagttagagtggtcatcagaagcgatgctcacttgtcctctctccgtattaccgtctcccatgtcctctaatcatatcaacaagagccaggcgctgtaaaaaaaaagtagtagtaggaatt

SEQ ID NO: 111708 - DNA, 2157 bp, Zea Mays
ccgttcccatcttgcagttgcgtcccctctcgctcgcggccatggcgaaacctcgcggggcgccgaagctcctctacccccgccaccggcggctcctacggtcaccgatctcgcgctgcgcttgcctgttcctcgccttcgctgcgctcctcctcgtctcctccctgcaccaggtcgttcgggtcgacctactacgcccggacccgccccaccaggtgtcaaatgatcaactgtgggcttctaatggttatggttatcatgcttgtgttacaccaacctctagatataaggttcaaggcaagtcagacagctacatgactgttagaagtaatggaggactcaaccaaatgcgcactggaatctgtgatatggttgcagttgcccgtttggtgaatgcaacacttgttatccctcagttagataagcgatccttctggcaagataccaggttctgagtattaggttatagtttagctattgccatatattctgtctgattgctccttatttttttgtttaacaactcccaccactatctacagtacatttaaagacatatttgatgagcctcattttattaaggctttggaaggagatgtccacattgtgagtgacttgcctggaagtttgcaatctgctccaagagcccggaaacatttcacctcatggtccggtgcaagttattatgaggaagtgaaagagctctggaagaatcagaaggtagttcacatcccaaaatctgattcgcgtcttgctaacaacggtcttccaattgatatccagagattgagatgccgctgtctttaccaagcactgcgtttttcggatctgattgaggaccttggaaagaagctagtagagcgtctaagatctcatggaaaatatattgctcttcatctacgatatgagaaggatatgctagcatttacgggatgcacttacggtctgagtgatttggaagcaaatgagttgagaattatgagagagagaacaagccactggaaactgaaggatataaactcaactgaacagagatatgaaggcaactgtccactgacaccaaatgaggtgggcatttttctgcgtgctatgggctatcctgaatccacgtggatataccttgcagcaggtgaaatttatggtggtgaaaagtatatatcaaaattgagatcatacttcccaaatttggttagcaaggacatgctagcaacagaagaagagcttgcgaaattcagtaatcatgcttctcaagttgctgcccttgattacataatcgcagttgaaagtgatgtgtttattccatcacactctggcaatatggcaaaagctgtagaaggccatcgtcgatttctagggcatcgtaaaactatcactcctgacaggaaaggattggtggaactctttgatttactggaaaaaggggatctcacggaaggtcctaagctgtcggcacttgttactgacatgcacaagtacagacaagggactccaaggaagaggtatggctccttgccaggaagcaagggcagagcacggcttaggactgaggaatctttttacgagaacccgtttcctgagtgcatctgtttgactgggaggtcctgatgtatagctttgcatgatgatgacacggtgcacccatcattggaggtgtgctagtgcttcagtctggccattggagctctaccggtactttgtgatgaaaaaagctgatctggtactcaaggacacaagttagtgaaggacgtcttccttctcgtgatcaacatgcaatgcaatgaccttgttggaccagatggagggctggggccactgcaaccaagaaaccgtacatgaactgttttgtcccccgcaaactcgagagatttggcatgtttgccattagtaacgaaagtttcgaggtatatatgcgttggcaagcatctgtacccttcgaggcaacatcagggggaaaaaaaatatagtaaaagcatttagccttagcgagcaggtttacacaagctgttgaactgctgctgcagctttgtaaccttacagagttagagtggtcatcagaagcgatgctcacttgtcctctctccgtattaccgtctcccatgtcctctaatcatatcaacaagagccaggcgctgtaaaaaaaaagtagtagtaggaatt

SEQ ID NO: 111709 - DNA, 899 bp, Zea Mays
agttgcgtcccctctcgctcgcggccatggcgaaacctcgcggggcgccgaagctcctctacccccgccaccggcggctcctacggtcaccgatctcgcgctgcgcttgcctgttcctcgccttcgctgcgctcctcctcgtctcctccctgcaccaggtcgttcgggtcgacctactacgcccggacccgccccaccaggtgtcaaatgatcaactgtgggcttctaatggttatggttatcatgcttgtgttacaccaacctctagatataaggttcaaggcaagtcagacagctacatgactgttagaagtaatggaggactcaaccaaatgcgcactggaatctgtgatatggttgcagttgcccgtttggtgaatgcaacacttgttatccctcagttagataagcgatccttctggcaagataccagtacatttaaagacatatttgatgagcctcattttattaaggctttggaaggagatgtccacattgtgagtgacttgcctggaagtttgcaatctgctccaagagcccggaaacatttcacctcatggtccggtgcaagttattatgaggaagtgaaagagctctggaagaatcagaaggtagttcacatcccaaaatctgattcgcgtcttgctaacaacggtcttccaattgatatccagagattgagatgccgctgtctttaccaagcactgcgtttttcggatctgattgaggaccttggaaagaagctagtagagcgtctaagatctcatggaaaatatattgctcttcatctacgatatgagaaggatatgctagcatttacgggatgcacttacggtctgagtgatttggaagcaaatgagttgagaattatgagagatatgaaggcaactgtccactga

SEQ ID NO: 111710 - DNA, 2047 bp, Zea Mays
agttgcgtcccctctcgctcgcggccatggcgaaacctcgcggggcgccgaagctcctctacccccgccaccggcggctcctacggtcaccgatctcgcgctgcgcttgcctgttcctcgccttcgctgcgctcctcctcgtctcctccctgcaccaggtcgttcgggtcgacctactacgcccggacccgccccaccagttcaaggcaagtcagacagctacatgactgttagaagtaatggaggactcaaccaaatgcgcactggaatctgtgatatggttgcagttgcccgtttggtgaatgcaacacttgttatccctcagttagataagcgatccttctggcaagataccagtacatttaaagacatatttgatgagcctcattttattaaggctttggaaggagatgtccacattgtgagtgacttgcctggaagtttgcaatctgctccaagagcccggaaacatttcacctcatggtccggtgcaagttattatgaggaagtgaaagagctctggaagaatcagaaggtagttcacatcccaaaatctgattcgcgtcttgctaacaacggtcttccaattgatatccagagattgagatgccgctgtctttaccaagcactgcgtttttcggatctgattgaggaccttggaaagaagctagtagagcgtctaagatctcatggaaaatatattgctcttcatctacgatatgagaaggatatgctagcatttacgggatgcacttacggtctgagtgatttggaagcaaatgagttgagaattatgagagatatgaaggcaactgtccactgacaccaaatgaggtgggcatttttctgcgtgctatgggctatcctgaatccacgtggatataccttgcagcaggtgaaatttatggtggtgaaaagtatatatcaaaattgagatcatacttcccaaatttggttagcaaggacatgctagcaacagaagaagagcttgcgaaattcagtaatcatgcttctcaagttgctgcccttgattacataatcgcagttgaaagtgatgtgtttattccatcacactctggcaatatggcaaaagctgtagaaggccatcgtcgatttctagggcatcgtaaaactatcactcctgacaggaaaggattggtggaactctttgatttactggaaaaaggggatctcacggaaggtcctaagctgtcggcacttgttactgacatgcacaagtacagacaagggactccaaggaagaggtatggctccttgccaggaagcaagggcagagcacggcttaggactgaggaatctttttacgagaacccgtttcctgagtgcatctgtttgactgggaggtcctgatgtatagctttgcatgatgatgacacggtgcacccatcattggaggtgtgctagtgcttcagtctggccattggagctctaccggtactttgtgatgaaaaaagctgatctggtactcaaggacacaagttagtgaaggacgtcttccttctcgtgatcaacatgcaatgcaatgaccttgttggaccagatggagggctggggccactgcaaccaagaaaccgtacatgaactgttttgtcccccgcaaactcgagagatttggcatgtttgccattagtaacgaaagtttcgaggtatatatgcgttggcaagcatctgtacccttcgaggcaacatcagggggaaaaaaaatatagtaaaagcatttagccttagcgagcaggtttacacaagctgttgaactgctgctgcagctttgtaaccttacagagttagagtggtcatcagaagcgatgctcacttgtcctctctccgtattaccgtctcccatgtcctctaatcatatcaacaagagccaggcgctgtaaaaaaaaagtagtagtaggaattggaaccctacacgactcgaaatgattgtgctatctgtttgaggtctttgtaatgcctcttccactgcagacctgcaaaagattcccagctatttattgtattattcaggataataataaaaaaa

SEQ ID NO: 111711 - DNA, 693 bp, Zea Mays
accgtttgcagttacactgaagaggtagagcctgttcccagctgccgtggcggtgatgaacacatggggcggctccagctcgaactggtagtaagttcttcccgaatgcgccgccgtctccgaggacaggaccttcccttccacgttctctccgatgacctccggaccgaaggcggtgatcaccttctccgggctgccgatcttctcgatggtcgcgtcgtccaggtcatctgtaggacgggaaccatatcacaacatttcttgagcattttgttcaggtctcagctcacctgcgaaccggcgaactggggccacgatgacgaacagccggccttccttggggtttgcgaagcgcaggtcgatctccgtgccgcccagatcagcaatggacaccgggacctcatcccagccgtctggaactttgaagctgtacgggatgatggggctccagccaactccgtggccaccggacttgtcgtctggcctgcggtacgttctccaacctgtcattttcgtcaggttcagacaagccggggaccctcccggcgagcaggccctggttggccgccagaccacggcctgcaaacccaagcactgaggcgacagctgctgcggaagccaacgcacgcctccccaccaccactgctacaccctcctgatcttcacgccccactgacagggagggcccgctga

SEQ ID NO: 111712 - DNA, 129 bp, Zea Mays
gctttttttctctcttctctccaaacaaactactccctccctcgtaaaattcaaggtattcaaataattctagaaccaaataataagtctgatagaagactaacttacccttcactagttagttgtttt

SEQ ID NO: 111713 - DNA, 1128 bp, Zea Mays
tctctacgccgccgctgcgcttgcgctcctcacacacaaaccgcaagaagacaagaacccgatccgccggctcgccggtcaccatggagcactacgagcggcttggcaagatcggagaaggcacgtcggggatcgtctacaaggcccgcgaccggcgcaccggcgagaccgtcgccatcaagcgcctccgcgccggcgccggcaacggcgagggcgacgcgttcgaaaagacgttccgccgcgaggtgcggtgcctcgaggcgtgccgcggccacccctgcatcgtggagctccgcgccgcgcaccgcgaccccgcgggcgcgttcctcgtgatggagtacgcggggcagagcctgcccgaggtcatgcgcgcgcgcgccgagcgggcgctccctgagcccgacgcgcggcgcgtgatgcggcggctcctggagggcgcggccgcgatgcacgcgcgcggcctcctgcaccgggacctcaagcccgacaacgtcctcctggacggccgaggcggcgtcaagatctgcgacctggggctgtcgcgcgcggcggcggcggcccccggcgcgccgcacacgccggggctggcgacgctgtggtaccgcgcgccggagatgatcctgggctccggggactacgacgcgggcgtggacacgtgggcgctcggctgcatcatggccgagctcctcgccggcgcgccgctcttccccgggaggtcggagatggaccagctcaacagggtgttcgacacggtggggatgcaggacatagcgtcctggccgggattcgcgcggctgccgcgcgcggggtcgccgctctgccggcgcgccaggcctcccagcaggctccgggagctgttcccggcgttgtcggctgccgggttcgacgtcttggccggactgctggcgtgcaggccggacaggcgcctcaccgcggccgacgcgctccggtacccgtggttcgcggacgccgcggcggtgcctgaggtcttgccggatcagccgcgtgcttcgcgctgcgccggcttcgctgccggtgtcgctggtgctggcgaggcaatcgtagcgtagaacacgaacgttaagagacatgttaatcaatcgcttgtagaataatggatacagtact

SEQ ID NO: 111714 - DNA, 1448 bp, Zea Mays
ctacacacgtcagcttctatcaggtcggccctcttgggctgtcgtgttcctagcattcgcacattgagatctcctccggtgggggtggtggacgagtgaaagcagcaggcgggccgggacaaagctgcagcggcggacggcggtggcgttgctctgcggtcacgtacggccctctcgtcacgggagaaaaaacggctggagaaaccgacggtacacggtgccccagacaagccgccgcccccgtcaacttgttgtagtagtagtaccagcaaaagacattcctcaagacaaagttccacagctatagcaatgacccggtgaacgaagcacgcccagcaagtgttgccgtccattccattggttcccttgctggctagctcgtcttcttggagccgctatcaatggccgcggttgcttgctgttggagctacctggtagtcgtagcgacggtggtgttaccgctgttgcttctcggagttattggcgtctcccgtgcacagctcctgcaggtgggcttctactccgactcctgcccagacgccgaggccacggtcgccgccgccgtccaggacgccgccgccaacgaccccaccatcctccccgcgctgctccgcctgcagttccacgactgcttcgtcaaggggtgcgacgcgtcggtgctgatcaggagcgccagcaacgacgcggaggtggacaacggcaggaaccagggcctgcgcggccaggaagtggtggacgccgccaaggcgcagctcgaggaccagtgccccggcgtcgtctcctgcgccgacatcatcgcgctcgccgcgcgcgacgccgtcgccatgacgggcgggccgtcgttcgacgtgcccacggggcggcgcgacgggctgacctccaacctccgcgacgccgacgtgctgcctgacgccggcgactccatcagcgtgctccgctcaaggttcgccgcaagcggcctcgacgaccgcgacctcgtcctcctcacagcggcgcacacggtgggcacgacggcgtgcttcttcgtgaaggaccggctgtacggctacccgctgccgggcggcgggaggggggcggacccttcgatcccggcgccgtacctggcggagctcaaggcccggtgcccgccgggcaacctcaacgcgcggctgccgctggaccgcggcagcgggagcggcttcgacgactccatcctccggaacatccgctccggcctcgccgtcatcgcctccgacgccgcgctggccagcagcaacgccacccgcgcgctcgtcgacgcgtacctgcagggcccctcggcaagaaggttccagcgcgacttcgcggccgccatggtcaagatgggcagcatcggcgtcgtcaccggggaggacgccggcgaggtcagggacgtctgctccgcgttcaatgccagttgatccgccgtgtcgtacgtcgtcgattggatt

SEQ ID NO: 111715 - DNA, 107 bp, Zea Mays
atgcatggtggaagtaggaatgtaagcaagtgcacaaatccaaaagaagaggttttaacagtatcatcatcttgggggcttggtgtttatggcttcatcgtaataag

SEQ ID NO: 111716 - DNA, 269 bp, Zea Mays
atggcaaccagtggaccgagcgccgccgccgccgctcccaaggactcgtggccggaggttgtgggcatgtcatcggaggaggccaagaagaagatcaaggaggacaagccgggcgccgacgtgcaggtggtcccagccgacgccttcgtcaccatggactacagcaccggccgagtcagggtcttcgtcgactccaacgacaaggtcgccaaagctccccggatcggctagctggataggagggacatgcatacatgcagcaggtgcca

SEQ ID NO: 111717 - DNA, 1862 bp, Zea Mays
ctctccccgtcctctctgtactctctccgtctctctcgtcgtttatccgcctcccatccttgctaccctcctccgtgctctctgctcaccaattcctccaggattcggatttaggattgggattctggcgccggaaccgaagcggcgacgcgctggagccgcggccggatcgtttgggtcaccacgccaacgccatgatggcgaacgggaggttccagaagcaggcgttgcttccgccgcggagcccgttcccggtggcggcgccgcacgccgagctcggcccaatcgcgcggccgcgggagacgccccaccggcacggccaccagcgcacgtcgtccgagagcttcctcgctgacgagcagccgtcgtggctggacgacctgctcgacgagcccgagactccggcgcgggcgcacggccggcctggccaccgcaggtcgtccagcgactcgttcgcgctcttcgaaggcggcagcgctgcggggggcatgtacgagtttgacaatgtgcttgatggcatgaggggaggagggcaggtggcttctttggccggtgcgcccgaattcttccctgagccagcctcatttgggcggccttgggagtccaggcagatgtaccggcagggtggtggcatgccaatgccaggcagggagaagaatggagggcgccatggtccgtccagctcatttggtgagcatgagcttggtcatgtgcccaatggggtgaataggaaggcccatggcgatgcggcttatgaccagaggattgtaatagagagaaaggagggcctgaggcactctcagtcggagactgacaccaaacgagccaaacaacaatatgctcagagatctcgtgtccggaagctccagtatattgcagagcttgagagaagagttcagtccttacagacagagggaatagaagtaactgctgaaatggattttctcggtcagcaaaatatcatgttagacttggaaaataaagccttgaagcaacggcttgagagtctatctcaggagcatctcattaaacgttatcagcaggagatgtttgagagggaaattggccgccttagaacattgttccagcagcagcaacagcaacaacatgtgccgcagcagcaggctcctacccatagccgcagtaacagtagagacctggattcgcaatttgcaaacctgtctctgaaacacagtgatcccagttcagggcgcgacgctatctctggcctccgcatttaagatccctttgttccagcttttggatccctgagctttgcagaacctgctgcccctttatgccactctttgtggttgttagtagcatcatgagaggagcagcaccggtgaaccgggaatctcatcccacggtgaataaagctggaaaggttaataactgtggatctggtccttagttctttcagaatgtgcacctggcggtcatcgttagcttctgtccattattgatgcttgaccagtcggaggtgtttaggatctgtttgcagattgatgacttccatggatccttgtatcagtttgaatctagaacactaaggttctaatccattcctttttagtcgattctctgtcgagtttaggcgccatggcccttgtattagtgtggcacacgaatggaatgtgagctggtcctctttaggttatgccacatcctggaaaaccgttgcgtgaggagttgtcgggccatgtccattgtcctaataagatggtgaggttgaagggctggtgcagttcagtttcattttatttgtgatgtgcacagcaagatattggatactttgggttcttacatttatttgagcactgtatttttatcgcattgtgatgacagtatattccaagttc

SEQ ID NO: 111718 - DNA, 1332 bp, Zea Mays
atgaccgacagaaaccccgccgccgcctcaagcaagcgtcactgtgacctctccctcgacgatcccacgccgtcggccaagctccagcggtgctccgagccgtcagaaccaacgccggcggggaaaccgaacggcggcgcggcgacgggagaggagagcgagatgatggccggcgcacggaaccctagggcgcagaggtacctggtcgccgtggagtacattggcacccgcttctccggctcacagaagcagcccaaccagcgcaccgtcactggggtcctcgaggaggcatttcaccgatttattgggcagccagtttcaataatcttttctagccgaacgagtggaatgatactagcagattcatcaaaagtatgtatgcgttattgtattttcaaaaccatagcaaacatccaaatgctcaaaggttcaggctacttaattcttgtactggatgcaggtgttcatgctttatcaaatgtttgtcatgttgatgttgagcggataaacctggcggctggcgccactgctgaaacaagtcgctgtagtctgggcgtctggattgatgtattttggtgggagagttgtttgttaacacctcatgagcctggagttgtaaaacgtgctgtgaaccactttctactgaagagtgaaggtgacataatggtgactgatgtctgctgtgttgcaccagattttcatgctagatacaaatctctagagcgcacatatcactatcgcttgcttgctggacctgaatcaacatctgtttttgagaaaaactctgtttggcatatatctgaagatttggatattcagtcaatgaagaaagcatgcagcatacttgttgggcatcatgatttcagttcatttcgagcggctggatgtcaggcaaactctccagtgcgaactctggatgaacttagtgttacagaagtattccctttcatgttttttccttcaagtgtagaaagatcagagttggaattatcaaatgtctctcttgtttattcaaggaaaccagacatggaatcttctgggaaaggatctgatggttcctgtaccagtagtgtgaaatcagattttgagaatggaaaagattttggaaagcggtcaaggcaccgttgctttgttgttactgcaagggcacggtcttttctttaccaccaggtaaggttgatggtcggtcttctaaaatctgttgggactggagatctaacaactgcagatgttgagagaattctggatgcaaagacggttactgctgcacccagtatggcaccttcttgtggtctgtaccttgctaacgttaaatatgatctgaatacctga

SEQ ID NO: 111719 - DNA, 547 bp, Zea Mays
actgcacacctccacgaaagacggacagcatagagaaagagagagccggccggccggcgcacagcaacaagataaaaatggaggcgcctcgccgtccctgctcctcgctggtacttctgctgcgtttcttggcgatcttggcagcggcggcgttcttcatcgttctcgccgtgcacgttgagcctgtgcaaggagggaggcagccgaacccaccgccatctccggaggcacatccaaccccgcaatcacattgctgcaaccgtaggtgaaacaaattaagagaggccgcgctatacgattgggatgtgcgtctcttatttggtgggagccagcagtgtccaatttaaaccttgtgatcttattagaccatcttaatttaaaagtttttttcttctaaagctcgctctctaaattattgtttacaatgtcattatataaaaaatcgttctctatagttttttatgtttaactggagtggttacagcatatgttgacaggttttaagaaataatatttgcacatcattcatgagatgtgttctaatcct

SEQ ID NO: 111720 - DNA, 828 bp, Zea Mays
atggagaaggggtgtacggaggtacctcaaaagaagcttgacttccatccgcaacaggtgggggatggacatacggacgtatcaggaatgaagcttgaattccagcttgggaagttggagaagttggaggttgaccatacaaagacggtggatattgatacaaatgatagaaataagggtataatggtggactcacagctggaaatagtgcacgggtatcgcgtcggcacccttgcaagagcatcaaccatatttctgtttgacaggcatgagaaatcaaccacagggtggtacaagaattacataactctaatcggactcctcgacctcatcttcctcctctccaagtttcgcttccggttcctcttcttcgtcatctatcagaccaagttctttttcaaccatctttacgaccctggcatgggtacatctttcagccgagttcatatctctggtcaacattcgtccagtctagcctttttggacgattttccttcggcacgagattttcctcagcttgattttcagataaaggtgcaacttgagtcggtgctccatacggaggtggagcatatggatgaggtgctccatacggaggtggagcataaggaggtgagggatggacatacggacgtatcgggaatgaaggttaaattccagcttaggaagttgaaggttgaccatatgaagacggtgaatattgatacaaatgataggaataagggtatggtggttgacgcacagccggaaatagtgcacggggtactgagcctgaaacatcaaagcaacgatatagtggagaagactcatcaaacggaagggttgtag

SEQ ID NO: 111721 - DNA, 438 bp, Zea Mays
atggccggctccctgttgtgcattgcaggcactgcgagggacagcgaggttggccggaatgcaggtttgggacgtgcagacgacatccatggcctaggctcgtgcttgtaccaaggggcttcggcgaggtgtgggaatgagactaggggggttggctggacggatccgtcggcaatgggcttcgagacaggcgtccgtgggaggggcttcgttgggggaaagggctgctacacgtcgccggaaggaaaagggagaagagaaggcttacctgcgtcgccggtaaccgaacgggcatgctcgtgtgatctgggtctcgggaaatcggaggcggtttggcgattggaaacaagaggagggatgtccccgtacctggtaagtgttgcccttcacggcctgcgatctggatctaggcgagacgaggggttatgcgacggctag

SEQ ID NO: 111722 - DNA, 1740 bp, Zea Mays
ccgtacccacgcagcctttcctgcataactggataccaggctagcactagcagcctccctcctcactcgcagagcatttgccggctagcccgcctagccgcgctctccacaacgatgaggaggcagagctcgctagctcgctcgtgctcctcagtggcaccggcgtcgccgccgcctcaaaacggaggagtgaacagcaagcacctggtcccccccatggaggtgtcggcggaggccgggaacgccggtgccgccgagtggctagacgacgacggccgcccccgccgcaagggcacgttctggacggccagcgcgcacatcatcaccgccgtcatcggctccggcgtgctgtccctggcctgggccatcgcgcagctgggctgggtcgccggccccaccgccatgctcctcttcgccttcgtcacctactacaccgccacgctgctcgccgagtgctaccgcaccggcgaccccgacacgggcaagcgcaactacacgtacatggacgccgtgcgctccaacctcggcggcgccaaggtcgccttctgcggcgtcatccagtacgccaacctcgtcggcgtcgccatcgggtacaccatcgcgtcgtccatcagcatgaaggccatcaggagggcgggctgcttccacacccacggccacggcgacccctgcaagagctccagcacgccatacatgatcctcttcggcgctgcgcaggtcgtcttctcccagataccggacttcgatcagatatggtggctctccattgtcgctgcagtcatgtccttcacttactcgtctatcggactgtccctcggaatcgtacagaccgtctccaacggtgggttcaagggcagtctcaccagcatcggcttcggcgccggcgtgaactccacgcagaaggtctggcacacgctgcaggccttcggcgacatcgcgttcgcctactccttctccaacatcctcatcgagatccaggacacgatcaaggcgccgccaccgtcggagtcgaaggtgatgcagaaggcgacgcgcctcagcgtggcgacgacgaccgtgttctacatgctgtgcgggtgcatggggtacgcggcgttcggcgacgacgcgcccgacaacctgctcaccggcttcggcttctacgagcccttctggctgctggacgtggccaacgtggccatcgtggtgcacctcgtgggcgcgtaccaggtgttctgccagcccatcttcgccttcgtcgagcgccgcgccgccgcggcctggccggacagcgccttcgtctcgcgggagctccgcgccggcccgttcgccctcagccctttccgcctcgcgtggcggtcggcgttcgtgtgcgtcaccaccgtcgtcgccatgctgctgcctttcttcggcgacgtggcggggctcctcggtgccgtctccttctggccgctcaccgtctacttccccgtcgagatgtacatcaagcagcgccgcgtgcctcgtggcagcgccagatggatcagcctccagacgctcagcgtcacgtgcctcctcgtctccatcgccgccgccgccggttccatcgccgacgtcgtcgacgcgctcaaggtgtaccggccgttcagcggctaacttggaagggacctgtgtgtaaaacgcaggaccgtgatcaactcgatcgctgcagaaaccagatgagattaagattactaggcaagcagagcgaggcggcctggcgttattagttggttgaattag

SEQ ID NO: 111723 - DNA, 110 bp, Zea Mays
aaagagaaattgtttcctctattgatattaattctaaccaattacaaagtgggtattacagtgagtgagtggggtgcgggcactaaaaggaggtcgggtgcgtgcagagg

SEQ ID NO: 111724 - DNA, 4353 bp, Zea Mays
atcgcatcccctccacccaagctcgatcgatgaccaataaaagaagcttgagatcggctcctgcatggccggttgcgtgtcgctgggggaaatagaatagaaagaggctagatttgaggtcgctgcgttctcaccaccctctccacttctgaattgaagaacctacgatccgttccacaaccgggcagcggtttgttccgtgctgcaaattagatcgagaggccatcttcttcatctcagagtttcgccgtcggttggttcccggagccgcgccatttctcgacccaattttgtttcaggtttcattgacgacgttgcagtgctcaggtttccgcatttcgatttcgacttttgaatcgctctgaaactgcttgcgtgcgtgcgggcgtgcgtgtctgactctctgttcatgtgttcatcgcttgttcagattcctctctttctctgttttctctggacatcacggtttctgacgtctcggcatccttgttgcatgaatctgcaggcagtgtgatcccggactgtgcatgagctagctgaaaagggaaggggattccagagatgccgttgttcgaacgggatcgctaccagaggctggacggcgtgggcgcccggaggccgccgccgccgccgtcgtcgttctgctcgtcggcaaccgtcgtcgtcttcgtggcgctctgcctcgtcgccgcgtggatgatggcgtcgtccaacaacatcgccgtcaccgtaacgccagagaacaactcgggggccaaggaccaggacgggtccgtcgacgttggcggcgacacgcggcaggcgagcgacgaggtggcggacactggcagcggcacgcagtcgacggaggtgagtggggacgcaggcaagaaagatgatcgtagcggtggcgacgcttcgcagacgaaggaggacgctgatggggacaccgacaacaaagatggtggcgacgcttcgcagacgaaggaaggcgctgatggcgacaccggcaacaacaaggacgacggcgctggcgccacgcagacggccgaacctgtcactactgtcggcaacgacgtcaaccagagcgacgtcacggggagaacggatgcgacagccaacggcactaccagaggcacggacgcagaggactccggagagccagacagcggcaccgttgccgagggcgacacaccggccaggaaccagactttctccgacgagaacggcaagacggagggcggcgaggtggcgaagccggaggaccccgacaaaaaagtcgagcagagcgccgagcagacggcgatcgatggcaacactaccacaagcggacaggatcaggacgagaacaacaccgacaagaacaccaacgaaaccggcggccaggctgacaagagggaggaggaggcgtccactgacgacaagagcaccggcggccaggctgacaacactactgtacaagaggcatccaccactgacgataacagcaccggcggccaggctaacaatagcaccaaggagacaccgacagagtcaaaagagaccgttggcggtgacgacggcacggcccagagccagacgagcttcgacgacatgaatggcagtacgaacgactcgcagcccatgaaagaagacgggaaggtcgccgagaatagctccgatgaaactgccagcggcggcaaggtggaaagcacagacgacgacgcgacaaccggcgcggcgtcaaacaacgcaacttccggaggccagaacgtcgcggccgagaccatggcatttgcagccgcggatgatggcgccaacggcaacatcactgaaaacagctacgcaacgaacagcagcgccacgactgaagggaagataccgacggttggagaaggagacgcggcagagaaagccgacctgctgccgagcgggcaggcggagctgctgaacgagacggcgtcggcggtggcggagaacggcgcgttcccgacccaggcggcggaatcgagcgaggagaaggaggcgctcgcaggcaagaacaagaagaagaaccagaagaaaaagaagcagaagagcaaggaccagggcgccgcctctggcgagacggcggaggggaaggagacgtacgcccacacctggaagctctgcaacgcgagcaccggcgcggactacatcccgtgcctggacaacgaggcggccatcaagaagctcaagagcaccaagcactacgagcaccgggagcggcactgccccgccgacgcgccggcgtgcctcgtaccgctcccggagggctaccggcagccgatcccgtggccatacagccgcgacaagatctggtaccacaacgtgccgcacactatgctggcgtccttcaaggggcaccagaactgggtgaaggtctccggcgagcacctgacgttccccggcggcggcacgcagttcaagcacggcgcgctgcactacatcgaggtgatcgaggaggcgctcccggaggtggcgtggggccgccgcagccgcgtggtgctcgacgtcggctgcggcgtcgccagcttcggcggcttcctgttcgacaaggacgcgctgaccatgtcgttcgcgcccaaggacgagcacgaggcgcaggtgcagttcgcgctggagcgcggcatcccggccgtctccgccgtgatgggtaccaagcggctccccttccccggcaacgccttcgacgtcgtccactgcgcccggtgccgggtgccgtggcacatcgagggcggcacgctgctgctcgaggtgaaccgcctcctccggcccggcggcctcttcgtgtggtcggcgacgcccgtgtaccagaaggtgccggaggacgtcgagatctggcacggcctggagcaatttgcattggttgatttggtactatatcccctgatcccgttcctgtttgaagcagcgatggcggcgctcaccaagtccatgtgctgggagatagtgaagaagacgagcgacacggtggacgagaccgccatggtggtgttcaagaagccgacgagcaacgagtgctacgacgcgaggacgcgcgcggagccgccgctctgcggggcctccgacgaccaggacgcggcgtggaacgtcaccctgcggccgtgtatgcaccgggtgcccaccgacgcgtccgcccgcggctcgcggtggccgacgcagtggccccagcggctggcgacgacgccctactggctgagcgccgaccagacgggcgtctacggcaagcccgcgcccgccgacttcgccgcggaccaggagcactggaggaaggtagtcgacaactcgtaccgcgacggcatgggcatcgactggaagaacgtccggaacgtcatggacatgagagccgtctacggagggtttgcggcggcgttgtcggacatgaaggtgtgggtgatgaacgtggtgaccgtggactcgccggacacgctgccagtcatctacgagcgcgggctgttcgggatgtaccatgactggtgcgagtccttcagcacttacccgaggtcgtacgacctcgtccacgccaaccacctcttctccaagctgaagagtaggtgcaagctgctgccggtgatcgccgaggtggaccgagtcctgaggccggaggggaagctcatcgtccgcgacgacatggcgacggtcaaggaggtccagagcattgcgagatcgttgcactgggaggtgaggatgaccgtgtccaagcaggggcaggggctgctctgcgtcaggaagactatgtggcggcccacgcaagtcgaggcgctgagctagtgtaagttcatggtgatggctgctgatgttcttgttcttcctagcaaaacacagaataaccaagatagccattgggtggtatactaccgagtttcgtagctctctaacctgttattagtagctaaagtattagctctatttacaacttgacttgagtgctgttggggaaactgaagatggcgatttgaaactgcaaaatcatgagccctatgcactctcccatacgttgataactcaaagcaccacaacatttcaggatcgcagaacgtggaattaaaggcgcatctgtgtgttgagtgctttcagcatacgcaggcccaaaagcctttggtctatggctttgtttaggacagctgctgattgtgaacaaacaacttatttgcttctggttgatgactgcttttagttcattctgaacagcaattgaactagtaagctaatgcataagttgcctgtttggcatagattctacttagctgtgccaaactgggtcatattgtaatacccaaaagtgtaaactatgaaaatagagttgatctccatattttgtggcctctacttatcatcacatatgactaaccctatttaaaaagtgaataataa

SEQ ID NO: 111725 - DNA, 3189 bp, Zea Mays
atgccgttgttcgaacgggatcgctaccagaggctggacggcgtgggcgcccggaggccgccgccgccgccgtcgtcgttctgctcgtcggcaaccgtcgtcgtcttcgtggcgctctgcctcgtcgccgcgtggatgatggcgtcgtccaacaacatcgccgtcaccgtaacgccagagaacaactcgggggccaaggaccaggacgggtccgtcgacgttggcggcgacacgcggcaggcgagcgacgaggtggcggacactggcagcggcacgcagtcgacggaggtgagtggggacgcaggcaagaaagatgatcgtagcggtggcgacgcttcgcagacgaaggaggacgctgatggggacaccgacaacaaagatggtggcgacgcttcgcagacgaaggaaggcgctgatggcgacaccggcaacaacaaggacgacggcgctggcgccacgcagacggccgaacctgtcactactgtcggcaacgacgtcaaccagagcgacgtcacggggagaacggatgcgacagccaacggcactaccagaggcacggacgcagaggactccggagagccagacagcggcaccgttgccgagggcgacacaccggccaggaaccagactttctccgacgagaacggcaagacggagggcggcgaggtggcgaagccggaggaccccgacaaaaaagtcgagcagagcgccgagcagacggcgatcgatggcaacactaccacaagcggacaggatcaggacgagaacaacaccgacaagaacaccaacgaaaccggcggccaggctgacaagagggaggaggaggcgtccactgacgacaagagcaccggcggccaggctgacaacactactgtacaagaggcatccaccactgacgataacagcaccggcggccaggctaacaatagcaccaaggagacaccgacagagtcaaaagagaccgttggcggtgacgacggcacggcccagagccagacgagcttcgacgacatgaatggcagtacgaacgactcgcagcccatgaaagaagacgggaaggtcgccgagaatagctccgatgaaactgccagcggcggcaaggtggaaagcacagacgacgacgcgacaaccggcgcggcgtcaaacaacgcaacttccggaggccagaacgtcgcggccgagaccatggcatttgcagccgcggatgatggcgccaacggcaacatcactgaaaacagctacgcaacgaacagcagcgccacgactgaagggaagataccgacggttggagaaggagacgcggcagagaaagccgacctgctgccgagcgggcaggcggagctgctgaacgagacggcgtcggcggtggcggagaacggcgcgttcccgacccaggcggcggaatcgagcgaggagaaggaggcgctcgcaggcaagaacaagaagaagaaccagaagaaaaagaagcagaagagcaaggaccagggcgccgcctctggcgagacggcggaggggaaggagacgtacgcccacacctggaagctctgcaacgcgagcaccggcgcggactacatcccgtgcctggacaacgaggcggccatcaagaagctcaagagcaccaagcactacgagcaccgggagcggcactgccccgccgacgcgccggcgtgcctcgtaccgctcccggagggctaccggcagccgatcccgtggccatacagccgcgacaagatctggtaccacaacgtgccgcacactatgctggcgtccttcaaggggcaccagaactgggtgaaggtctccggcgagcacctgacgttccccggcggcggcacgcagttcaagcacggcgcgctgcactacatcgaggtgatcgaggaggcgctcccggaggtggcgtggggccgccgcagccgcgtggtgctcgacgtcggctgcggcgtcgccagcttcggcggcttcctgttcgacaaggacgcgctgaccatgtcgttcgcgcccaaggacgagcacgaggcgcaggtgcagttcgcgctggagcgcggcatcccggccgtctccgccgtgatgggtaccaagcggctccccttccccggcaacgccttcgacgtcgtccactgcgcccggtgccgggtgccgtggcacatcgagggcggcacgctgctgctcgaggtgaaccgcctcctccggcccggcggcctcttcgtgtggtcggcgacgcccgtgtaccagaaggtgccggaggacgtcgagatctggcacggcctggagcaatttgcattggttgatttggtactatatcccctgatcccgttcctgtttgaagcagcgatggcggcgctcaccaagtccatgtgctgggagatagtgaagaagacgagcgacacggtggacgagaccgccatggtggtgttcaagaagccgacgagcaacgagtgctacgacgcgaggacgcgcgcggagccgccgctctgcggggcctccgacgaccaggacgcggcgtggaacgtcaccctgcggccgtgtatgcaccgggtgcccaccgacgcgtccgcccgcggctcgcggtggccgacgcagtggccccagcggctggcgacgacgccctactggctgagcgccgaccagacgggcgtctacggcaagcccgcgcccgccgacttcgccgcggaccaggagcactggaggaaggtagtcgacaactcgtaccgcgacggcatgggcatcgactggaagaacgtccggaacgtcatggacatgagagccgtctacggagggtttgcggcggcgttgtcggacatgaaggtgtgggtgatgaacgtggtgaccgtggactcgccggacacgctgccagtcatctacgagcgcgggctgttcgggatgtaccatgactggtgcgagtccttcagcacttacccgaggtcgtacgacctcgtccacgccaaccacctcttctccaagctgaagagtaggtgcaagctgctgccggtgatcgccgaggtggaccgagtcctgaggccggaggggaagctcatcgtccgcgacgacatggcgacggtcaaggaggtccagagcattgcgagatcgttgcactgggaggtgaggatgaccgtgtccaagcaggggcaggggctgctctgcgtcaggaagactatgtggcggcccacgcaagtcgaggcgctgagctag

SEQ ID NO: 111726 - DNA, 2126 bp, Zea Mays
agctgctgggctcgtgacccacgccgtctcggaccaacccgagcgccgaaccccaaggctcgcgaccgcgacactcttgtgtcctcctgctctccagatctcgccgtcggcggcggcatgctcccctccaccgtcggcggccgcggccgctacctcatgctcggcatcgcccttgccctcgctgccctgctcgcgctcgcctccgcttccgagtccgaccacaagtacaaaactgaagagccagttaagctttgggtgaataaagttggcccttacaacaatcctcaagaaacttacaactactacagccttccattttgtcaaccgtctgagaaccctacacataaatggggtggtcttggagaggtcctgggtggaaatgagctgattgatagtcagcttgaaataaagttcttaaaaaacgtggagaagggcttcatttgtacacttgagctagatgctaaaaaggtccagcagtttgctgatgccattgaaagctcatattggtttgaattttttatagacgatctgcctctttggggttttgttggggagactgacaagaacagtgaaaacaagcattatctttacacgcacaagaacatccttgttaaatacaatgataacaggataattcatgtaaatctcacccaagagtctcctacgcttcttgaagatggtaagaaattggaaatgacatattcagtgaagtgggtagcgactgatgtgtcatttgcacgccgttttgaagtgtacctggactatcctttctttgaacaccagattcactggttctccattttcaactctttcatgatggttattttcctaactggtttggtttcgatgatattgatgcggactttgagaaacgattatgccaaatatgctcgtgaagatgatgatctagagtccctggagagagatgttaatgaggaatcaggatggaagcttgtccatggcgatgtatttcggcctccccaaagtttgatgtttctttctgcacttgttggtatcggtacccaattggcagctcttatcctacttgtgatcgttttggccatcgttggcatgctatacattgggcgaggggctatcatcacaaccttcattgtgtgctatgctcttacatcttttatttctggatatgttagtggtggtctttactcaaggaatggtggcaaaaactggattaaagcgatggttcttacagcgtccctgtttccgttcttgtgtttctcaattggcttcgcgctgaatacaattgctattttctaccgctcattagcagcaataccatttggaacaatggttgtcatgtttgtactttgggctttcatctcctttcccttggtgcttttgggaactgtcgttggtaggaactggagtggagctcctaacaatccctgccgagtaaagactattccacggcctattcctgagaagaagtggtaccttacaccttctgtcatctcattgatgggtggcctgcttcccttcggtagcatcttcattgagatgtactttgtgttcacatcattctggaactataaggtgtattatgtctatggcttcatgttgctggtctttgtcatccttcttatagtcaccatctgcgtcactattgtgggtacttatttcttgctgaacgccgagaactaccattggcaatggacgtcgttttcttctgcagcctcaaccgctctgtacgtgtatctgtactccatctactactaccatgtgaagacaaagatgtcaggcttcttccagacaagtttctatttcggctacacgctgatgttctgccttggcctaggcatactttgtggagctattggctatctagggtcaaccctttttgtaaggagaatctacaggaatatcaaatgtgattaaatccctgctgcttaagctagcaacagaaaaatcatatgtattgtcaggaggcatggcctaaaaaaatggattttaatggtagaccctgattttggaactgctgaggacttgctcccctttgttcgttgttatacgcatttttgtttgcctgcttattcctgcgagatcgtcctcgcaatgtatacctgtgatagtcgagcattagtctggagcacctgtgttcatcattc

SEQ ID NO: 111727 - DNA, 1084 bp, Zea Mays
ccaccacatctaatccttcctcccagctggtccctgcggccgctgctgctcgtccctacaagtatatcaaccaacagtgctcacatcatgcactctgtggtgtcttggtagtagttgttggggtagctagctagagagagcagcaggccagcacagcagcatggggaggtcgccgtgctgcgagaaggcgcacacgaacaagggcgcctggaccaaggaggaggaccagcggctcgtcgcctacatcaaggcccacggcgaaggctgctggaggtcgctccccaaggccgcgggcctgctgcgctgcggcaagagctgccgcctccggtggatcaactacctgcgccccgacctcaagcgcggcaacttcacccaggaggaggacgacgtcatcatcaagctccaccaggtcctcggaaacaagtggtcgctgatcgccgcccagctgccggggcggacggacaacgagatcaagaactactggaacacgcacatcaagcgcaagctcatcgcccggggcatcgacccacggacgcaccagccggcgagtgccgccgcagttgcccccgccgccgccgccgccgccgccgcgcaaagcagctttcgccaccatggcgacgacgaggcggtggcgcggcgcagctgctcgcgagacagcggctgcatcgcggcgcacagcagcgacgacgacgacagcacgtccgggtccctgccacaccaacatgctgtcggcggcatcgacctcaacctctcgctaagcccaccgacgagccaaccgtcatcgccggccgccgccaagggagttgtagctagcggatatggccaagggagtgagagctagctgtacctcctctgcactgccacgatgatggttgtcaattgttgttagctcctcctcctcgtcttatgttcttccatgcaggccggaagatcctaaagagaacgtgtgcgtgcgtgtgagaattaaactcgtgtctgttgttcgatcgggcgctctaagatttggccatgccccatgcatgaggaaccctgcagggccctcctactttttgagactcaccttcgctttgcagcttcaccaaaa

SEQ ID NO: 111728 - DNA, 160 bp, Zea Mays
cgcaatcattcatcgtgtaatacccaaaatactaactttaagaatatggggaattctcctatgttttagacaaacctattatctaacaatagattagaaacaagattcccttttagaaaaaaaacaactctttggttgaagttcatatttaataaaaaaa

SEQ ID NO: 111729 - DNA, 1578 bp, Zea Mays
gtcacccacgcctaaaaaaaccgtaatagcaaaaacgactccacacggtccacggcgtcttctccggcgaaccttcgcgagccctcggctcccctctaccaccgctgccgcgaccccgcctccggagcatcctcgggtagcgctctggcttcccgtgccgccggacgtcctgcaggaggcggcggcctccgtggcatgttgatgagggccgccgctgccctccctcgccgatcgtcgcggccctcggagccggggtcctcctcctcccgggctcccgcccctggggcctcctccagccgggctcctgcccctggggcctccttcgaccccttcgatgtcgataccgacccgccatcacggcctgagctgacgcccgagcagatcgggctttgcgtcgacgcgctcgcgcatttcgagtacaaggggaagcgccgggatgacttgtccgacgagttcagaagcctctcggtatcggatattagacatatgaaaacgatcagtgtagctcattatcctgttaatagagagaagaaccgatatattgatgtcttaccatttgacgataccagagtacagctaaaatcctcagcacggcctccaaacaacgattacatcaatgcaagctttataaaggctactgagaacaacagagttgcaacatttatttctacacaaggtccactagtgaagacatttggagatttttgggaaatggtctttgaatatcagtgccctgcaattgtcatgctcacccactttgacagtattaagtgtgataaatatcttccactgggaagtgaacggcgaacatatggggattatgatatcaagattacaaagacaagaacagatagccaccatttacagttgcgtgatgtcaaggtgcaaaacatcgagacaggcaaggttcattctgtactccatatagaatatcctgattggcccgaccatggagtggcaactaatacagatgctgtacgggaaatctggaaacgactgcatcacattccaacggaacatcctatagttatccattgcagtgcaggaatcggaaggaccggtacttacatcacaatccatactacaattgagcgaattcttcttggagataaaagctcttacgatcttgccaaaactgtaaagaattttagatcccaacgacctgggatggtccaaacagaagaacaatacaagttctgctacagggcaattgctgacgagctgaaagacctgctaaattcagatcattgaggtgggtcacatgagacggacagcaacgctgttagcatttattacgtttttttagacatttctatgtgaaggaacacttaccctttagaggagtgaattagtcaatctcatttctctttaaactactgagctatgtttgttctagtcaaaatctatgtaataaaaaatctatcatatgtgaagctatgctatgtttttgactaatcgttgctattactaccgtaaaggagtacgatatgaaggcggaagcttaaaatgagatagagatatgacatttcgtaggtgtgctgatgttttttatcgagggattgaaaatcatgcaagctt

SEQ ID NO: 111730 - DNA, 758 bp, Zea Mays
tttaaaacagaaatatttcatctgccgtgttgatgaaatatgcattaatgacagtgtgataaatatcttccactgggaagtgaacggcgaacatatggggattatgatatcaagattacaaagacaagaacagatagccaccatttacagttgcgtgatgtcaaggtgcaaaacatcgagacaggcaaggttcattctgtactccatatagaatatcctgattggcccgaccatggagtggcaactaatacagatgctgtacgggaaatctggaaacgactgcatcacattccaacggaacatcctatagttatccattgcagtgcaggaatcggaaggaccggtacttacatcacaatccatactacaattgagcgaattcttcttggagataaaagctcttacgatcttgccaaaactgtaaagaattttagatcccaacgacctgggatggtccaaacagaagaacaatacaagttctgctacagggcaattgctgacgagctgaaagacctgctaaattcagatcattgaggtgggtcacatgagacggacagcaacgctgttagcatttattacgtttttttagacatttctatgtgaaggaacacttaccctttagaggagtgaattagtcaatctcatttctctttaaactactgagctatgtttgttctagtcaaaatctatgtaataaaaaatctatcatatgtgaagctatgctatgtttttgactaatcgttgctattactaccgta

SEQ ID NO: 111731 - DNA, 1168 bp, Zea Mays
atggatagaaggatggatgtggctaagaaaaaatgggtgcaaattaaatataagggccttcaagcaaaaactccaactgtatatttatgcacagagacacacatacacacaactgactccaacgggccgccgggaactgcagcaaactctcctcgctgcactgcacacttgactctccttcgtgtctccccccaaccccaattccccccaacccaagccatgcgagcatctcaggaccatgcgccgcagccactgcctctgcctctgcctccacctccgctatctctcccgtcgcctcccgccccgcctcggcgcgggcgccaccgcagctcctactcatcatcatcctccgcctcctccatctccagcgcgtcgtcgaccttctgcccgtcgccgtcgccgtccccgcgcgccagtaccgccacctcgctcgtgccattttcgtgggagcgccagccgggcgtgcccaagaactcgtcccgcgtcgggctggcctcgcccactggcactggcacccctctgccgccgccgccgctccgcccggcccctcgacggcggcgcgccagggacgacgaccccttcgtggccgccttcgccgagtgcaccagggacgacgacgacgacagcatcagaaagctctggccagtgacggcaaagccagcagcagaatcgtccgggcgcgccgagcgctggtggtggatcgctgccggcggcggcggcgggctcgtggccttcctcgacctgcacgggtgcaagagcgccgtggatgtcgctgacggcgccgccttccacccccgccggctcgtcgccgccgccgccgccgctgcaggtcccagggcggtcggtcgtccagggaagccgaagatgagtaattaacagaggtgtgtcgatctgatcagaccttaatataactgcacgggaaacgggttccgttgatgttcttgcattgggaacgttgaaatatgtatgatcagagacgcaattttttccttgtctagatttgggctctgtgctagcttgatgaatgatcaagtccccttgatgatgtcgtcccataatacaagtggggaggttgttgcctcgcgatatcgagcatgtgcttgcatattgttttgatctttggtttgtgaatttgatttcatgtacgctcgatcatgaggttcgtcgt

SEQ ID NO: 111732 - DNA, 1567 bp, Zea Mays
ctggaatagaaaaccacaaacctggcagccctccggctgatccagcgtcttcctcgccatcgccgacacgctcaccggcgatccactgctcggctcacgtccggcgtaggcgcgtcgtggccacgggtcgtcacacggtgctctcagcgaacttgccccaccggcccgcccttcccgggccttacctgattccccgtcctccagcgctgggcgctggctgtgctgcagcgtagccgcacctccagacctccgccgggtcccctggctgctggcgacgaacgcccctgcgcagtgcgtgtgcgccagtgcctgccggcggccgaccgcagttctttgccttgcctctgttgctcgtcttcttgcatttctgatgggtctcaatgccgtggtggccgcttgctacgcccttccagtactcatctctgtgctcacagtccgcttcttctacgtgttgtggcacagtggccaatcagcatcgagaccacgcaacaccagattgcgttgtctcatcatccttggctccggagggcataccgcagaaatgatgaatattgtaacaacgcttcagaaggataggttcacaccaagatattatgtggctgcacttactgacaacatgagtcttcaaaaggcagaggtctatgaacaatcgcttattcagagcgatggaatgaagactgccgagagtgctcatttcatgcagatatatcgtagccgtgaagtaggccaatcttacattacatccatcgcaacaacattgctagccacattgcatgctatgtggctagtaataagaatcagaccacaagtgatattttgcaatggtccagggacatgctttcctctatgcatctcggcgttccttctgaaggtagccctcacaccctagattctatgcttgcttacttgatgcaatatgggacttgtgccattgatctttggaggataaatgggtaatattgccattgatctcacttgcgattgctaatttattcgccccagattttaagttgatgccatatttttctagtatattactaatttaagatcactgtgtttctgtaggtgcttagtttgggatggtcctccattttctacattgaaagtatttttttatctaactagtttaggatcgatgtatttctgtaggtgcttggtttgggatggtgctccattttctacattgaaagcattgcaagagtgaagaagctgtcattgagcggtttactgttgtacaagctacggatagctgaccagttctttgtgcagtggccccagctgcagcataagtatcctcgagcatgctacgcaggtcgtttgatgtgaagattccaccataactaaggggttcagaatacaatgacaatatatgtatacttcgacaaatacaaatgtggctgccttaaaaagaaaggctttacaacaaacaacgcatttcatatatgcgggcatggaaatgctagttacgcatatagtgttttggttttgggagtttaccattctagatgggatggttcattgtaagttcaaacctcaaattgagtgaaatgactccgtttctcgtgct

SEQ ID NO: 111733 - DNA, 1356 bp, Zea Mays
ctggaatagaaaaccacaaacctggcagccctccggctgatccagcgtcttcctcgccatcgccgacacgctcaccggcgatccactgctcggctcacgtccggcgtaggcgcgtcgtggccacgggtcgtcacacggtgctctcagcgaacttgccccaccggcccgcccttcccgggccttacctgattccccgtcctccagcgctgggcgctggctgtgctgcagcgtagccgcacctccagacctccgccgggtcccctggctgctggcgacgaacgcccctgcgcagtgcgtgtgcgccagtgcctgccggcggccgaccgcagttctttgccttgcctctgttgctcgtcttcttgcatttctgggactttttagttaggcacaccctgtattctaatcttgggtcttcaccgcatggaaacattgatgtacagcaccacaatagagagtagattaagatgggtctcaatgccgtggtggccgcttgctacgcccttccagtactcatctctgtgctcacagtccgcttcttctacgtgttgtggcacagtggccaatcagcatcgagaccacgcaacaccagattgcgttgtctcatcatccttggctccgaaggataggttcacaccaagatattatgtggctgcacttactgacaacatgagtcttcaaaaggcagaggtctatgaacaatcgcttattcagagcgatggaatgaagactgccgagagtgctcatttcatgcagatatatcgtagccgtgaagtaggccaatcttacattacatccatcgcaacaacattgctagccacattgcatgctatgtggctagtaataagaatcagaccacaagtgatattttgcaatggtccagggacatgctttcctctatgcatctcggcgttccttctgaaggtgcttggtttgggatggtgctccattttctacattgaaagcattgcaagagtgaagaagctgtcattgagcggtttactgttgtacaagctacggatagctgaccagttctttgtgcagtggccccagctgcagcataagtatcctcgagcatgctacgcaggtcgtttgatgtgaagattccaccataactaaggggttcagaatacaatgacaatatatgtatacttcgacaaatacaaatgtggctgccttaaaaagaaaggctttacaacaaacaacgcatttcatatatgcgggcatggaaatgctagttacgcatatagtgttttggttttgggagtttaccattctagatgggatggttcattgtaagttcaaacctcaaattgagtgaaatgactccgtttctcgtgctaatactgatgattagcc

SEQ ID NO: 111734 - DNA, 1306 bp, Zea Mays
ctggaatagaaaaccacaaacctggcagccctccggctgatccagcgtcttcctcgccatcgccgacacgctcaccggcgatccactgctcggctcacgtccggcgtaggcgcgtcgtggccacgggtcgtcacacggtgctctcagcgaacttgccccaccggcccgcccttcccgggccttacctgattccccgtcctccagcgctgggcgctggctgtgctgcagcgtagccgcacctccagacctccgccgggtcccctggctgctggcgacgaacgcccctgcgcagtgcgtgtgcgccagtgcctgccggcggccgaccgcagttctttgccttgcctctgttgctcgtcttcttgcatttctgatgggtctcaatgccgtggtggccgcttgctacgcccttccagtactcatctctgtgctcacagtccgcttcttctacgtgttgtggcacagtggccaatcagcatcgagaccacgcaacaccagattgcgttgtctcatcatccttggctccggagggcataccgcagaaatgatgaatattgtaacaacgcttcagaaggataggttcacaccaagatattatgtggctgcacttactgacaacatgagtcttcaaaaggcagaggtctatgaacaatcgcttattcagagcgatggaatgaagactgccgagagtgctcatttcatgcagatatatcgtagccgtgaagtaggccaatcttacattacatccatcgcaacaacattgctagccacattgcatgctatgtggctagtaataagaatcagaccacaagtgatattttgcaatggtccagggacatgctttcctctatgcatctcggcgttccttctgaaggtgcttggtttgggatggtgctccattttctacattgaaagcattgcaagagtgaagaagctgtcattgagcggtttactgttgtacaagctacggatagctgaccagttctttgtgcagtggccccagctgcagcataagtatcctcgagcatgctacgcaggtcgtttgatgtgaagattccaccataactaaggggttcagaatacaatgacaatatatgtatacttcgacaaatacaaatgtggctgccttaaaaagaaaggctttacaacaaacaacgcatttcatatatgcgggcatggaaatgctagttacgcatatagtgttttggttttgggagtttaccattctagatgggatggttcattgtaagttcaaacctcaaattgagtgaaatgactccgtttctcgtgctaatactgatgattagcc

SEQ ID NO: 111735 - DNA, 1422 bp, Zea Mays
ctggaatagaaaaccacaaacctggcagccctccggctgatccagcgtcttcctcgccatcgccgacacgctcaccggcgatccactgctcggctcacgtccggcgtaggcgcgtcgtggccacgggtcgtcacacggtgctctcagcgaacttgccccaccggcccgcccttcccgggccttacctgattccccgtcctccagcgctgggcgctggctgtgctgcagcgtagccgcacctccagacctccgccgggtcccctggctgctggcgacgaacgcccctgcgcagtgcgtgtgcgccagtgcctgccggcggccgaccgcagttctttgccttgcctctgttgctcgtcttcttgcatttctgggactttttagttaggcacaccctgtattctaatcttgggtcttcaccgcatggaaacattgatgtacagcaccacaatagagagtagattaagatgggtctcaatgccgtggtggccgcttgctacgcccttccagtactcatctctgtgctcacagtccgcttcttctacgtgttgtggcacagtggccaatcagcatcgagaccacgcaacaccagattgcgttgtctcatcatccttggctccggagggcataccgcagaaatgatgaatattgtaacaacgcttcagaaggataggttcacaccaagatattatgtggctgcacttactgacaacatgagtcttcaaaaggcagaggtctatgaacaatcgcttattcagagcgatggaatgaagactgccgagagtgctcatttcatgcagatatatcgtagccgtgaagtaggccaatcttacattacatccatcgcaacaacattgctagccacattgcatgctatgtggctagtaataagaatcagaccacaagtgatattttgcaatggtccagggacatgctttcctctatgcatctcggcgttccttctgaaggtgcttggtttgggatggtgctccattttctacattgaaagcattgcaagagtgaagaagctgtcattgagcggtttactgttgtacaagctacggatagctgaccagttctttgtgcagtggccccagctgcagcataagtatcctcgagcatgctacgcaggtcgtttgatgtgaagattccaccataactaaggggttcagaatacaatgacaatatatgtatacttcgacaaatacaaatgtggctgccttaaaaagaaaggctttacaacaaacaacgcatttcatatatgcgggcatggaaatgctagttaccgatggttttggcaatgttactgtatgtgagtgggcttatcaagttactgcagactgtaaagcttattttgtatgttttgagagagattatctgtttataattgttcctggccccatttgatgattctggtcatcaatt

SEQ ID NO: 111736 - DNA, 681 bp, Zea Mays
atgaaggtcggtcccgccgtgggcggtggcggcggcggccacccatcgtcgatcatcaccaagcataccgcgcggtcagggtcctcgcgctccatcgccaacctttggcacgccacgcaatcgggatcgcatcagcaagaagcagcagatcgcgtggacacagcgacgtccgtcaccgacccgctcctcgagtgggcacgcgaggcgcactggtccatgcggggtctccccgcagtaatctccctaacccgcgccaatctccctccccgtaatggcgtgccaaagcaattacagccatacatgctcagatccagtttccctcgagttccagaaactccgcccccaatagccctcgcgtttgtagatctcgcgtcctcgatggaagatggagttctagatcagcgcggcagggtccacggcactgtgtcgggggcagcgttggagttggaaaagggctgcgtcgcgaccgcggagggaacaacgccaatgagcggtggaggtgttccactccacaaccctccaaccccgccactgccatccaaccacgtcggcgccgaggtgtactaccttccctacgtcaccgacgtcgagtactacacgaccggtggtaagaagatatcttccacctcgatctactttgagagcctgccgatcaacccttcactggatgatatacaatag

SEQ ID NO: 111737 - DNA, 579 bp, Zea Mays
atggaaggtcgtttgtaccacgccgtggatccaccactcagtaccgcgccgtggatggcagacctcccagtaccgtgcccgcgctgtccgcgcatcactagcagcagcagccgcagacctagacaccaccaccaccaggtcgccgtgccagagagcttgggggttaggcggacgacgcagatggcggggaggtctacgacaggcttaggccctagcacaggaagtttcttgcgtccatggctagctctcgtggccctcggttgtccgcctcaccgtcgtgcccttcatgttccccatcgagaaggtccgaccttctctgatctccatcttgcccctggcaagctcgtcactgccaccttgttatcattgataacgtcactagatgttctgaagatggacagtgcaaataggattaatgagaggtgcttggaactgcagaagaacaagaagagtaccaaaactaagcttgaggatgataaacgaaaggtgcgcccagcaaagcgctcttgtggttgcccgacaattctatcaaggtgcaatttatcaggtgctgagtgtaatgtaccatttctgctttaa

SEQ ID NO: 111738 - DNA, 927 bp, Zea Mays
atggggagaggaggaggaggaggtggatccagggcgtccatggcggggaaccgaggtgccagggcgggagtacggtggatccgcagcgcccttcgggcgagattcacgacgggggaaggggcgcggtggaggggtgcggcgagggcaggcggcggagtgagagggagaggcagaacccgagccgaggacgccacgctcgcctacaacgccgccgcgctccgcttctgcgacggctgcgccaagctcaacttccccgaggacaccgccgcgcgccacgccagggacgccgaggcggcctccgccgcggccagggtggggcctcccgccgcgctgctcgactcgcaggtcgtcagcgacgacatggccgattacctcgactattcgaggattctcgaagccaccgagcctagcggccacgggaacggacgcttcgtcggctccgggtttgaaatgggctcggtggcggccgacgcggacgaggggcggtggggaagggacgctctcgtcgctcctcatctccgcgccgctctccttctcctcctcccgcgcgctgctcatctccttctcgccgctcccctccgcgacctccgtcgagcccatcttcgtcgaggccccacgcggggcgccgtgcccaggatggcgcgggggacggtgctgcgcggttgtggtgggaggggcatggcgggctgcttccatcacgcgtgggagggtgcacggttgtggctagcgcgagatccgcgggggcaagatccgtggcggggcgacgggggaagaatggaagggcaggcgggggtagggcgggggctggcgcgagatccgcgaggggcgagatcgggggcggcggggaaggactgcctgcttccatgcgcgtgcgtgggagatcggcagaaccgtgcaccatttcccttgtgtggacgcctacattag

SEQ ID NO: 111739 - DNA, 1045 bp, Zea Mays
gcatatgagagtgaagtatctccagagatttcctcacaatagtttgctaggctcatatggaatgctgcattgctatgccactgatatgttggcagtagatttcaccatcgtgcaggtgctgtcagtggaacctctgctattgggcactgttattcaaacggtagtcggttgcccccttcgttgctcattttgtgccacggggaagggagggtttgcaaggaaccttcaaccacatgagattgttgaacaggtgttggccatcgaggagacgttcaaatacagggtgacaaatgttgtgttcattgggatgggtgagcccatgatgaacctcaagtcagttctagaagcacaccaatgcttcaataaggaactaaaaattggacaaaggatgatgacaatatctacagttagtgttccaaatacaataaaaatgctagcatctcacaagcttcagtcaacgctggcagtcaggagaaaatattactcagcgacattactaacatggctagagtggatttcgtggccagctgggattaacgatgaaaaagagcatgccgaagagctagcagaactacttcgtatgtgtggaggtggttaccatgtgaacctgattccctataacccaattgaaggctccgagtacaagagaccttacagaaaagtggtccaagcctttgttgatgctttagaagcacgcaagataaccgtcagcgttcgacggacccgtgggcttgatgctaacgtagcctgtgggcagctgaggaatgcgtttcagaagaatccactacttgagattgaaccgtcaccctccatagagcggaccctcgtaactgcttaattcaaacacctatcaggttgatgtagcatgttcaagcatacggaattgtcatttaatttatggggacattaggtgttgtaaagtgacaacaagttatgcataacgctagagaattttggaacgttctgtccgtgcccatctgatgtcatgagtggcaattatggaattaccacacttgtcttagatattataaacccatctttgtca

SEQ ID NO: 111740 - DNA, 1481 bp, Zea Mays
aggataaaaatcgcgcgcacccggcctgagctcctgcgcgtcttcttctccgatcttcctgcgctcgctccgcattgaagctccctgctctcttccctgtccgagcgcgcgctcctgctgcttgcttcccccgattctccagttcgagctcctctaccgcgcgcatctctgctggccgcagccggctccttgcgccgtccatggctgcgcccctggctcggattccaacgccccgctgcttgccggtgctcgccacacgcgctgtggtctcctatttcttccagcgcgtccagccctgccatggacgccggtgtcctctgctcggccggagctctgctcccccagctcctctgcgcgtcttcttccctgcgcacggcctgtcccagctcctgcgcgcgttcctgtgctcgcccagccgtcgagcttccttgcgcacgcgtgcttcctccctgcagcgcccctcccttgctcggcttttcaccggcgacgatggtcgcgctcgcccagtccttggtcgcgcccagccggagttttctccctgctcgacttcgactgccgttcccccgcgctcgcgttttccattattccttgcctgtactcagtttcgagttcgagcgcggtctgttccttcttcaccggttgattggttctgctgctgtgcgtttttgtactcttgcagatctctggtagtcgcgcccagtcgagctctctgctcacgcgcagctcgctatttctttgatggccgcgcgcacgaaaattctctactcgcaatcgcaacagcctgtcgagtttcctcgtcgagtcttgccgcgtgtccctgcttaccgtctgtccatgcgtcgtgcgtcgagcaacgaaacaaaaatctgtgcgcatcgagctcacgcgccgaatctttttctagctcgccgcgacgtccagtgtcctgtctgctttgctcactagcgtcgtctgcttgctggtctcattctaatttgatttggaattattgcatctcagccttgatctgtcgcggccgccgtcaaatcgtcagtcgttcaactcgccgattcgcatcttagtcggtcgtcgatttcctgttcgccatggtacaacaccgctgttaaatccggtctccaacccgccatgtcgttcgtcgtcctctagtcccagtttgacccatccgtgtgttcgctcttcatccatcgggtttcgcgcgtgctcgcgtttgccgtcgagtcgtcgaacccatcatccccgctcgatccccacctcaccagctcgctccaaccttcaattaaaggtcgtcgtcgatccgtgcgtcatcaaaaaattccaataatcaagtgaagacggagccagcagcgtaatattcatcaagtgcgcgacaaaaagctcgagccaagatttatcagcaatcgtacgagtattgggtcgcgtttgatactggtaaaccgatttataatttttgtaagtttatctgatgattggattaactagaa

SEQ ID NO: 111741 - DNA, 2025 bp, Zea Mays
gggcgcagcactgcagcagccccacgcccccacccggccaccctgcgctgtctgccccccgcccccgctcccccttggctggctggctgtggatgcgcctgcgctcctccctcttccctcccaaccccacccgcgccccacccaaccccgcgccgcctctcctccttcccccaccgtgagtgccctgcacgtgctgcctcctccgccatacctccggccgccgccagaccttccggaagcgaaagacgccgcttttccgtccggttcttcggtgcttcctttggcagccgagcgcgaaacgcgtctcgggagcatggaccacggcggcgggggcggggcgccgtccagcagcaacagtggcggggcggccgccgctggcggcggccgcgggggcgaccaccacccgttcttctacgccgctgctgcggcgtccaactccggagtgccgcagcagcagcagcagcagccgtcgccgttcacgggcgcgctcgctatcacgcccgtcccggagcagccccagccgtcgccggccgcgggcggcgacaagaaggcgctcgtaccggcagcccccgcggcggcggggcccgtggtggccaagcggccgtccaaagaccggcacacaaaggtggacgggcggggccggcggattcggatgccggcgctgtgcgcggcgcgggtgttccagctgacccgcgagctcgggcacaagtccgacggcgagaccatcgagtggctgctgcagcaggcggagccggccatcctggcggccaccggcaccggcaccatcccggccaactactcctcgctgaacatctccgtccgctccggcgccgccaccccggcccgcgccgccgcgccgttcccggcgctcgcgctccacccgcaccaccaccagccgggccccgcgcagcagcacgacgtgtccgccatgatggcggggtaccaccaccaccaccacctcctcccgtcccctcagcagcaggaccccagcgccggcggcgacgcctacacgcggaagcgctaccgcgaggacttgttcaaggaggacgacgaccgccaagaccctcgcgcgcccaaggcgcgcgagcagcagcaggcggctacggcgccgccttccgcggcaatgtgggccgtggcacccaacgccgcggccccgtccggcgggttctggatgctgcccgtgtccgcgagctcggccgagcaacccatgtgtacatggcccttcagcggcggcggcacgggcaccgtgcaggcgcctctgcagttcatgtccagggccagctaccccagcggtgctgcaggaggagccatatcggacaccaaccttggcatgctcgccgcgctgaacgcgtacaaccgcggcggcagcgaggagcagcagcccgagggggagcagcagcacggcgggggcaacatgctcgccgcgctgaacgcgtacaaccgcggcggcagcgaggagcagcagcccgagggggagcagccgcacggcgggggcaacgacgacgacgacgaggacggcgacgacagcgccgaagagaacaacggcaacgacagctcacagtaagctcgcaagacgatgatgagcactgagtgagcagggaatccagccgccaccatgatcgcgtctttccggtagcaaagccacccgcatcggacaggtgttgagagcaaagagttgtggtcctgttcgccggaggatcgccccgcgctgcgctgtcgccggattggggttacgatgattggacggaggaaacggcgtgctagcttttccgcaggaagcaagcaaagccaagccaagcgaatgcaggagcgaaacttcttgctagttcactagtgttctttttttttttgtttgtttgtttttgaattcgtttctgctgattttttgttggattgttgtatgaatgattgcgctgttgtgacgggtgattagtgggtccggattaggaggagcccaaggaaggacaggagcctgagttcgacagggatctgtgtgtacagctgatggaccgtctgagttttttt

SEQ ID NO: 111742 - DNA, 114 bp, Zea Mays
gacttctcgacctaaattaggtatatataaaacttgcatgatgttaacaacatggtgtttcaatccacttaagattttgaatgataagggtcgatacaacatacaccaacacta

SEQ ID NO: 111743 - DNA, 1385 bp, Zea Mays
tccccctccccctccccctccgacccatccccgccgagaactccatttcccggctcgcaccgaggccaaggttccctcgtcccttctccaggcggcgcctacgccttcccgccctcctccaagtccaatgcctcgcggccaccggccccgccgcgcccgcgccgcggtggcacgcggcactgtccgccgcggcggggctgtacccggcctacgtcgcagccggcgcctccgtggccttcacgcggcccgaggcgttccggtggttcgtggcgctggcgccggggtcctacaccgctacgctcggcttcatcatgctcgccatgggcctcacgctccagctcagtgacttcgccgccctcctccgcgacaggcccctcgccattttgttcgggtgtgccgcccagtacaccataatgcctgcgtttggcgctatcattagccacgcgctggggcttcccccgtcgctctcagctggcctcatcctgctgggatgctgtcctggaggaactgcatccaatgtggtgactttagttgctcaaggcgacgttccattatccgtcgtgatgactgtctgcagcactcttgctgcagtgttccttactcctctgttaacgaaaattcttgctggtgcttatattcctgtggatgccgttaagctctctctcagtactttgcaggtggttgttgccccaattctattaggttcattgatacaaactgcattcccatcagtagctcaatttctgagtccttttgcacctctgatggcagtcttggcttcatcacttctagcatccagtgtcttctctgagaactttgtgcgcctaagatcgacaattgccgatgcatcccctgtgaatggaatgttctttggggatgtagggactgtcatcttctctgtcttcttgctgcattttgctggtttctttgtcgggtatgcagcagcagctataggtggtttcaaagaaaagcaaaggagagcaatatcgatcgaggtaggaatgcagaactcgtccctaggggtagttttagcaaccgcgcatttctcctcgcccttggtcgcgctgcctcctgcagtctcggccgtcgtcatgaacatgatgggtagcacactgggtctcgtatggcaatataccagcacttccgtgtcagagaacgaaaccagtgcgtgatctactcttactgtcgccatgtgcttaatctaatgtgtcgtatctaccaccaccaccactactactacccgaatatacctttcgagtacttttgatcatgttggggaacggggtcgctgatgatgaccctggaatggaaaaaatcttgctgtcttaattactggaggacccaggttacctgtctgaattatgtgggtggtgaatgcccaggct

SEQ ID NO: 111744 - DNA, 2808 bp, Zea Mays
caaataatagaattaaaattacatctcattttaatatcatgactgatttaatattgaatccaattcaattctatatcttctaatattgacatccaaaagtaggagtgtataactgtatatatttgattaaacagatccagtaagtgagtggcaagagatacttggataataaagggaggaaaacaaattaaattataataaaacaactagaaagggaagtttccgaccacgtcgtcttcctcctgtctccccctctcctccgccactaaccaaggaggcgaagacgataaccaccgacgtgccttcctccccacatgccctagcgatccgttctcatttgcagacccaatccaagcccagagcaatcaccaagcctggcagattagatttccaccctcacatggaggaaaaatccaaccttcgcatgtgacctctatttaaatccccgcaagaatcgatcaatcaatccaaaagggtgcaggaaaacagagcaatcccgttgcttagcgtgttcgccttgccgttggcgtctcttctccgttcctcggcacgcgtaggcccataaacctccgctaaagctcctttgtcgcgcccatttcgtcagccatttcccagattccccataggcgagggttcccgggctgagatccaatcttttcagttgttcggtttcaatcggtgtaaattcctccagaaagaaacctagaatcgcccccccatagttggaaaaggtttccatttctgaccggttgtcgagcctggctacgttttgccgagcaaaggcagggcgtccgttcggttacggttcttgatccggcgagggaccgccgctgccgaaggcaatgcagccggacccgcaaggcccgggcagggggaaggcgggcggcgccaatgcgcacccgcggctgccgccgccggtgacggcggggtcggctgggcggccggcgtcggtgctgccgcacaagacggacaacgtgcgcgaccactaccgcatcgggaagaagctggggcaggggcagttcggcaccacgtaccagtgcgtgggcaaggcggacggcggcgagtacgcgtgcaagtccatccccaagcgcaagctgctgtgccgcgaggactacgaggacgtgtggcgcgagatccagatcatgcaccacctctccgagcaccccaacgtcgtccgcatccgcggcgcgtacgaggacgcgctcttcgtccacctcgtcatggagctctgcgccggcggcgagctcttcgaccgcatcgtcgccaagggccactacaccgagcgcgccgccgcgcagctcatcaagacgattgtcggggtggtgcaggggtgccactcgcttggcgtcatgcaccgggacctgaaaccggagaacttcctcttcgcgagcacccctgaggatgccccgctcaaggccactgattttgggctttccgtgttctacaagcccggtgataaattttctgacgttgttgggagcccctattatgttgcccctgaggtgcttcaaaaatgttatggcccagaatctgatgtatggagtgctggagtgattttgtacattttgctatgtggtgtacccccattttgggcagagagtgaagcagggatcttcaggcagattttgcgaggcaaacttgatttggaatctgaaccatggccaagtatctctgatagtgctaaggatttagtccgtaagatgcttatccgcgatcctacaaagaggttcactgctcatgaggttttatgtcatccatggattgttgatgatgctgtcgcacctgataagcctattgattctgctgttttgtcaaggctgaaaaacttttctgcaatgaacaagctcaagaagatggcattgagggtgattgctgaaagtctatctgaggaggagattgggggtttgaaggagttgttcaaaatgatcgatactgacaacagcgggacgataacttatgatgaactgaaggatggtctgaaaagggttggctcggacctgatggaacctgaaatccaggctttaatggatgcagctgatatcgacaacagcggaaccattgactatggagagttcttggcggctacgttgcacatgaataaactggagagggaggaaagcttggtgtcggcgtttgcgttcttcgataaggacgggagtggcttcataacgatcgacgagctctcacaagcatgcgaacagttcggtctttctgatgtccatctcgaggatatgatcaaagatgtggaccaaaacaatgacggtcagattgattatagtgagtttgccgcgatgatgagaaagggcaatgctggcggagcaggacggcggaccatgaggaacagcttgcatgtgaatcttggcgagctcctgaagcccaccgagacctagttttttttaaccagaggatcctgcttcccagatgcgccccatctgaaacttaccgtgtgcctcatccgctttcacagatcgattagttgatctctagtagcagcgccaaaagcagtttaagattttctcagtggtactagtagtgaggggaaaatagcatcctgtggtgccagtgagagattttaggcgctgaagacgacgtgctatgctactccggagtcctgttgtcttcttcttcttcttgttgttgttgatttcaggtttgtactattactgatctttgttgtaaaatgcgctgttgtcccatgaggtaggcacctaggtctcctccatttgaattatatcaaacggatttgtaaacacgttctcatgcatgaaaccatttcttaatgatgatttattgtgtgcttttttcccc

SEQ ID NO: 111745 - DNA, 2174 bp, Zea Mays
aataaaacaactagaaagggaagtttccgaccacgtcgtcttcctcctgtctccccctctcctccgccactaaccaaggaggcgaagacgataaccaccgacgtgccttcctccccacatgccctagcgatccgttctcatttgcagacccaatccaagcccagagcaatcaccaagcctggcgagggaccgccgctgccgaaggcaatgcagccggacccgcaaggcccgggcagggggaaggcgggcggcgccaatgcgcacccgcggctgccgccgccggtgacggcggggtcggctgggcggccggcgtcggtgctgccgcacaagacggacaacgtgcgcgaccactaccgcatcgggaagaagctggggcaggggcagttcggcaccacgtaccagtgcgtgggcaaggcggacggcggcgagtacgcgtgcaagtccatccccaagcgcaagctgctgtgccgcgaggactacgaggacgtgtggcgcgagatccagatcatgcaccacctctccgagcaccccaacgtcgtccgcatccgcggcgcgtacgaggacgcgctcttcgtccacctcgtcatggagctctgcgccggcggcgagctcttcgaccgcatcgtcgccaagggccactacaccgagcgcgccgccgcgcagctcatcaagacgattgtcggggtggtgcaggggtgccactcgcttggcgtcatgcaccgggacctgaaaccggagaacttcctcttcgcgagcacccctgaggatgccccgctcaaggccactgattttgggctttccgtgttctacaagcccggtgataaattttctgacgttgttgggagcccctattatgttgcccctgaggtgcttcaaaaatgttatggcccagaatctgatgtatggagtgctggagtgattttgtacattttgctatgtggtgtacccccattttgggcagagagtgaagcagggatcttcaggcagattttgcgaggcaaacttgatttggaatctgaaccatggccaagtatctctgatagtgctaaggatttagtccgtaagatgcttatccgcgatcctacaaagaggttcactgctcatgaggttttatgtcatccatggattgttgatgatgctgtcgcacctgataagcctattgattctgctgttttgtcaaggctgaaaaacttttctgcaatgaacaagctcaagaagatggcattgagggtgattgctgaaagtctatctgaggaggagattgggggtttgaaggagttgttcaaaatgatcgatactgacaacagcgggacgataacttatgatgaactgaaggatggtctgaaaagggttggctcggacctgatggaacctgaaatccaggctttaatggatgcagctgatatcgacaacagcggaaccattgactatggagagttcttggcggctacgttgcacatgaataaactggagagggaggaaagcttggtgtcggcgtttgcgttcttcgataaggacgggagtggcttcataacgatcgacgagctctcacaagcatgcgaacagttcggtctttctgatgtccatctcgaggatatgatcaaagatgtggaccaaaacaatgacggtcagattgattatagtgagtttgccgcgatgatgagaaagggcaatgctggcggagcaggacggcggaccatgaggaacagcttgcatgtgaatcttggcgagctcctgaagcccaccgagacctagttttttttaaccagaggatcctgcttcccagatgcgccccatctgaaacttaccgtgtgcctcatccgctttcacagatcgattagttgatctctagtagcagcgccaaaagcagtttaagattttctcagtggtactagtagtgaggggaaaatagcatcctgtggtgccagtgagagattttaggcgctgaagacgacgtgctatgctactccggagtcctgttgtcttcttcttcttcttgttgttgttgatttcaggtttgtactattactgatctttgttgtaaaatgcgctgttgtcccatgaggtaggcacctaggtctcctccatttgaattatatcaaacggatttgtaaacacgttctcatgcatgaaaccatttcttaatgatgatttattgtgtgcttttttccccc

SEQ ID NO: 111746 - DNA, 156 bp, Zea Mays
ggtccgtaattgcttaaacgtgttgtgctcatttcgggtggcccgaaattataaaagccgaaattcaatttttggcctgaaattcacattagggcccgaaattcagtttttggcccgaaattcacatcagagccctaaattcaaaaaaaaaataat

SEQ ID NO: 111747 - DNA, 621 bp, Zea Mays
tccgatggcgaggagttcgatgtggaagaggcgaaagcaaactcgccgcgctgccaggtgatgaagccgttgcgctcgcccatgagccaggctgtgggctcagccacgtcgacgccggggccggtgaggtgatgacggcggcggcaaaggccaaatcacactggttgaaagggcatcccggatgggggaggaggtgaatggctgttgtgtttgtgtttgtgaatgaggaggatagaaggattttcaaagagcttgttctggttctaaagactgcaggagcaccgataccccgtgaaattgcaaattcaagatacacaactagtgtttgtgttggtagagagaggaagagaaagttgagttctagtttctcacatggattttatatcgatgtatttatattattattgcatatttatatcgtcaatataatattagtgttatggtgatattttatcacatggattttgcatattatattaatatttatcgtttcgtatatatgttttatactattttttttactctcatggcaatgcatggacacgaatctagtttattgtatatattttgactagacggaaaattagaattatgtaagtttctactactttaatgcaccag

SEQ ID NO: 111748 - DNA, 339 bp, Zea Mays
atgtcgctgaggtaccaccacttatgcacctccatggcggcgaggtgccagtcagcggcccatggtgcatgcgagcttggtgtggcacgtgatccagaactcgttctcccgcagctcggcctccgtggtggtgtgtccatgttgatgggtgggtcggacacgaagatcccattcaggttagggggtggcagtgaggttggaggtggagcagaggcggagggggaggcagcaaggactaccgcaagtggatggatgggggcgcaacatggggaggcagcgagggctgagcgcaagtggatggatgggagcgcagcatgcacggcgaggatgggggcgtga

SEQ ID NO: 111749 - DNA, 495 bp, Zea Mays
atgcagcagcgcatccaccagcggcccgagttggccttccaggagctccggaccagcgagcccgtgcgggccaagctcgacgcaataggcatcccatacaggtggctcgtcgccggatcggcgttgtggcaaccatcgctggcgccgcggccaggcccatcgtcgcgctctaggccgacatggatgtacttcctatgtaggtctatgcctgtctctttttgtcatgacgtcttacacacagaatgttcaatgaggcggatcacaggcccctggtatgtctccaagctctccggcgtcgcctcgacgtcatcgtcgtcgccggaggaagcgtcctggtacagctccaagctctccagcatcgcctcaacgtcatcgtcgtcgtcatctctaaggcatgtgactactgcgcagcctcctcacctccttccctccgccatcttagttttttgccagctaatatcttctaaatgtattgtcaagatgctaccaaattaa

SEQ ID NO: 111750 - DNA, 3084 bp, Zea Mays
agtttccactgtgctccttctcgccgactccgccatgaccgcctcgccctacccgacgacgccgtggctgcggccaccgcctcctatggcatttctgagtctcctcctcctccttggctgcctctccccgtcgatctcactggcgggtgcggaggcggcgggggttctgagacaagtggttggtggggacgacggcgggacattcttcgagccgttcaacgtgacctacgaccaccgcgcgcttatccttggcgggaagcgcaggatgctcgtctctgcggggctccactacccgcgtgccacgcccgagatgtggccgagtttgattgcaaagtgcaaggagggcggcgtggatgcaattgagacatatgtgttttggaatgggcatgagccggccaaaggccagtggtttcccagtttggttgcgcgatgtccctgggatagaattccgcactgacaatgaaccctacaaggctgaaatgcagatttttgtgacaaaaattgtagatatcatgaaagaggagaagctttattcttggcaaggtggtcccattatactgcagcagattgaaaatgaatacggtaacattcaaggccattatggtcaagcagggaagagatacatgctatgggcagctcagatggcacttgcacttgatactggtgttccttgggtaatgtgtaggcaaacagatgctccagaacaaattctcaatacttgcaatgccttttactgtgatgggttcaaaccaaattcctacaacaagccaacaatatggactgaggattgggatggatggtatgccgactggggcgaatcattgccacataggcctgctcaagacagtgcttttgctgttgctcgtttttatcaacgtggtggaagcttacaaaattattacatgtattttggtggaaccaattttgagcggacagctggtggtccacttcagataactagctatgattatgatgcaccaattgacgaatacggtatcttaagacaacctaagtgggggcatttgaaagacctacatgcagctattaaactttgtgaatcagctcttactgcagtagatggttcacctcattatgtaaaattagggcccatgcaggaggcacatgtgtattccagtgaaaatgtccacacaaatggaagcatttcaggaaattcacagttttgctcagcttttcttgccaacattgatgaacataaatatgcttcagtctggatttttggaaaatcttatagtctaccaccatggtctgtgagcatactaccagactgtgaaactgtggcttttaatacagccagggttggtacacaaacatcgtttttcaatgtcgaatctgggtcccccagctattcaagtaggcataaacctagaattctatcccttattggtgtcccctatctctcaactacttggtggacttttaaagaacctgttggcatttggggtgaaggcatctttactgctcaggggatattagagcacttaaacgtgacaaaagacatctctgactacctttcatatactaccagggtgaacatttctgaagaggatgttttatattggaattccaaaggttttcttccatcactaaccatagatcaaatccgcgatgtagcacgtgtatttgtaaatgggaagcttgcaggtagtaaagttggtcattgggtctcactgaatcaaccgcttcaattagttcaaggacttaatgagttgacattgttatcggagattgttggcttgcagaactatggtgctttcttggagaaggatggtgctggatttagaggtcaagtaaaactcactggcttgtcgaatggggatatcgaccttactaattctctttggacatatcagattggtttgaaaggtgagttttcaaggatctattctcctgagtatcaaggatctgctgagtggagtagcatgcagaatgatgacacagtttcacccttcacatggttcaagactatgtttgatgctccagaaggtaatggccctgttaccattgatcttgggagcatgggaaagggccaggcttgggtgaatgggcatctcattgggcgctattggtcactagttgcgccagagtccgggtgtccatcgtcatgcaactacgcaggaacatacagtgatagcaagtgccgatcgaactgtggaatcgctacacaaagctggtaccacataccacgcgaatggttgcaagagtcaggcaatctattggtactcttcgaggaaacagggggagacccatctcagatatcgctggaggttcattacaccaagacaatctgctcaaaaatatctgagacttactatcctcccctttctgcctggtcacgtgccgccaacggtcgcccctcagtaaatacggtagcaccagagcttcgcttgcagtgcgatgacgggcatgtgatctcgaagattacatttgcgagttacgggacccctacaggaggttgccagaacttctctgtagggaattgccatgcatcgactactctagacttggtggtagaggcctgcgaaggcaagaacagatgcgcgatcagtgttaccaacgaagtattcggagatccatgccgcaaagtcgtcaaggatttggcagttgaagccgagtgctccccgccatcggttaaccaagaacctcgatacgatatatgatcacggtactgtattgtggtgctcaggtcttggtggacgttgccgcagctttgcagggccgtgcacaatggtcctgcatcgttgtctcctatacctctgcacccatattatatgtaaacagtgacctacatgtaaatctaaagaagaggagggattgaaaagaaatgagatggaaaaggaataaagttgcttttattacaaatggtcattcctgtgaaccgtctggcttactcctgtaagggccattcctttggacttcggtctacttttgtttccctgttgacacttcttccacctgtaggcggtcgaccaaccgctggtggtggtgatgcccttttgattgagcccatgtgcattctcctggctcggcgtggacagaggaaaggaaaaaatttattccgaatta

SEQ ID NO: 111751 - DNA, 3197 bp, Zea Mays
agtttccactgtgctccttctcgccgactccgccatgaccgcctcgccctacccgacgacgccgtggctgcggccaccgcctcctatggcatttctgagtctcctcctcctccttggctgcctctccccgtcgatctcactggcgggtgcggaggcggcgggggttctgagacaagtggttggtggggacgacggcgggacattcttcgagccgttcaacgtgacctacgaccaccgcgcgcttatccttggcgggaagcgcaggatgctcgtctctgcggggctccactacccgcgtgccacgcccgagatgtggccgagtttgattgcaaagtgcaaggagggcggcgtggatgcaattgagacatatgtgttttggaatgggcatgagccggccaaaggccagtattacttcgaaggaagatttgatattgtcaggtttgctaagctggttgcagctgaaggtctatttctttttctgcgaatcggcccatatgcttgtgctgaatggaatttcggtggtttcccagtttggttgcgcgatgtccctgggatagaattccgcactgacaatgaaccctacaaggctgaaatgcagatttttgtgacaaaaattgtagatatcatgaaagaggagaagctttattcttggcaaggtggtcccattatactgcagcagattgaaaatgaatacggtaacattcaaggccattatggtcaagcagggaagagatacatgctatgggcagctcagatggcacttgcacttgatactggtgttccttgggtaatgtgtaggcaaacagatgctccagaacaaattctcaatacttgcaatgccttttactgtgatgggttcaaaccaaattcctacaacaagccaacaatatggactgaggattgggatggatggtatgccgactggggcgaatcattgccacataggcctgctcaagacagtgcttttgctgttgctcgtttttatcaacgtggtggaagcttacaaaattattacatgtattttggtggaaccaattttgagcggacagctggtggtccacttcagataactagctatgattatgatgcaccaattgacgaatacggtatcttaagacaacctaagtgggggcatttgaaagacctacatgcagctattaaactttgtgaatcagctcttactgcagtagatggttcacctcattatgtaaaattagggcccatgcaggaggcacatgtgtattccagtgaaaatgtccacacaaatggaagcatttcaggaaattcacagttttgctcagcttttcttgccaacattgatgaacataaatatgcttcagtctggatttttggaaaatcttatagtctaccaccatggtctgtgagcatactaccagactgtgaaactgtggcttttaatacagccagggttggtacacaaacatcgtttttcaatgtcgaatctgggtcccccagctattcaagtaggcataaacctagaattctatcccttattggtgtcccctatctctcaactacttggtggacttttaaagaacctgttggcatttggggtgaaggcatctttactgctcaggggatattagagcacttaaacgtgacaaaagacatctctgactacctttcatatactaccagggtgaacatttctgaagaggatgttttatattggaattccaaaggttttcttccatcactaaccatagatcaaatccgcgatgtagcacgtgtatttgtaaatgggaagcttgcaggtagtaaagttggtcattgggtctcactgaatcaaccgcttcaattagttcaaggacttaatgagttgacattgttatcggagattgttggcttgcagaactatggtgctttcttggagaaggatggtgctggatttagaggtcaagtaaaactcactggcttgtcgaatggggatatcgaccttactaattctctttggacatatcagattggtttgaaaggtgagttttcaaggatctattctcctgagtatcaaggatctgctgagtggagtagcatgcagaatgatgacacagtttcacccttcacatggttcaagactatgtttgatgctccagaaggtaatggccctgttaccattgatcttgggagcatgggaaagggccaggcttgggtgaatgggcatctcattgggcgctattggtcactagttgcgccagagtccgggtgtccatcgtcatgcaactacgcaggaacatacagtgatagcaagtgccgatcgaactgtggaatcgctacacaaagctggtaccacataccacgcgaatggttgcaagagtcaggcaatctattggtactcttcgaggaaacagggggagacccatctcagatatcgctggaggttcattacaccaagacaatctgctcaaaaatatctgagacttactatcctcccctttctgcctggtcacgtgccgccaacggtcgcccctcagtaaatacggtagcaccagagcttcgcttgcagtgcgatgacgggcatgtgatctcgaagattacatttgcgagttacgggacccctacaggaggttgccagaacttctctgtagggaattgccatgcatcgactactctagacttggtggtagaggcctgcgaaggcaagaacagatgcgcgatcagtgttaccaacgaagtattcggagatccatgccgcaaagtcgtcaaggatttggcagttgaagccgagtgctccccgccatcggttaaccaagaacctcgatacgatatatgatcacggtactgtattgtggtgctcaggtcttggtggacgttgccgcagctttgcagggccgtgcacaatggtcctgcatcgttgtctcctatacctctgcacccatattatatgtaaacagtgacctacatgtaaatctaaagaagaggagggattgaaaagaaatgagatggaaaaggaataaagttgcttttattacaaatggtcattcctgtgaaccgtctggcttactcctgtaagggccattcctttggacttcggtctacttttgtttccctgttgacacttcttccacctgtaggcggtcgaccaaccgctggtggtggtgatgcccttttgattgagcccatgtgcattctcctggctcggcgtggacagaggaaaggaaaaaatttattccgaatta

SEQ ID NO: 111752 - DNA, 1325 bp, Zea Mays
atcctttctatttttccacacacacagatgcccctccccggtggcagggtaaaacagtacttgtcccgccccacgtcgcagcgccgtgtccctctcgccttcttccccaccccaccctaccctggcacccacgcgctcttcagatcagatcggcaaggccaatcccgagcagtggtgcgaaacctcgagcgctcgcgccggtgaccataacaaagaggaagccgcggtagcactggtagcggcagcagtaagggggagatgtcgtcggcgttcagcggcgatgagaccgcccctttcttcggcttccttggcgcctccgctgcgctcgtcttctcatgcatgggggcggcgtacgggacagccaagagtggcgtcggcgtggcgtccatgggtgtcatgcgcccagagctcgtcatgaagtccatcgtgcccgtggtcatggctggtgtgctcggtatctacggcctcatcatcgccgtcatcatcagcactgggatcaaccccaaggccaagccatactacctctttgacggctatgcccacctgtcgtctggccttgcctgtggtcttgctgggcttgctgcaggcatggccattggcatcgttggtgatgctggtgtcagggcgaacgctcagcagccgaagttgtttgttggcatgatcctcatccttatttttgctgaagcacttgccctctatggtctcatcgtcggcattatcctctcgtctcgtgccggccagtcccgcgcagattagaggcacgtttcagatgtcaacaccgtgccgccgacagttgcctggtcgtagctgggtcatgttctatatccatgagacaagaagctggagcactttgactctttgagaggcttacttttatgctgtctagttttccatcttctgttgagtcgagaaaacaagaaaggctgtgtagccaagggatgacttttacccttgtgccattcttttccctgtcgtggtggggggtgggttgcggttgatgcttatttatgcacagtttttgcttgggtcggggctggggctgggacgttggtgtaatgtggtgaataagcgagtgcatgcaacgcaattggaacttaagacatttttggtaaaatactctttcgtattctgttctctgttctatgaatattggtaatatgcgtggctcatgaactagtgtttgtttctcgcagccggtacgggttcttagtggtcctatcagtgttagtagagtggatggatcgcgatccaaatgttttacaatttattagtgctctaaattgatttttgttaaaaataaatagaaatagagcttgattctaatc

SEQ ID NO: 111753 - DNA, 1754 bp, Zea Mays
atgacgcgcatctttcccacctcctctttctttcccttgctctgctaacgcgccgccggtccgtcgtttgccgcctatcctgcttgctcgcgcggccgctgttcatggcgatggtggatgaaggcggcaaaggagaggcgcagccgcctggattagacccaagaaaccgccgatctgcggcgaccagggcgaccggcgacatggatggcggtggccgaggagaggagtgggagggcccccccggctacgtgctctcgctcccggcggcggcgctgcccctgcccgtcgccgtctcctgcctggacgccaccgtccggcgcaagggtcgcagccatatccgccaccgtggccatccgtcgggctggtgggccttcaggctccccgtccccgcgccggaggaggcgaagaggccggttcccccagcgtcggcggccaataatccgtccgaggaggaccgttcctgtcctcgtcaccagcgcctgcccgtgcgccaggccccggcccccggtccacacactcccgcgcctgcagaggagaggccagcgaagagggtcaggatgtgcctgcagtgcggcgcggcggtgacgccgcagtggaggtcggggccgatggggcagggcacgctctgcaacgcctgcggggtccggctcaaggcggccggggcactgcggggtcaggtgaagcaccgccccacgccagcgaccgccaggacgcccgcccggccgcccctggacagcccggcctcggagtcgtcgcccgacagcccgatcttggagcctgggtcagttccagatgtttacctggtgaggaagaagcctctgaaacgggggagacccccgccgcctccgaggacggtacccgcggcggcgccgccgctagcgccagcggtgtacctcgtcaagaagaagaaaaaatcggcttcggcgaggaagccgtggcggcccccgaagtcggcgaagcagtgcttgcactgcgggtcgtcgtcgacgccgcagtggcgggaagggccgctgggccgcagcacgctgtgcaacgcgtgcggcgtgcggtacaggcagggccggttgctgccggagtaccggccgctggcgagccccaccttcgagccgtcggagcacgccaacaagcacagccaggtgatgcagctccaccggcagcggaagagccagggccagcaccaccctctgcccgcggagcatccgcgagccatggacgtcctccagtttccccagcggtggcaggtgaaggaggagtacccgccgacgccgctccaccagcctctgccgcatccggtggtggacggcagccttgccagcggcgagctgcgcgttggggacatggtcgacgctgcggcagatgcaggacacggcggcggcggaggcaagggaagtgacctgaacaacaacgcgccgagctctctggactcgcggctgctggaggggccgtcggcgccactgcttgtcgacggcgacaagcccttggtccactagctagccagagcctactaggtgtaatccagctgatttgagagaacagtaattttcttggaccttctccttttttctgagatcttggtaactttattatcgacctcggttgtgtgtatttgttcgtgtttcggcaaaattttcgtgtaactttattatcatggcaggatctgtagaaatgttcctgccaattctaggtgttgttgcaacagagatgatatatgatggataatgacaatggcatgatcgacctgcaactgtggtttc

SEQ ID NO: 111754 - DNA, 1049 bp, Zea Mays
acgaatcccagagcgtaccacatccgtccagaagccgcagcagcgagcaggtcaggtcggcagagagctcgacctctcgctgacggcgacgttcggggccggcggaggacaggaacaggacgatggccgagggaaagagatggcggttcgcgatggtctgctcctcgaacatgaaccggagcatggaggcgcactcgcagctgggccgcgcggggctcgacgtcgagtcctacggcacgggcacccacgtcaagctccccggcccctccctccacgagcccaacgtctacgacttcggcaccccctacggcgccatctacgacgacctccgccgcaaggaccccgaactgtacaagaggaatgggttgctgcctatgctgaagaggaacacctcggtgaagctggcgcctcagcggtggcaggacaatgccggcgacggggtgtttgatatgataatgacctttgaggagagggtctttgacttggttgttgaagatatgaataaccgcgagccgaggttgatgaagtgtgtgctgataataaatatggatgtcaaagataaccatgaagaagctggtgttggggcaaagcttgctgtagagttgtgccagaagcttgaagcaattgatggtgactgggaggacataattgatgacttgattactgcatttgagaagcagcacaagcggagacttgcatacagcatttcattctactaacatgtatagtcccgtgtggacagagatgttgcagtggatggttggtaacttggcattgtagtaagcaactgcataggagtgaagcatcatgttgtggcagtgttgcttgaattcttccacgcttacatttgcctgtgctagctgtttttttattgcaaggtgatggctatagatatcttccaagcactcgctgtttctttcctaactaccgcctttgttgtctggcatgtattcttaaacgacaatgtggttcagagtatcttctgtcttccacctcccaaaaaaaactaaatatcatgctttatgcaatatagtatcttctgccctctt

SEQ ID NO: 111755 - DNA, 678 bp, Zea Mays
atatgtcatgatactttcaagtcaaatagagcttccctctcggcaaggtgataagtcgataaccatacaacatagtgtaccgtgagaggacaagagatatgacacacaccctgacacgctcaaactgggtcttagaaccatcacttgcatgctggtaaattcaggtcacaccaaaagcttcagacaatgttcagcatagggcaagaaggctggcagcagcatcacttgcgcctcttggcccttctactcttcagcctctgttgggcctgctcaaactcttcttccgtgggctccgagctgctcgccttggagtcacacttggacatgatgttcgagaggatggagttgaactgttttttccgctcagccctgcgctgtgagatagccagtatcagatcattctcctcactgttcttcctcttcctaccatggagttcaagacaacgatcagttggaaacaagcaaatggtagcggaatgtaacactgacacctaagggcttgtttggaagaaagggatttgagggagctattgaatagtaagggattttagccgcctcaagtgttctgtggggatgaaaacttacttcgctctcctctctagcggatttgttggtggctccatccctgatatctttttagcccatttctcatacaccttagttgacttcagctcacct

SEQ ID NO: 111756 - DNA, 1016 bp, Zea Mays
atgctggccgacgcgcggtcgctggggcgctgctccgcggtgtcgcgccgcttcagcgcgctggtcccgctcgtggacgacgcctgcctgcgcatcgaccgcgtcatccccgccgacgccgccgacgcgggggcgccgcgcccgcgcgccgcgctctcgcacctcctcaagtccgtgctgctcgccgtgctcaagcccttcgcgcactgcgacgccaagtccgcgtcgccgcaaaagcacgcgcagcagcagcaccactcgcccgcccaggtgctgaggaacttcagcagcatccgcagcctccggatggagctcccggtctccgacgtgggcaccgacgacggcgtcgtgctcaggtggaaggccgtgttcggcagcacgctgcagagctgcgtcatcctcggcggcaccagggtggaccgcgccgcggccgcgggaccgccgcacgccccctcctccgctccccccgcgggcgacgacgacggcggcagcatcccggagtccctgtacaccaacggcggcctcaagctgcgcgtcgtctggaccatcagctccctcatcgccgcggccaccaggcactacctcctccgcgagatcgtcaaggagcaccccaccctggagcgggtggcgctgacggacgccggcgggcagggcacgctcagcatgacggacgccgtaggagaggatggcgtcgacgaggaggacgggggctcatcggggataacgcagtcgacgcggacgaggacggagtcgacaaggggcacgagctcgtggaagcggcgggagatgagggagcagcagccgagcgccttgacgttgccgatgcgattgaagatgacgaggaggagcgcgtccgggaggcggtcgaattggtcatcaccagcggcccccgagagccagcgctcgtcgccgccgaggtcgcaccgccagcggcgggatcccgcgggatcttcggacatcggtggcggcagggcagactggatctgaagaggaatgcagggagggaggcgtggcac

SEQ ID NO: 111757 - DNA, 2680 bp, Zea Mays
atggatctcgcggggatgaagcggcgggagctccaggcgctctgcaagcggcacggcctccccgccgggggcaccaacgccgacctcgtcggacgtctcgacgccgtgctttcggggcccgctgttgtggaggaggaggttgccggagtgccggcgaggaaggggtgtctgaagcaaacgggcggaggtgccaccgaggccaagaaggttacttttggggcggaggtagggaaggccaggagactgaggtctcgggtcatatggtcgccggtcgttgccaagacaagggggaagtctgctcgagccgatgtgggcgctgatgtcccagtgaggcggtccaggaggaattcgttcaatcctgccgaggctgaggaagcaggagaggctgttgctgttgacaggaagcccaagcgcaagaatcaggagaatgacgagggcgttgctgttatcgctcaggctagagttacgagaaggtcaaatttggagtggtctgctactgtattgcctcctgctgttgagaagaagagagggaggcagaatgcagctgagtctgatgtgcagaagtccgctctggtggaagtaacagctaggactacaaggtctcgctcaatcgtacctgttgtggtgccacccactgtggttgagaacaagaggaggaagactggagatccacaaacaactgtagagttgactatgctttcagatgtgcccagaagtgattttcctgccaccaggtctttaaggaacaaaattgtccacgttaacaacagcgtcgtggacgaaactcacactaccaggcagttggaaaacaagatgcgtccgtctactcgtaggcatcaacaggttgcatcttctccggaggataaaggtcaaaaaattcctgctaccagtaagtcccctctactgaggtggtcacggagaaactattctgaggccaatagtgcaaattcagtaaacatcaaattggccaaagactcgagcacagctcagccattggcacaccataattctcattctgaagatttggagaaacaaccagcagttaaagaaccaattaaacggtcaacacgtaaatctattgctttggctgcacttgagaaagagaaggatgtaattgaaggaaagaaccctgaagcacatgttaggcgatcaacgaggaaatcagttgtgcaggttaaagataccaaaagtattgttgaagagactcaatatgctaacagtgaagatgtggcgaagcaaccagcaactaaaggacctgctagggggctgagacgtaaatctgttatcacagaattgcatgagaaagagaagagtctcattgccgaaaagaacatggaaacagatgaagcgatattaacgcggaagcctgtaatcccagttaaaaatattaaagctgttggtgaaggaattcaaattggtaagggcaaagatgtggataaacaatttgttgtgaagcaacctactaggcgatcatcgcgcaaatctgtgctgcctgatatgcttgagaataatagtggacttctagcacccaaaatgaatgctgagatgaatgttaggagatcaacacggaagtctgttcttcctgacatgcataatgagaagcaagatcaccataaaatggctagaaatgagaacttgcaaagtggtaaatatcaagatggtgagaagcaacagaaagtaaaagattctattaggcaatcaaggagatctatcgctacagtgctacttgagggacaaaataatgatgaaggaaaaaagttcaaaaatcctacgaggaggacaacacacaaatctcatgcccttaatgcagttgaagaggtcagcatggatcacattgaagttggtgaagaaggcttgaaattgaggaagcgcagtaggtttttgctggaaatatcatcttcagctaatgtttcctggaagcatcagaatgcacagatctctaatgaaaaagataacacagaaggatcgcagcaggcatcaaattgcacaacttcaaagagaaggtcttcaaagaagagacgaacaactgctccagaagaagtgatgcctttcaaggtggcaaatgatgacatagttatcatggaagaaacaaaggacacacttgaatataataatgagtctagtagtaaagttcaagaaatttgtcaggttaatgctgcaagagaagagttctcttcaggtccattgcttgtaacagtagctcctagtgacgaaatttgcacagtgcagagtgtagctgtggtgatacctgggtcagaatctggtgacgatgcaaatcaaagttctgataagagtaagcaacctcaggaacattctgtcactcaaactgttgatgaccatttatctgaaacaagaagtgggaaattagatcaatcaacatgcatcacaggattagtctctgacaattgtgttgtctcagaggacaaaacattgatgagtgaaggtgaggtcaacatttggtggtaatggcatactagttgttaatttattctctgcatagccaaatctataggctttaattatgtttaagttatatggcatcacaattgtattattattttttgatcttctttggatgctggaaagctggcatattaataccctattgattttgtgatgttgtaattagctttgtccattattgtcatgttatatactcaaagggagactttgttggtcc

SEQ ID NO: 111758 - DNA, 379 bp, Zea Mays
gaaaacttgtgctgtttgcactgtgtttaatttaccaattttaaacatactgagttctaagtcaagttgttggctacttgtaattctaattatttttaataggctttatgtttgttctatctggaacagctaggcatatgtttcattgtcatttgttgtcttttaagtatcttacatttttttgaatgtattctttccctttctcagaagttttagctcaggagaattgtaatgaccagcctgttcctgcccagactgaccaagaaattaagttaaacgatgaacttgctgatccggatgttttagctcaggagaattgtaatgaccagcccgttcctgcccagactgacctagaaattaagttacacgatgaacttgc

SEQ ID NO: 111759 - DNA, 418 bp, Zea Mays
gaaaacttgtgctgtttgcactgtgttgacattttttaaatgtattctttccctttctcagaagttttagctcaggagaattgtaatgaccagcctgttcctgcccagaccgacctagaaattaagttaaatgatgaacttgctgatccggatgttttagctcaggagaattgtaatgaccagcctgttcctgccaacgagcctgaggaaaagaacctagctaacgtcatatcaactgatctccacaccaaaactctgcagcatgataatgacagaatagctgaagagactgataaagatgtttcgtctttggttttccctattgaagagcatgaagaaaaatatgcagtgagccctatagctgttgaaaagagcgtcagtcgggaagccagtgcatgtgaatctgcaggaaaacccc

SEQ ID NO: 111760 - DNA, 817 bp, Zea Mays
cgccgccgcggccatcccttctgccagctgctatttatacgcctcgccccgctccagtctcagcagaaccaccagtcctccactccatcttctactccgaccacaaccacagcgaccacgaccgtgcacgtacgtacaggagcacaccaggcaacggcaatggaagcaccacgcccgcgtctccccatcgtcgccgcgctgtcggcggcgctgctcctcgtcctcgcccacgcccacggcgctgcctcctcccccgctggcggcccgacgcccgtcgccgtgcggccctgggtggcgcggctgcaggcactccacgacctgtccgtgtccggcgagcagcagcagggcggcgggttcggggagtgctggggcgccgtgatggggctgagctcgtgctacggcgagatcctgctcttcttcgtcaacggcgagtcgtacatcgggcccgactgctgcgtcgccatccgcggcgccacgcgctactgctggcccgccatgctcgcctccgtcggcttcaccgccgaggaggccgacgtgctgcgcggcttctgcgacggcgaggaggcggaggccacccgcgcgccgccgcctgctgtgcccgctcctcccgcccggggactgggccagctggctgccgtagccgtgagggggtgagctggtacctccgccggaatcgaggtcgtcgaataagctaggcacgcgtggtgtggcgtgtgggtagtggtttttgtacaaaacaaacacggtgactgactggctcactgcatcaggtccaggtcgtatcagcactgccacgccaataaaactgggtgttcat

SEQ ID NO: 111761 - DNA, 170 bp, Zea Mays
tgcacatcaaaccttgattggcattttcatcgcagcaaatgtttgcagaatcacatctcatatatactacacagtcaaaatttcaataagaggctctacaaccttcatttctcttttggcagctgtgtagtagtaatagtggtctaaacacagcacatcttgactcgttt

SEQ ID NO: 111762 - DNA, 130 bp, Zea Mays
atttatagactttatcgcatcctgcgctttcttggtggcagtaacaggaaaaagaaaagtaacacatcattcaagtgtacaaaaagcaacattttccaagtgacaactcatgagccacgacttatgtgca

SEQ ID NO: 111763 - DNA, 2034 bp, Zea Mays
atggacagccggagccaagcgccctacaagtccagcagcttctcgccggcgacaacccgcgacgagggcggcggcaggacccgggaggtcgaccgcaacttctccctcggcgcgctccgcgacaagagggacctcccgtacggaggctccagagagcagtccatcagcgaggaggacgagcaagagggaggtggtgaccatggggccgcgcgaggaggcggcgagggtccgggctcggtgggagggggatgctgcggcgagccggacctcgccgcgttgtcggcggaggtggacgcgttcctcgcgggccaggacgagggcacgccggtgagcgtcacggaggcgacgctggacaggttcgcgtccgccgtcgagctgctggtcgccagctccgagggcgccgaggagaagtgggccgtggaggccgccgccggcgagccgccggcgctgctggccgcggtcacgcgcatcgcggcgctcgcgtcggcgctcggcaagagccccgagggaggcggcaagcacgccgccgccgtgagccgagtcacggccgtgctgcaccgggccatggcgttcgtcgaggaagagttccacgcgctgctggagggcccgcgcgtccccagggccgggggcgagcacgagcccgaccgctgcgtcctcgcgccgccggacgccgccggacgggacgagcccgcgccgccgtacccgccggagaccgtggaccggctccgcgccatggccgacgccatggtcgccgcgggctacgtgacggagtgctcgcagatattcctggtcacgcggcggaacgcgttcgacgcggcgctgcgggggctcggctacgacaagcccaacgtcgacgacgtggcgaggatggcgtgggaggcgctggaggcggtcatcgtgacgtggaccaaggcgttccggcacgccatcaacgtcggcctgtccacggagcacgacctctgcgcgcgcgtcttcgccggccgccacgccgccgtggggcgcggcatcttcgcggacctgtcgcgctgcgtcatgctgcacatgctcagcttcaccgaggccgtggccacgaccaagcgcgccgcggagaagctcttcaaggtgctggacatgtacgaggcggtccgcgacgcgtccccggtcatcgatgccttcctgtccgccgacgagccggccggcgagcacggccgccacaccggcctggcggacctcaagtccgaggtcgccgccgcgcggtcccggctcggcgagtccgccgccgccatcttccgcgagctggagagctccatccgcgccgacgccgggaagcagccggtgccgggcggcgctgtgcacccgctgacccgctacgtgatgaactatctaaagtacgcgtgcgagtacaacagcacgctggagcaggtgttccgcgagcaccaccacggcggtgacgacggcagtgacaacccgttcgcggcgcagctgatggaggtgatggagctgctgcacggcaacctggaggccaattcgcggctgtacaaggacccgtcgctgagcaacatcttcctgatgaacaacgggcggtacatgctgcagaagatccgcgggtcggcggagaccaacgccatgctcggcgaggcgtgggcgcggaagcagtcgaccaacctgcggcagtaccacaagaactaccagcgggacgcgtggagccgcgtgctggggctgctccgggacgacggcgtgctgacggtgaagggccacgtgcagaagcctgtgctcaaggagcggttcaagcagttcaacgccgccatggacgagatccaccggacgcagggcgcgtgggtcgtcagcgacgagcagctgcagtcggagctgcgcgtctccatcgccgccgtcgtcgtgccggcctaccgctccttcctcggccgcttcgcgcagcacttcagcgccgggaggcagacggagaagtacgtcaaactcagcgccgaggacttggagaccatcatcgacgagctcttcgacggcaacgccacgtccatgccgaggaagaagacatga

SEQ ID NO: 111764 - DNA, 124 bp, Zea Mays
atcagcttgccactaaggtcctatgtataggcactggtcaaggtcatttctcatcctggcctcactgtcttgatggcacgagctataattcatcgatcttgggaccagtgacctccttgacatc

SEQ ID NO: 111765 - DNA, 1546 bp, Zea Mays
gccaactacacgacacaacctgccttccttggttcctccaccccgtcctcccctgtcccgtcgcgtcagccactcgccgcggccaactaccgccgccgctgttgcagccgcccatctgcttccatcgcgtcgcggaggccgctcgcttcgccgccgcacgctccgctcttccggtgccctcctccgggaccctcggccacgccgcgtcgccttaaaccctagatctgcgctccccgcccccgcgctggccgcggccgcgtactgacgccggcacgctgccgatctccatacgtcgctcgatcccaggtttagctgcttcgaatttagataagtttcttccatgcatcgtgttggaagtgctggtaacacggctggctcgactcgaccgagaaaggagaagcgcttcacatatgtgctcaatgatgctgatgataaaaagcattgtgcaggaatcaattgcatggcttatctaaatggttctacatttagtacaagtgattacctttttagcgggagtcgtgatggtaccttgaaaagatgggaattaaataatggggatgcaagtttctcagcaacttttgagtctcatgttgattgggttaatgatgccattatagttggagaaaagcttgtttcctgttcctcagacaccacaataaaggtctggaattgcttctccgatggtgcttgtaccaggactttccgccagcattctgattatgtgatttgtcttgctgctgctgagaagaatagcaatattgtagcctctggtggtcttggtggtgaggtttttgtttgggaccttgatgctgctcttgctcctgtagccaaatctgtggacgcaaaagaagacgaggttcctaatggaaactcagggcctcctttgacaacattgtgcagtgtaaattctagtagcaatattgcttcctctaatagtcaatcacatgggtacagtccaattgctgccaaaggtcacaaagattcagtttacgcattggctatgaatgatacaggaactcttcttctctctggtggcactgaaaaggttgtccgggtgtgggatccgaggacaggttcaaaaaacatgaaattgagggggcacactgacaatatcagggccttacttgttgattctacagggaggtattgcctatcaggatcatctgattcgatgataagactatgggatctaggacaacagcgttgtgttcattcttatgctgtgcatactgattcagtttgggcgcttgcaaccactcattcgtttggtcatgtctacagtggtggaagagaccaatctgtatacctaacagacttatccacaagagagagtgttttactttgcacaaatgaatgccctattctacagttgtctctgcaagatgacacaatatgggtggcaacaactgattcttctgtatatggatggccagctgaagggctcacaccccaaaaggttttccaaaagggtggctcattcttagctgggaatttgtcattctcaagggcaagagcttctttagaaggatcagcacctgtaagcatg

SEQ ID NO: 111766 - DNA, 992 bp, Zea Mays
atagttcaatagggaaagatgttccgtcaaaagactcgcaccgatcaagaactgaggtggatgacacaactgaaaaccacacaactcatgtgctcccatcatttgagttttctacagtttcacctccatcaattatcacagaaggttctagtggagggccttggagaaagagaattactgatttggatggaaccgaaggtgatctaccttggtggtgtgtggactgtgttactcacaatcgatatccaaaggaaaatacaaagtgtggcttttatttacatcctgctgaaggttcgcctgcgccaaacataactcaagggaagcttagtgctccacggatattacgaattcacaaggttgctaactatgtggttgagaaactcgttcttgacaaaccattggatggaggctctgatagtacgtttgttatgggattgagttctgctcaatcacagctctcacagctagatagttcttcgcggcttggactaaagccatggcaaaaaacaaagccatgtattgaggtattgtgcaataaccaggttctatcaccagatatgagtttggctacagtgcgaacatatatatggaagaagccggaagatttgattcttcattatagagtggtccaatcgagatgatcacggcttcagatgtacatgctcacatggttctccagatatgtcccagcatgtccgcacctttagatggtgtggttgaagatgcctttggcttagagaggaagcatcatcttcacagaggaaatattttgctcttgctccgccctccccccggtagctgttcccagaatcgacttgttcgcttctctgtaaagttcctgaccttgccctggtagtaagatgtatcatagcacaggtataaggctctctgctggctgccgagcttgtaaatgtagaagattaggtgcttaataaaagatcgaaaggatatgttttttctttcgtttttctttgacagcatttgtaagaaaa

SEQ ID NO: 111767 - DNA, 3406 bp, Zea Mays
ctccacccccgccaccacaccgctttgccgctccgatctccgcacgctccggcgagaggggcccactggacagccagctcagtaccctcctacggcgacgctgtcgcacgcgccaccattaggtgtcacccgtccttgcgccgccgcacgcatcccaacgcagccggaccccacggcagccgccgccgctgcggcgaaggcccagcccaggccacgcgcgtcatcctcgcgccgaacgacgcaaggtggagcggcggtccactccccgcgcgcgcttcgcctccgctgcactgaaaccgtgccctgctggtgcgagtgtccggatgctaccaaatcctagggccgggcatcgactgactgactgagtgagtaagggagggagggagggaggagccagggcctcgccgcccgctgaacgagggagtgatgcggcgcggaagctcggccgcatgaggtgcctcgtcggcggcggcgtccaggacagcccgcgtgcagcggccaagagggtgtcgccggcgtcgtggcggctggacaccgccgcggcggaggcggagacgggcgcggggggagcggcggctaaggggccgagggtctgcttcaggccgccggatgtgatggagacggtgcacgaggtggccatttacatccaccgcttccacaacctcgatctgttccagcaaggatggtatcagatgaagattagtgcactgtgggaggaaggtggcaacagaacaccggcttcgcctgccagggtcgtgcaatatgaagcttctgatgttggtggagacgatgcattaggcatttggaaaatagatgatattgataatagcttccacacacagccgttccggatcaagtatgccagacaagatatctatctgtcggttatggtgtctttcaacatattcaacagtgaagaggagggtccagcagcttcagatgtgatgatgaagtttgagctgatatatgccccaacactagacaatgggtctgagcttcatgcttctagtgccacatcttcagcagctgtgcacgaatttaggatcccacacagagcacttctgggtctacactcatactgtcctgttcactttgatgcgttccactctgtgcttgttgatctgacattgcacatagtgtacctgaaagctggtgcagctaaatcatcactgaaggtaccagagcaaggtttacgtcctacatcatatcacattgttaaggcattattaacttctagaaaaatgttgcttgaagaactgaacaaaatcagtggtgctattggtaagacagtagaggatttagatgttgctgacttgaatcttggtaaatatgagtcatttaatccatcaaaatcttggctaccgaattctagtaaagtgttccccgaaactggcaaaggtgtgggacagttggctggaattttacatgacttcttggagagacccaacgatatggttaatggtacagatgattctttattgtatactcttccccatgaagagctgtttgaactgtttctaactctgagtggacagctttcacttctatggaatgcattcttgaaatttcataggctaaataaaacaaagatattggactacttgcacgatgcttgggctattggcaggaaggcagaatggtcaatatggactattcactcgaaaattgagatccctcatcgctatctgcagagtatgagtgatgactcaccccaccgttattctcttagagtttctggctcaaggaagttccatgatgaccatgtacagagctctgcttcacgggcggaactacacaggaaaagcatagcacaaatgaagattaatccacattatgttcaagatatgcatatatatggtgatccttcacgtgttcctgttgttcttatagaacaacatgtcatggttgttccacagcatagttccagcaaggatatggcttcaaatgtttctgaacaaaaggatactattgtggtaccgaaactacaaggagagcctctggtacccaaaagtagtgctggtaaaaaaagtggacgcatattgagagctgtcatttttgtgcatggatttcagggtcaccatctggatttacgtcttgttagaaaccaatggcttctattggatcctggagctgactgcctgatgtctgaggctaatgaagataaaacatctggagattttaaagaaatgggtagcaggttggctggggaggtagttgccttcctgaagaagaaaatggataagctttcgagatatggaggctgcaaagagctgaagttaagtttcgtaggtcattccattggaaacgtcatcattagaagtgccctggcagaacctgcattgcaaccatacttgaagaacctttacacttacatgtcaatatcagggcctcacttgggttactggtacagttcaaattctttgttcaattctggactctggctgctgaaaaagctcaagggtgcgcaatgcatccatcaactcactttcagtgatgatcaagacccccagaatacatacttttataagctttgcaagttgaaaacgttggagaacttccaaaatatcatattgctgtcatcaccacaggatggctacgtaccatatcattcagcgagaatcgagctctgcccagctgcatcatcggacacgtcaaagaagggccaagtcttcacagaaatgctgaacaactgcttggaccagatccgcacgccctcgtccgacacccggacattcatgcgctgcgacgtgaatttcgaccagtccaaccaagggcgaagcctgaacaccatgattggcagagcggcccacatcgagttcctggaaaccgacctctacgccaagttcatcatgtggtcctttcccgacctgttccgatgacgacgacgacaccgctcgtctttgtaatactggcacataccaaaccaataacgcacactacccagtactgaccaggcaaggaatactaaagctcgctccaccagaacccaacaccgagacaggcaggaagcactgtgaaggtcctagaagcaatggtttttccagcttgctagatcctattctgtataagtagttgattctttttcatttcattcatagtgctgtagattgcacccttgctgtgaaaatttataatccttgtcgtctgttgtaccttacacttcagtttaggatgtgctgacaatcagtgagcttattatgtccaaataagctctctttttttaacgtttgatttttagtcaccttcgttcttgtggtgctgtaaatcctgcaacatgctttgtacatgcagacgatcaccctgtctgatactagatccggatggtcctgccgtccaggtccagggtgttgtttcagtgtttctgtttgacgaaactgctgtaggaatatataaataatattttttt

SEQ ID NO: 111768 - DNA, 3574 bp, Zea Mays
ctccacccccgccaccacaccgctttgccgctccgatctccgcacgctccggcgagaggggcccactggacagccagctcagtaccctcctacggcgacgctgtcgcacgcgccaccattaggtgtcacccgtccttgcgccgccgcacgcatcccaacgcagccggaccccacggcagccgccgccgctgcggcgaaggcccagcccaggccacgcgcgtcatcctcgcgccgaacgacgcaaggtggagcggcggtccactccccgcgcgcgcttcgcctccgctgcactgaaaccgtgccctgctggtgcgagtgtccggatgctaccaaatcctagggccgggcatcgactgactgactgagtgagtaagggagggagggagggaggagccagggcctcgccgcccgctgaacgagggagtgatgcggcgcggaagctcggccgcatgaggtgcctcgtcggcggcggcgtccaggacagcccgcgtgcagcggccaagagggtgtcgccggcgtcgtggcggctggacaccgccgcggcggaggcggagacgggcgcggggggagcggcggctaaggggccgagggtctgcttcaggccgccggatgtgatggagacggtgcacgaggtggccatttacatccaccgcttccacaacctcgatctgttccagcaaggatggtatcagatgaagattagtgcactgtgggaggaaggtggcaacagaacaccggcttcgcctgccagggtcgtgcaatatgaagcttctgatgttggtggagacgatgcattaggcatttggaaaatagatgatattgataatagcttccacacacagccgttccggatcaagtatgccagacaagatatctatctgtcggttatggtgtctttcaacatattcaacagtgaagaggagggtccagcagcttcagatgtgatgatgaagtttgagctgatatatgccccaacactagacaatgggtctgagcttcatgcttctagtgccacatcttcagcagctgtgcacgaatttaggatcccacacagagcacttctgggtctacactcatactgtcctgttcactttgatgcgttccactctgtgcttgttgatctgacattgcacatagtgtacctgaaagctggtgcagctaaatcatcactgaaggtaccagagcaaggtttacgtcctacatcatatcacattgttaaggcattattaacttctagaaaaatgttgcttgaagaactgaacaaaatcagtggtgctattggtaagacagtagaggatttagatgttgctgacttgaatcttggtaaatatgagtcatttaatccatcaaaatcttggctaccgaattctagtaaagtgttccccgaaactggcaaaggtgtgggacagttggctggaattttacatgacttcttggagagacccaacgatatggttaatggtacagatgattctttattgtatactcttccccatgaagagctgtttgaactgtttctaactctgagtggacagctttcacttctatggaatgcattcttgaaatttcataggctaaataaaacaaagatattggactacttgcacgatgcttgggctattggcaggaaggcagaatggtcaatatggactattcactcgaaaattgagatccctcatcgctatctgcagagtatgagtgatgactcaccccaccgttattctcttagagtttctggctcaaggaagttccatgatgaccatgtacagagctctgcttcacgggcggaactacacaggaaaagcatagcacaaatgaagattaatccacattatgttcaagatatgcatatatatggtgatccttcacgtgttcctgttgttcttatagaacaacatgtcatggttgttccacagcatagttccagcaaggatatggcttcaaatgtttctgaacaaaaggatactattgtggtaccgaaactacaaggagagcctctggtacccaaaagtagtgctggtaaaaaaagtggacgcatattgagagctgtcatttttgtgcatggatttcagggtcaccatctggatttacgtcttgttagaaaccaatggcttctattggatcctggagctgactgcctgatgtctgaggctaatgaagataaaacatctggagattttaaagaaatgggtagcaggttggctggggaggtagttgccttcctgaagaagaaaatggataagctttcgagatatggaggctgcaaagagctgaagttaagtttcgtaggtcattccattggaaacgtcatcattagaagtgccctggcagaacctgcattgcaaccatacttgaagaacctttacacttacatgtcaatatcagggcctcacttgggttactggtacagttcaaattctttgttcaattctggactctggctgctgaaaaagctcaagggtgcgcaatgcatccatcaactcactttcagtgatgatcaagacccccagaatacatacttttataagctttgcaagttgaaaacgttggagaacttccaaaatatcatattgctgtcatcaccacaggttattccctttcctcatctctaatagcaatttacttgcgtgtggaatttgttttgctgcaataaataactgggactctatagtccttatagcagcatgtcatgacttgtgagctatgccctatgcacacctttgtgttcttccaggatggctacgtaccatatcattcagcgagaatcgagctctgcccagctgcatcatcggacacgtcaaagaagggccaagtcttcacagaaatgctgaacaactgcttggaccagatccgcacgccctcgtccgacacccggacattcatgcgctgcgacgtgaatttcgaccagtccaaccaagggcgaagcctgaacaccatgattggcagagcggcccacatcgagttcctggaaaccgacctctacgccaagttcatcatgtggtcctttcccgacctgttccgatgacgacgacgacaccgctcgtctttgtaatactggcacataccaaaccaataacgcacactacccagtactgaccaggcaaggaatactaaagctcgctccaccagaacccaacaccgagacaggcaggaagcactgtgaaggtcctagaagcaatggtttttccagcttgctagatcctattctgtataagtagttgattctttttcatttcattcatagtgctgtagattgcacccttgctgtgaaaatttataatccttgtcgtctgttgtaccttacacttcagtttaggatgtgctgacaatcagtgagcttattatgtccaaataagctctctttttttaacgtttgatttttagtcaccttcgttcttgtggtgctgtaaatcctgcaacatgctttgtacatgcagacgatcaccctgtctgatactagatccggatggtcctgccgtccaggtccagggtgttgtttcagtgtttctgtttgacgaaactgctgtaggaatatataaataatatttttttggttctggcatcctgccgttgg

SEQ ID NO: 111769 - DNA, 492 bp, Zea Mays
atgatcagcctaagacttttcttcctttaatgtgttcatttgtctcctgcacatccttgcacttgatttggttaatactttgaagttttgaatttattttctgaaaaattaaatttatgttgcagcgccaccagcacatcgtttgcacagccttctgggattccattagcttttggtattcattgctgactctttttttgccattctgtttctgatctcatggcactgagcataaaaaattttataacagaaatgcatgagttacttgttgctgatagtgaaagtagttccattcgagttgttaatctgaagacaggaggctcaagattgctggctggaggagatccagtatttccagaaaatttgtttaggtttggagattatgacgggactggctcagatgtgctacttcaacatcccttgggtgttgtttatgccaatgacaatcaagtatatatagctgattcctacaaccataaggtagtaacctta

SEQ ID NO: 111770 - DNA, 714 bp, Zea Mays
aaatatacaattgtctcgtcctcgtaaccctagacaacccataaggccataccctccaaccgctggatcgggtatcggcattactgggcgcacgagactagggatttcccccttgcaatcacgaatccatggcggatgctgaacctgttgatcagaagaattaccttgaggaacgttgcaagccgcaatgtgtaaaaacattgtatgattatgagaaatgcgtcaagagagtcgagagcgacggaagtgggcagaagcactgcaccggccaatatttcgactactggtcatgcgttgacaagtgtgtaagtaccacttgcgcgttgaacagtcacgagtcaacattcttcgctcttgatcatcctaatcgccattttttttttgcatcgaacttgtgttacaggttgcaccaaagctcttcgacaaactgaaatgataacggaacgcaactttgaaggcgcggctcctttcaggaagtcaaatagctttaataaacccatgccttggcttctggaatttgtttgctgaacctgtggcagggagcctcattttgatacgttttgctgaaccgtctttgtttttttcccctgaatctgtgtggtatcccaagcgtcgagcccaatttcttttgtataagaataatgaggtgcccataaaaaattggccccaagaagattgttcgaatgtacacaagcaaaacaaatttcctcataa

SEQ ID NO: 111771 - DNA, 677 bp, Zea Mays
aaatatacaattgtctcgtcctcgtaaccctagacaacccataaggccataccctccaaccgctggatcgggtatcggcattactgggcgcacgagactagggatttcccccttgcaatcacgaatccatggcggatgctgaacctgttgatcagaagaattaccttgaggaacgttgcaagccgcaatgtgtaaaaacattgtatgattatgagaaatgcgtcaagagagtcgagagcgacggaagtgggcagaagcactgcaccggccaatatttcgactactggtcatgcgttgacaagtgtgttgcaccaaagctcttcgacaaactgaaatgataacggaacgcaactttgaaggcgcggctcctttcaggaagtcaaatagctttaataaacccatgccttggcttctggaatttgtttgctgaacctgtggcagggagcctcattttgatacgttttgctgaaccgtctttgtttttttcccctgaatctgtgtggtatcccaagcgtcgagcccaatttcttttgtataagaataatgaggtgcccataaaaaattggccccaagaagattgttcgaatgtacacaagcaaaacaaatttcctcataattggcaactcgaatcctagatgtggcaaatcactggattgagaaaaaatgtcaggtatggg

SEQ ID NO: 111772 - DNA, 673 bp, Zea Mays
aaatatacaattgtctcgtcctcgtaaccctagacaacccataaggccataccctccaaccgctggatcgggtatcggcattactgggcgcacgagactagggatttcccccttgcaatcacgaatccatggcggatgctgaacctgttgatcagaagaattaccttgaggaacgttgcaagccgcaatgtgtaaaaacattgtatgattatgagaaatgcgtcaagagagtcgagagcgacggaagtgggcagaagcactgcaccggccaatatttcgactactggtcatgcgttgacaagttgcaccaaagctcttcgacaaactgaaatgataacggaacgcaactttgaaggcgcggctcctttcaggaagtcaaatagctttaataaacccatgccttggcttctggaatttgtttgctgaacctgtggcagggagcctcattttgatacgttttgctgaaccgtctttgtttttttcccctgaatctgtgtggtatcccaagcgtcgagcccaatttcttttgtataagaataatgaggtgcccataaaaaattggccccaagaagattgttcgaatgtacacaagcaaaacaaatttcctcataattggcaactcgaatcctagatgtggcaaatcactggattgagaaaaaatgtcaggtatggg

SEQ ID NO: 111773 - DNA, 161 bp, Zea Mays
ttgcagcttggaggcgtgttgatttggatagctattcgtagagtgcgcaatggtggaatttgttcgacgactcgcctctgccctgctcaagtgctgtgatcttgacatacccaatcggccaaggggcctcgaggaccccgaacgtgtaaggcctaaaattg

SEQ ID NO: 111774 - DNA, 426 bp, Zea Mays
atggtgatcagcttcgtgtttccgaagggtggattcctgctgagaggatacatggaagccggcgccaaccctgtcaacctgtcgctaatatttcctaatccacacggtggcttcaatgttgcagagttccagttggatgtggttctgttgccaaggagatgggccgagcagcgtcttttgcatacgcatggaatctcagttgataatgacgaaattcgaaatagtagggggatgcgcatcgcgttatcatccatgttaacgatagcacctttaaagaggaaggctattcccaatcacccctttgcgacgtcaaggtacggagccgggccatgcgcgacaggggcagccagcagggagggagccattcaggttggctaccgtcagctgcctgacattaggaagaccgaggtggtagagcgtacatga

SEQ ID NO: 111775 - DNA, 133 bp, Zea Mays
gggttgattctgggagaaccttcttcttgtcttctcttcactatcttcttttctcttctcacttttcacttttcactgcctctttctttctctttgctcttcccactggaggagtctatcgatgagtattacc

SEQ ID NO: 111776 - DNA, 535 bp, Zea Mays
cacgcgtgcgaggggcacgggtgagtggtggggtcaatgaccctgatgtttgtggtctctggttccaagaatctttgcctctctgtatggtaataactccttctgtcctcttttcctgtttactttgactcaggggcagtgctttgattctcacggtcggtccttttgactgagcggctggataggtttcttctgtagcttattccaggcttcatgggtaagcttcccggtatcttcttgggtaaggcacttttctcttgagatgggttaagatgagaatggaagcataaggtgaggattagatctaatttgtgatctatgtttttagagaaaacctttcttaaaaaaagaaaacacacaagcttagaaatgataagcacaaacaaatcgaatgttttgagtaagggaagaatagagtttttccaaagcacgaactacttagattcgggggctaagcataactactattgcttggctcctgaattgagaactatgctaaatgcgacttatgagcactaacgttaaagcatcacat

SEQ ID NO: 111777 - DNA, 100 bp, Zea Mays
ggacgaacgaaccatgaacgatcggacgaacgaacgaacaaactaagaacaggggacgaacgatcgaagaacgatcgaacgatccttgtgctagtgtgtg

SEQ ID NO: 111778 - DNA, 3570 bp, Zea Mays
agtagacacccaaacccgagaagagaagtgagaaccctcccaaacaagccaaagccagcaaagccaaaaggaggaagacgcaccaggacattgacgagccgcagtccgcggcagcaggtccagcttcatcccccggagccccagcactggggttggcaggcaggctcgctcgccaccgccgcgtgaagcgaagcgcgcgcccccgcggacgctgacgctgggacccgcctgctgggggctgggagtgggcccgcccccctgatgggcgcctgcgcgccggcggcgaggggaagcgtgaggacgaggagcgccggcgggctccgcgcgaagcaggccgggcaagcgagccaccgcgccgcctagtgagggcgctcgccgcccgtctttgcttgttgccttgttgggttgctcgcacgtcctgttccagttccaggccagagagagcggggcccggggctgcaggcggcggcccgcggaggagctagggttctctctcccactcccccctgcgtcgccaggatggcggttggggacgcgctgcgccggctctgcgaggaggtcggctggtcctacgccgtcttctggaaggccatcggcgccgccgaccctgtgcatttggtgtgggaggacggttcctgcggccacgcctcatgctataccggatctgatgctcctgaagctgggtgtgagccgggcaccagtgtgtgcacgcttgttgggaaggttatggcctcacaaattcatgttattggtgaaggtaccattggccgtgctgctttcactggaaatcatcaatggattgtccatgatcctgccactgccagtgatcacaatctcagaccggaggttgttgctgagatgaatcatcagtttgcagctggcattcagactattgcaattattcccgtgttaccacgaggtgtactgcagctaggcgctacaagtgtggtagtggaaaataccaaccttgtgctccagtataagaagctgtgttctcagctgaacaatcggtcgagtatggcttcatcgtcatctgttaaaaacgatttgaaccctaaagttcagtcacaccctttgaatggtcccacaagtatataccctgcagatacgcgctcaaagttttttagtggatccccaatgtcatatcaacagtgttatggtcctgatggcacaactgtgtctagtagtatattgacaaacatgggcagtaatgcttcaatgctcatggttgcacagagaaatgctcaagtgggtaaagaacacattctatatgcccctgacatgaggttcagactgcaaaacccttactgtgacaggagagttgagagtaacacccaaagtagtgttgtgagctctggttttatctcgtcgatctcagcatcaatggaaagacatccatggatgaccaacagtcaacagttagaacaaggaaacactggagaaccatcagatctcagaaatgttctcttgaaatctcttgcataccgtcaccctttgttcaatgacaacacaaacatggttttagtgcatggcaaaggccaggtgccaggttttgttaatggtcatgggggttttgattttctcccagaaggtactatggtattcaagggtaacctgtatggcagcacagcaaatcaaattttagaccaaagatgcagttctacttctgagatgtcagggcacagaccaactatttcatacaaaatgccccaatctacccaatgtgttaggaaaacagagtctccaaagagagagacatgcgaaacttctgctgctctgtcatctggctctgatattcaggtttctggtggcctgaaaacagtcatttctcaagagaataatatgagtagctcagatcttattagcccaaaaaaacccaatgaagtgcatgcccctactggtgcaattgttaaagctgtcaagaatatggatagccgcaggctcccagacatatctaatgagagatcacctccgcttcgtatggatgctgctgcagaaagtgatttgtttgacatgtttgattctgaagttcatcatttgtgccgcaatgtggataatgatcttacctgtaaagctgcaaaacccgagaattcaaatagagatgtacctgaatcctctgttcgtcttggttcctcttcatctttcaattcagtggatgacaagttcccttattctgggatcttctcactaaccgataccgaccaacttttggatgcggttgtctccaatgtcaatcctggtggcaagcagatctctggtgacagtacttcttgcaagacttcagcggcagatattcctaccacttcgtattgtcgcttaaaagaaccaaagcagtccgaatcatcttcacctttgctaatcaagaatgagttagccgtttcaaattttgtcaaacagtcatctttccaagaaaaggcagaggatggctgtctttctcaaaataatgcaatacagaagtctcagatacgcctctggatagagaacggacagaacatgaaatgtgaaagtgcctcagcctcaaacagtaagggcgttgatatgtcaagcaaggcaagtcgaaagaggtctcgaccaggagagaatcctaagccacgaccaaaggaccgccagcttattcaggatcgtataaaggagctccgggaactcgtacctaatggggcaaagtgtagtattgatgcattactggagaagaccattaagcacatgcttttcttgcaaagtgtgacaaagcatgcagataacctcaaggactcaaacaaatctgatattcttggtggtgagaatggtccactcaaagactacttcgaaggtggtgcaacttgggccttggatgttggtagtcgatctatgacgtgcccaatcattgtcgaggatctcgagcggcctcgtcagatgcttgtggagatgctttgtgaggatagaggtatcttcttggagatagctgacttcattaaaggactaggattaaccatcttaaggggcgttatggaagcacgcaaaaataaaatctgggcacggttcactgttgaggccaacagaaatgtgactagaatggaaatcttcctttccctaatgcgcatgctggaaccgagttgtggagcaggagagaattctaataacaacataaaaatgcctcttgggattgtgcagtatcccataatccctgcgacaggtcatcttaggtgagccagccagcacaaagataacaggatgcatctttgaaatgctaagagcggggggaggtccacccacttctgccatgactagcattgccaacccaggacgagctggaatctcgtgacatgcggtgcatcgtccctgcagtgtgcattcggaaagcctaacagtagacgggaacatcgacatggatagttggttcgccggatgatcgacgttttgactgtaatcttagtttatgtttgttgctgatgctttagccttttgttagtctgcatattagtgagtgaattttgttatgttctgctgctgaatggaaattctgagttgaattgtaggccttgttttggtactgactcgaactcggagttctctgttttgaatggtcggggt

SEQ ID NO: 111779 - DNA, 501 bp, Zea Mays
ctcgcaccaattaacaaaccaaaccgacgatggcgtcgaataagacagtcctcatcgtcgcggcgatgcttctcatcacgctcgtgctggaggctgcccctccggcggccgccatggactgcaaggccgggtgtgacgaggtcacgggcccactccacatgagcatggaggactgcatgaagaggtgcaaggagatagctgctgagcaggggcctagggacccttacaaggataacaaacttgacatcccatgaactagttaatgctcctatatcatctgcctatccatgcatgcattgcattgcgtatgcacactgtgcgtgcctgcccacaaagttcgacaacacaccgatctcgatggatttgtaatcgtgtccactcgatcgagagatcgatcgatgcttgttattatatttgtattccacattatatataagaaatacaaattaaattaaatttattcctttgtcaggccatgcctgcctgcgtgatttatttttc

SEQ ID NO: 111780 - DNA, 771 bp, Zea Mays
aacacgcacgaactagctagcgctcctcgctcctcccttcatcgaccaccgacaccaagggcatcaatcagcgcgagctcctcacctccggccggcttctgtcctactcccctgtccacgatgccccgaggcgggagcgcgcgagggtgctgcgggggattatgtgggctccccttcaccgttggcctcgtcgtgctcatctactgggccatcttccagccccaccacatccgcgccaccgtcgactccgccaccctctccaacctcactgtctcccacgcctcctcaccagaggcagcggtctcctacgacctcaccgtcagcctccggctccacaaccccagcgtccgcgtcgacatctactacgacgccatcagcgccgagctccgcttccgcgacgccgtccttggcgcggccgccaacgacacctccccgtccgtgttcttccagcgcaggaagaccagcgaggtcgtgaagatggagttcgactacggggggccgggaggcggcgtcaccgtcgcccgcgacgtcgccggggacctggcgaaggagaccgccgtgagcttggagctggacgtgcacgtgcgcgtgaggtacgtgttcaagatgttcaagctgcggcagaagccgaggatacgctgctcgatcagcattccggtcaagacggagggccggcaccgtggcttcggcggcaccgttgctgcctccggcgaccggtgcagtgtcaagtactgacagtgatgatcaagagtgtgcttgggagcttttctg

SEQ ID NO: 111781 - DNA, 1139 bp, Zea Mays
atcaagccaaaaacttggaagaaacatacatgtaccagacatactagataaaatgtacagacgaggtgactgacaaacgcatacacgactagagtcatggatgatgatggatctcggacgatacgtactaagcagtgacagaaattacaagctagcatgcacaaggtactacttactaactagtagtagatgagagagattcccgtttgtcaacttaatctgcagcatgtgttttgtcccactagtcccaaccaagcagtcccaggctcccagctcccaacgccaaccaagatgacgagggctcgtacgtcttggccggagcgagctgcagctacctcctcctcatggcttgcccttgtgctgtgtgtagatgtagtcgaggtgcgcgttctggagcagccgtctctgcatgcaaccgtcgtcctcgtcgtcgtccgcctcgcacgccactgcaccctcctccacctccgccgccatcatctgcagaatagcagatatatagcatgcatggaatggaagaaatgagctttgatttgtatacatagtccacggggcaaaggcacagggctcaggctagatgctatgtgcgaattcagtagtttttccccccttctcacacctcatctccggagatggacagctcgtcgccgttgcccacgccaccttcctgcagcgccaggccgccgtatgcagcggcagcggcagccgtgacgccagtttctgcagacgacatggccagttcagagacgttaggacgagcagctaaggtgtacgcaacgctggtacgaaggacgatcgatcagcaaagaggttagagccgagtagtgaagacgtatatatgtacctcggtgaaccaactgagctgggacaggagaaggcggcaggaggcgagccgctgctgagtagtggaagaaacagacgaggaggaggagcagggcagcagccgcgagcggcaagggcatgctgcagctgcgccgcctcatctctgccgccgtgccgggccggttgatgaactgctgaaaactagtgctgctgctgcgctagctgtcgaaggacgagagagagagagaggggggctgtgtacgagttggatggagttcgtagtgagcgagcgagtgctggatggctgatgatggatg

SEQ ID NO: 111782 - DNA, 450 bp, Zea Mays
atgagagagattcccgtttgtcaacttaatctgcagcatgtgttttgtcccactagtcccaaccaagcagtcccaggctcccagctcccaacgccaaccaagatgacgagggctcgtacgtcttggccggagcgagctgcagctacctcctcctcatggcttgcccttgtgctgtgtgtagatgtagtcgaggtgcgcgttctggagcagccgtctctgcatgcaaccgtcgtcctcgtcgtcgtccgcctcgcacgccactgcaccctcctccacctccgccgccatcatctcatctccggagatggacagctcgtcgccgttgcccacgccaccttcctgcagcgccaggccgccgtatgcagcggcagcggcagccgtgacgccagtttctcggtgaaccaactgagctgggacaggagaaggcggcaggaggcgagccgctgctga

SEQ ID NO: 111783 - DNA, 1125 bp, Zea Mays
atgtccagtcggagcattctgtttcttcatgccgccgacgagtatgcccccgatgttcttcgccgtcgcttcgtcgacgcgttgcaagctcatcatggcaccatcagcttctgtgccatgacgccacttgccgtcgtcgtttcgagcgtccctccagtgctccgtataccgtatgtgctgcgacacggccgtcggttcctcgtcttcgcccgcagccccgccgtgttcgaaattcgtgtcaaggccttccacttctttgtaattgaagctgcaactccctgctctactgcgaacgtgaagaaggtgaaaatgcaactccctgctctgatgggcgaacttaaagaaggcaggttgagaatcaacctgctgctgcaactgaatccagttttcacgcacaaaccattggtgattcagttgccgattggttcggaggacaatttccaaggagttgttgatctagtcagaatgaaagctattgtatggacaggggaggagctgggtgcaaaatttgaatacaaagacatacctgctgatctccaggagatggctcaagactatcttgttcaaatgctggaaactattattgaattggatgatgaagttatggagaaatatcttgaaggaactgaaccaggcgaggaaactgttaagaaactaatcagaaagggaacaatttctgccagctttgtaccagttttatgtggttcagcattcaaaaacaagggtgtccagccattgcttgatgctgttgtcgattacttgccatctccacttgatctaccttcaatgaagggtactgacccagaagaccctgaaataatatttgaaaggcaaccaagtgacgatgaaccattttctaggatagctttcaagatcatgactgatccatttgtggggtcactaacatttgttcgcatatactccgggaagctgatagctggttcatatgttctcaatgcaaataaagataagaaagaaagaattggaagacttcttgagaatcaacctgctgctgcaactaattccagttttcacgcacaaagattccacctttcttcaatcctatgttcatcgtatttgatctgcagcgatgataggaattcctgttcagagcaagagacatag

SEQ ID NO: 111784 - DNA, 1648 bp, Zea Mays
gtgtgctttgcgtggctacccgtccacgcacgtatgcgagagcccctagctgtagcgggtactacatacaaatgaaaataccctcacgcgtacacactactagcctagtagatcatgtatatcatctgctcatcgcagtgaatgcaagctcatacatggaaagttagctccgcgcgcaacaaacaaaaagtgaaaaggaggccggggtagtacataccaaaacatgcagctggctttggtgtgcatgcagacatggaagcgtgcaacagatcgtgcacacatgacatggcatggccgctggcgtggcggcacacatgtgttgtacactgttcgttcaattctccgattgaaaaaagcgcacgtaacgtcgcatatacatacgacacgacgggcgacgacggcgacggccgtgcagagtgcaggtgaagatgatgaagaactaccctggtcctgctagcagcagtagtgttgctgtagaggtgaagaaggggtcatggagccccgaggaggacgccctgctgaccaggctggtggagcagcacgggccccaccgctggagcctcatcagcgccccaatccctggccgctccggcaagtcctgccgactccgctggtgcaaccagctcagccccgacgtgcaccaccgccctttcacgccgcacgaggacgcgctcatcctcgccgctcacgcccgctacggcaacaagtgggccaccatcgcgcgcctccttcccggccgcaccgacaactccatcaagaaccactggaactccaacctccggaggtgcaggcgccgagcggcggcggcggcggtggcctcccgaccgcaggtgcaggacagcgacgacgctcctgctgctgctgctgctcatgatgatcagccggcggctgtggttgctgctggtggtttaggtggtggcaacagcagcagcggtctgccgcctgcagcagcaggggccgcaactgccgaggccgagccgtctctgtccctcagccttggcctcccgctgccagcagcagaaccagctgaagccgcggctgacgacgagagccgcaacagccagggccaggcatcgccgttactggaggaaggagaaggaaacgcgcagctgttggcagtggtgcgccggatggtcagggaggaggtgcaacgccagacgggacagctcgcctactcgctcatggccgcagcagcagccagagccaagggacaccaccgttaatctgtgtgtgatccattgtgcatgctgctgctgctgctgcttcttggatttcccctcctttctccgatatgatcctctctgccaagtgtattttgttttccttcgtttcttgtactaccttcccttccatacttgttttcgtttatgcaattgcgattggacttcatgatctggcttctaataagtatatacaggcagtagtagtagcagtagcgaggtacagcttatttatcaacaaattaagggatcgcatcacgtcaaacaaatagcgtttagttgacgcgcataaccatcaagtgtagcaaactaatgcaaaagtccaccactctactcgcatgacgtttttcacttcgtaacaccaatttactgcctcatttcttgaatatttattatccacactacttcatttttaaactaaaacgtga

SEQ ID NO: 111785 - DNA, 1011 bp, Zea Mays
agtaatctgttaaccctctcctgatgcccatcatcggcctcgccctcaccggagcaccgaactggtactccttgctcgcgggggaaaagttctcatctttctccccgagctcacctcggcatccccgacggtctgggtcgccacagccaacttctccactagctggccgacctccaccccttccttcgccttggccagcgtgaggcgcacgaagctgccaagggtcgtaggggatgtgagcggcacggcgttgacccagttgacagcggtgatgtcgagcgcgttggggaggacgtgcccctgcacggcggccacgtgcgtcgggtgcgctgcgtaggacgccaggctctccctggtggcatggcgggtgtggaggaggtgcgtggggctggtgaggtggtgcgaggccattgcggcaacgcacgcacggtgttcggtggattgccaccacggatggcggcgctacggagcagaggaggtgacggggacgggggctggacccctaagcggagccccactacagccgtcccaccgacccgggagtccgggacccaatggcgtcgtcatcgatggcatcgttgtcgcgtcgttccgtcttgcacgcctcctacacccgctcgcagttttccgcgaccgacatctgcagccacttcattcctctcgtctcgaagtacgtactttagaaccctagatgcagcgacctggatggtgtcccatcgctgccgacggcctcgtgcgcgctcctccggtcgaagtcctggccgacaacgatcttgtttctaatgttttaaaactttttacaagaacttgcatatttctatattggatgtcaggtgctcaagtatggaagaacttgtttcgaattaatgttttaaaaccttttacaagaagacctgttcataacttaattgtcaccggtgtgttatgagttatgactcttggtaaacttgttgttttcatggtaattttcccttcaatccttctacaataataaacaggttgggtgcaaga

SEQ ID NO: 111786 - DNA, 631 bp, Zea Mays
ttgatcaggatgcaggctttcttctataggatatcgttgtgttttttgccgaggtgctcatcctgaaggcaacaacaactatgcaggagcttaccaacgaagattctgaaatatgcagttcaagttacggatgtcaggctgaaactttaccaacgcggccatcattcacatggaaactggaaaatttcttgtcttttaaagagattatggagtccaaaagatttttagtaaaatttttcaggctggaggttgagttgcggataggaaaagtaaatttattcactttcttgtcttatacagcttcaccaaacccttactttgtctttacctcatcgtaagttgcaggtgtatatgagtcgtttgatacgatctgcatatgcttggagagtgatcaatcatctgggaatcggggcggcggattcccggattgatcgcaggttgtagtggtgggtgattggtggccagggtttgaggcgcgatgcacagcggcggggcgccgtgttcaccgcgcgtgagagaagagaggcgcgaggaaaggggcagctaggtcacagtaatctcccggctccctctgggaagccggaacaatcttgtttctgcttgatctatagagtggtgcttacaattattt

SEQ ID NO: 111787 - DNA, 198 bp, Zea Mays
atgggggcgttcgtcccctgggatgccggtgcctgcagctgggcacctggcggctgggacagccccggagatggtggcgactgcgggtggtggggagaaggtggagggttggggctagacatggtgatcgaacctgaaattgctgataccaggttgataggaattggggcggattcccggattgatcgcaggttgtag

SEQ ID NO: 111788 - DNA, 2826 bp, Zea Mays
ctccatcgtccccggcgaaccctgccttcccgtccttccgcggttcctccgcatcatgcgacatggcggattcgcgtggaacaactcccaagagcggtgacaatgataacacctccacgcgcccggcgcgcctccgcgtcatgcgcccggaagtcaaggaatttctgacgagtcctcgccggagacgccccaagaagcaaccgcctccgcctccgcccccgccgccacgaaatgtgaagctgaaggagaggaagaacaaggaaaaggggaaggctgcgacggaggaagacaaattcgagcgcgcgcaatacaactgccccttccaggacgagggcgaagggggccgcgacttcgcgccgccggagctggtctggggtaaggtacggagccactcctggtggcccggacaggtgttcgacgccgctgacgcctccgaaatcgcgctgcagcaccggaaggccggcgcgctgctcatcgtctacttctgggacaggaccttcgcttggagctccccttccgcgctgctccccttccgctccaacttcacgcgactatccgcccagagcactatgtccagcttcgtctccgctatggattccgcgctgcaggaggttgggcgacgcgtagaggctggcctctcgtgcggttgcttcacctccagcattgccaccaagcaggaggttcaaaactctggtatccggcaaggggcgtatggtgcggccgtagactctgtctacacgagggatgccttccatagcaaaacatttcttgactacatctcagcactgggaaagaaaccactggcgggtgctgatcttcttgtccttgctaccgtaaaagcacagctgagggccttgaatcgctcaaggggctcaagggacctccctgagtttgagatgtttgagggcactgatgagattacagaaatgacacacacagatggagatgatacattgagtcgagggaaaaagtcaaagcgcatgaagagttcatcgaagaagaaaactgacatttccaagcatttagatggactcaaaactggttctgttgctgacagcagaacattggccaagaaggcagtaggtgatgctttgagtgagagaaaatctggacgcacactgagatccacgagtaagaaggaagatgctttagagggtttgaaaaggctggcaaaggatggaattcaggaattaacagggaaaagcaaagacgcccccattcttaaagaaaaaaatcaggggcatggggcaggctctgcacacaagaagggtagaatcacagaggatgggtatcatagacttggagatagcaatgccaaggatcccatttttcctggcaagagaagattgggacataacgaaaactcaataagcaaacgagtgcccatctcagagcatggtaggaagaagaagaaactttctgaactcatggcagagacaggcaagcctaattctgcatctagtggtaagagcaaaactcgagggaagcgttcgttgcatgattcagctgagaaaactgaggatcctgaacatcactctaaggatacattgatgactaggaaaagaaagaagctcaacacattgggggatttgtcttcactgtcagagcctctctctcgtaagaagtccacaaaggttggagaactgatgagcaaagtagctgggagcagcatgttacaggctgcacctgctgtcaaagctaatagtgcagtgtctcagacaaaaccacgaagggctaagtacaggcaagtaaatgctgcagacaaatctccatgtcctgtgaaggtgaatcaggggaacagcgaagccgttagtaaggagtctctatcttgtggagaaatgctatggcagctctctgtagcagcatgtggtcttcagcagagagagaaaatcgttcctacaagtgttaacttctttaccggttttagaaagaacaaattttctagttctgatgtcaatgaggggatgcctgagaaggcagccaacactgagtccactctttcagaacagcccattgctgatcatatgcaggatgactattgggctgacattctcattaatgtggaggagccgctatctaacctgaaaaagaagatagatgagagtaagaaaagagtaaacaagaaggcacctcaggttaagaaacctcctgttaattcattgtcgactgtagaaaatgtagacgagccaaggagtgaaggcaaccaagatacaggaaatgaggaacaacttaggaacgaaaccaagttgttttctgcaaatggatctcaactgaacgccggaaccaaatttggtcaagagatggaaaattgctttctgtctggactggtgctgcacttcagcaggccatgcgctgttccatcacagtgtgaccttatcaagatctttagccaatacggtcctgtcaatgaagtgaaggcagatgttgcaaacagtgccagctctgcccaggtgatcttcaagaggcgcatggatgctgaggcagcgtttgcaggtgctgggaagatcagtgcccttggacctgcccttgtgagctttcgtctcactgacttcccagctagtgcttcaggaaataaagcttcccatgttgcatcaaagagcgaatagtgttgcttgaccagtgagggaaactggatgggggagttagagaaaaaggtatactctactgtatgtggtagttaggttgttgcaggattaagaggaacagcaatgtcatctgggtcttccagtgttgtggaggtgtcatactcactatcatttatgctgcagaccagttcagatgagttgccaataaccattaggtgttgtaaaagcaaggttcaagaaa

SEQ ID NO: 111789 - DNA, 2887 bp, Zea Mays
tcgtccccggcgaaccctgccttcccgtccttccgcggttcctccgcatcatgcgacatggcggattcgcgtggaacaactcccaagagcggtgacaatgataacacctccacgcgcccggcgcgcctccgcgtcatgcgcccggaagtcaaggaatttctgacgagtcctcgccggagacgccccaagaagcaaccgcctccgcctccgcccccgccgccacgaaatgtgaagctgaaggagaggaagaacaaggaaaaggggaaggctgcgacggaggaagacaaattcgagcgcgcgcaatacaactgccccttccaggacgagggcgaagggggccgcgacttcgcgccgccggagctggtctggggtaaggtacggagccactcctggtggcccggacaggtgttcgacgccgctgacgcctccgaaatcgcgctgcagcaccggaaggccggcgcgctgctcatcgtctacttctgggacaggaccttcgcttggagctccccttccgcgctgctccccttccgctccaacttcacgcgactatccgcccagagcactatgtccagcttcgtctccgctatggattccgcgctgcaggaggttgggcgacgcgtagaggctggcctctcgtgcggttgcttcacctccagcattgccaccaagcaggaggttcaaaactctggtatccggcaaggggcgtatggtgcggccgtagactctgtctacacgagggatgccttccatagcaaaacatttcttgactacatctcagcactgggaaagaaaccactggcgggtgctgatcttcttgtccttgctaccgtaaaagcacagctgagggccttgaatcgctcaaggggctcaagggacctccctgagtttgagatgtttgagggcactgatgagattacagaaatgacacacacagatggagatgatacattgagtcgagggaaaaagtcaaagcgcatgaagagttcatcgaagaagaaaactgacatttccaagcatttagatggactcaaaactggttctgttgctgacagcagaacattggccaagaaggcagtaggtgatgctttgagtgagagaaaatctggacgcacactgagatccacgagtaagaaggaagatgctttagagggtttgaaaaggctggcaaaggatggaattcaggaattaacagggaaaagcaaagacgcccccattcttaaagaaaaaaatcaggggcatggggcaggctctgcacacaagaagggtagaatcacagaggatgggtatcatagacttggagatagcaatgccaaggatcccatttttcctggcaagagaagattgggacataacgaaaactcaataagcaaacgagtgcccatctcagagcatggtaggaagaagaagaaactttctgaactcatggcagagacaggcaagcctaattctgcatctagtggtaagagcaaaactcgagggaagcgttcgttgcatgattcagctgagaaaactgaggatcctgaacatcactctaaggatacattgatgactaggaaaagaaagaagctcaacacattgggggatttgtcttcactgtcagagcctctctctcgtaagaagtccacaaaggttggagaactgatgagcaaagtagctgggagcagcatgttacaggctgcacctgctgtcaaagctaatagtgcagtgtctcagacaaaaccacgaagggctaagtacaggcaagtaaatgctgcagacaaatctccatgtcctgtgaaggtgaatcaggggaacagcgaagccgttagtaaggagtctctatcttgtggagaaatgctatggcagctctctgtagcagcatgtggtcttcagcagagagagaaaatcgttcctacaagtgttaacttctttaccggttttagaaagaacaaattttctagttctgatgtcaatgaggggatgcctgagaaggcagccaacactgagtccactctttcagaacagcccattgctgatcatatgcaggatgactattgggctgacattctcattaatgtggaggagccgctatctaacctgaaaaagaagatagatgagagtaagaaaagagtaaacaagaaggcacctcaggttaagaaacctcctgttaattcattgtcgactgtagaaaatgtagacgagccaaggagtgaaggcaaccaagatacaggaaatgaggaacaacttaggaacgaaaccaagttgttttctgcaaatggatctcaactgaacgccggaaccaaatttggtcaagagatggaaaattgctttctgtctggactggtgctgcacttcagcaggccatgcgctgttccatcacagtgtgaccttatcaagatctttagccaatacggtcctgtcaatgaagtgaaggcagatgttgcaaacagtgccagctctgcccaggtgatcttcaagaggcgcatggatgctgaggcagcgtttgcaggtgctgggaagatcagtgcccttggacctgcccttgtgagctttcgtctcactgacttcccagctagtgcttcaggaaataaagcttcccatgttgcatcaaagagcgaatagtgttgcttgaccagtgaggtaaaaacggctttcgtatctcttccctagttgggtctgggtttgagtttgacagctgctgtatattatcttatgcacattatggtgtcctcttgtttttttagggaaactggatgggggagttagagaaaaaggtatactctactgtatgtggtagttaggttgttgcaggattaagaggaacagcaatgtcatctgggtcttccagtgttgtggaggtgtcatactcactatcatttatgctgcagaccagttcagatgagttgcc

SEQ ID NO: 111790 - DNA, 76 bp, Zea Mays
ccatctccttcggcggcggcggcggcttacctttgctttgtctcactggcgctgacatctcctgctgcctcacctg

SEQ ID NO: 111791 - DNA, 387 bp, Zea Mays
ttttttctagggtgttctcgacaaagaaagcctgtaccttaaaacaggaggatacaagaagctggagtgattgtctgaaggcttttgaactgcttgaagcattagtgtagctttggtgcttttgtgactgatcaactctggagcagctagagtgatgtagttgtgggcttttgaacaatagctgaagtgatatgaaacattagtgatgtagttgtgggcttttgaactgcttcaagttagagtgatgtcaatgtggtgcttttgtgattgatcacctctggagtttttgtgaatgatctagctagctatctgtaaatgatctagttgtgaatgatattataattgtgatgcttttgtgaatatataattgtggtgctttttgtgttt

SEQ ID NO: 111792 - DNA, 2354 bp, Zea Mays
tgccttcagtgtggatatcgatcagttagcccaactgtgtagcacaaaacaaaaacaaatacgtaacgtactccacaggattcgtcagcatcgactgcggcggctccaccaactacacggacgagctgggcctgcagtggacgggcgacgccggctggttccccttcggccagacggccaccatctccgtgccctccgagaaacgcgcgcagtactccacgctgcgctacttcccatcaccgtccgccagcagcagcagcagcagcaagcactgctacacgctgcacgtccgcacccgcacacgctacctcgtccgcgccaccttcctgtacggcaacttcgacagcagcaacgtgttcccggagttcgatctttaccttggcgcctcccactggtccaccatcgtcatctacgacgactccaaggtggtcaccagggaggccgtcgtcctcgccgccgaccccgccctcagcgtctgcctgtcgtccacggggacggggacgcccttcatctccacgctggagctccggcagctgaacggctccctctactacaccgactacgaggcggacgccttcctggccctctccgccaggatcaacttcggcgcgcccaccgccgaccccgtcaggtacccggacgacccctacgacaggatctgggagtcggacatggtgaggagggccaactacctggtggacgtggccgccggcaccgtcaacgtctccaccgacaggcccgtcttcgtggccggcagcgagaggcccccgcagaaggtgatgcagacggcggtggtcgggtcgctgggcgagctcacctatcgcctcgacctcccaggcttcccgggcaacggctgggccttctcgtacctggctgagatcgaggagttcttggtcccggagacgcgcaagttcaagctctacatcccggggctggcggacgtgagcaagcccacggtggacatcggcgagaacgcgccgggcaagtaccggctctacgagccaggcttccccaacatctcgctgcctttcgtcctgtccttggcgctgaggaagaccaacgattcgtccaaggggccaattctcaacgccttggagatatacaagtacatgcacatggaactcggctcaccggatggacctgtgatggcgaccctgagcctggccctggcgtcgtcgtcgtcgtccttggctgatgttgcaatggaaggcggtgatccctgcctaccttcaccctggtcctgggtcaagtgcaattcagaagcgcaaccaagagtagtttccataaatctttcaggaaagaacttgacagggagcataccaccccaagtagcggatttgccctgcttagcagagatcggatttgctaataacatgttgacgggcccaattcctgatctcagtggctcctccaacctatccatcattcatcttgagaacaaccaactgaccggaactgttccttcctactttggcagcttgccaaaactgagcgagctgtaccttgagaacaaccggttgtctggacccattcccaaggctctgctaagtcgaagcattattttcaactactctgggaacgtgtaccttggaacagcagggaagcaaaagaagaagcatgtcatcatcattatatctgctctgcttggagcatccttgctacttgcagccgccctctgttgctatatgctgacacgcaaggccatgaattcatcatcctcaccacaagcacaagagcagaacaagttgcagaaatacccaagcacgcagcagctgcagtcgatcgccaccgagacggctcatccctacagcctgtgtgagctggaagaggcgaccaacaagttcgcgagcaggatcggctcagggggtttcgggatagtgtactacgggaagctgagcgatggaaaggagatcgctgtgaaggtgcctagcaacgattcgtaccaggggaagaagcagttctcgaacgaggtggtcttgctctcgaggatacaccataggaacctagtggcgtttctaggctactgccatgaggatgggagaaacattctggtctacgagttcatgcacaatggaacgctcaaagagcagctgcataggcgcgacaagcacatcagttggatcaagcggcttgagattgccgaggatgctgcgaaaggcatcgagtatcttcacactggatgcacgccatcgatcatccacagagacatcaagacgagcaacatccttctggacaagcatatgagagccaaggtgtccgactttgggctatccaagttgctggcagcggagggcaaggactctcacgcgtcaaccaacgtgagagggacaatgggctacctggacccgcagtga

SEQ ID NO: 111793 - DNA, 715 bp, Zea Mays
gtactacgtctctcagcagctgaccgagaagagcgacatgtacagcttcggcatcatcctgctggagctcatatccggctgtcctcccatctccaccatcgccttcggggacaacttccgcaacatcgggccgtgggccaagttctactacgagagcggcgacatcgaggccataatcgacccctccatctccacggcggccgagtaccaggacgtgcagtccgtctggaagatcgccgaggcggcggtccggtgcatcgacgcagagcctcggaagcggccctgcatgcctgaggtggttaaggagatccaggatgcattggcgctggagcgggcggcggcggagacgaccaccagcgacagggcgctcgcctgccctttctcccccgcggctgcgagcgtcaggtccggcgggacaatgaggtcgcacgacatggtcatggacaacctgctgctcttggacgatgacgacgactccaccttctccggttcgaccgtcaccaagctcaagtacccggagctacgatagctgtgatggaaccaagctcaagcaggattgcaattaattagtatagtagtagtcagcaattcatttgagttagactgttagagcagtggtgagatagcagattttaatttgcagttgttgttacgttacattacattacgaatgtgtttggttggctggcctaactcaggaccaggcccatttgat

SEQ ID NO: 111794 - DNA, 125 bp, Zea Mays
aatttattaaaattgttttatggtaaagctgaacttttctaggccaagctctaccaaacatacccttaagctagattttttaaattctcaaaatagttttattagatacttcatgcaatatttta

SEQ ID NO: 111795 - DNA, 1788 bp, Zea Mays
atggtctcgcggggactcttcggctggtccccgccccacgtccagccgctcacgccggtctccgagacctccgagccgcccgagtcgccctccccctacgccgccgacctcggcctcggaggggacggcgctccgccgcctgacgacgatgcccaaccgcccctagacgatgccgacgacgacccggacccgccgcccgccgctgtccccttcaagcgcctcttcgcctgcgccgaccgcctcgactgggcgctcatggtcgccggcagcctcgcagccgctgcacacggagtcgcgctcgtcgtctacctccacctcttcggcaaagccatcaactcgcttcatgcccatgggcggcatacccacgacctcttccacgatatcaaccaggcaattgcatatgcgctcttcattcctcttcttacccaccctgttggaaactacattcacaacatggctacatttttcggtggtcttgtcattggtctggtcaactgttggcaaatagctttattgacattagcaactgggcccttcatcgttgctgcaggaggaatatcaaatatatttctccataggcttgcagaaaatattcaggatgcttatggtgacgcagcaagcattgctgaacaggcaatcttgtacattaggaccttgtattccttcacaaatgagacccttgcaaaatattcttatgctacttcacttcaagcaacactgcgctatggaatccttataagtttggtgcaaggtcttggtcttggatttacatatggccttgccatatgttcttgtgccttacaactttgggttgggaggttcctgatctctcatggaagagctaatggtggtgaagttgtagtagcactgtttgctattatcttgagtggacttggacttaatcaagcagcaacaaacttctattcctttgagcaaggacgtatagctgcatacagactatatgaaatgataagccgttcaacatctactgtgaaccaggatggtagtaccttgtcttcagttcaaggcaacatcgagttccgcaatgtctacttcagctacttgtcccgccctgaaatccccatcttaagtggattctacctcactgtacctgctagaaaaactgttgctcttgttggcagaaatggttcaggaaaaagcagcataattcctctaatggaacgcttctatgacccaaccttaggtgaagtgcttttggatggggagaacataaagaatttgaagctagagtggttaagaagccaaataggacttgtgactcaagaaccagctttgttgagcttgagcatcatggaaaatattgcatatggtagatgtgccacaactgaccaaattgaagaggcagctaaaacagctcacgtgcatgctttcatcagttcactagaaaaaggatatgaaacacaggttggtcgggctggcctttctctgacagaagaacaaaagataaaactttccattgctcgtgctgtgctctcaaatccatcaattcttctactggatgaggtcactggtgctcttgattttgaggcagagaaagcagtccaggaagcactagacattctaatgcttgggaggtctaccatcatcatagctcggcgcctcagtcttatcaggaatgctgattatatagcagtaatggaggaaggtcaacttgttgagatggggacacatgaagaattgttaaaccttgatggtctttatgcagaacttcttaggtgtgaagaagccgcaaaactcccaaagaggtttgtcaacccatcctcttga

SEQ ID NO: 111796 - DNA, 934 bp, Zea Mays
atgtttcttttatatcgttcttgattatttccaggttattagtcttgttggagcacaaaaggcaactttgcatcctgatgatattttattacttgcgaatttcattctgtcctctggatcttttagaacttcagagtcttttgtacccatatgtttgccaagatacaatcctatggcctacttgcatgcttatgttcatttttttgacgaacatacatatgtgactttgcttactacacgatcagatgctttttatgatctcaaagattccagggcccacattcaaaatgctcttttaaagtcaaatgtcctcatcgaagtccaaagatctttacatgagaatgcattgcgtgttgaggatctcccaaccaacccgtcttctcaatctgcatcacaccctccagagtcctctcaagacattagttcacaatctttgtcttctgaaatggcaattggaggaccaggtggactatggcattttatatataaaagcatttaccttgaccagtttgtgtcatcagaatttccctcacccataagtaacaaaaagcagaagaagggattgtacaaagcttaccaaaaattgtatgcatccatgcatgataaagcaactggtccacacaaaactcaattcagaagagatgaggattatgttctattttgctggataacccaggatttcgaactatatgcagcctttaatccactggctgataagactcaagcaatcaagatgtgcaatagagtatgccaatgggtgagggatttagaaaatgagatattcgtgtatggagaaagcaccctttcctggcagtaccatcgttgttggggaggtgtatgagggggctaagtttgtcgcacttttgacattttctcaggaatggtgctccttttttttatctgtctgatgaactggaggttttttttcttctta

SEQ ID NO: 111797 - DNA, 1271 bp, Zea Mays
ttcttttatatcgttcttgattatttccaggttattagtcttgttggagcacaaaaggcaactttgcatcctgatgatattttattacttgcgaatttcattctgtcctctggatcttttagaacttcagagtcttttgtacccatatgtttgccaagatacaatcctatggcctacttgcatgcttatgttcatttttttgacgaacatacatatgtgactttgcttactacacgatcagatgctttttatgatctcaaagattccagggcccacattcaaaatgctcttttaaagtcaaatgtcctcatcgaagtccaaagatctttacatgagaatgcattgcgtgttgaggatctcccaaccaacccgtcttctcaatctgcatcacaccctccagagtcctctcaagacattagttcacaatctttgtcttctgaaatggcaattggaggaccaggtggactatggcattttatatataaaagcatttaccttgaccagtttgtgtcatcagaatttccctcacccataagtaacaaaaagcagaagaagggattgtacaaagcttaccaaaaattgtatgcatccatgcatgataaagcaactggtccacacaaaactcaattcagaagagatgaggattatgttctattttgctggataacccaggatttcgaactatatgcagcctttaatccactggctgataagactcaagcaatcaagatgtgcaatagagtatgccaatgggtgagggatttagaaaatgagatattcgtgtatggagaaagcaccctttcctggtgatatgttgtcctgtgtgtaataacttgttatgcctatgttacattttttttgttgaaagttttttttgatgttacttgtaccgacacaggcagtaccatcgttgttggggaggtgtatgagggggctaagtttgtcgcacttttgacattttctcaggaatggtgctccttttttttatctgtctgatgaactggaggttttttttcttcttatcattatatgtctacggcaccatttcctatctgtttgtagcagcccgttaaatttattaatttgggaagggtctattctgagggaaggagtagagcaataccatgtaacctctgcccgcagttgctggtcttcaaatttatagagaagggggatgttgatgcaagtctgcttggttgagctgcgtcctgtattctagttctagatgaggaaaccctgggctgtgttgatgcaaataatctttttttttt

SEQ ID NO: 111798 - DNA, 815 bp, Zea Mays
gtcccatgctaccacgacctttattgttcttgctgaactctagtttagaaattgtcaatactgactggtgacagattaggggattttcatcaatacgtccatttcagggtcactcttcatctataccaccaacaaagctagccaatgacacgttgggtctggttctaaatgttcgtgtttttactggtgttcgagggaaattgagtgtggaacatacatatgtgactttgcttactacacgatcagatgctttttatgatctcaaagattccagggcccacattcaaaatgctcttttaaagtcaaatgtcctcatcgaagtccaaagatctttacatgagaatgcattgcgtgttgaggatctcccaaccaacccgtcttctcaatctgcatcacaccctccagagtcctctcaagacattagttcacaatctttgtcttctgaaatggcaattggaggaccaggtggactatggcattttatatataaaagcatttaccttgaccagtttgtgtcatcagaatttccctcacccataagtaacaaaaagcagaagaagggattgtacaaagcttaccaaaaattgtatgcatccatgcatgataaagcaactggtccacacaaaactcaattcagaagagatgaggattatgttctattttgctggataacccaggatttcgaactatatgcagcctttaatccactggctgataagactcaagcaatcaagatgtgcaatagagtatgccaatgggtgagggatttagaaaatgagatattcgtgtatggagaaagcaccctttcctggtga

SEQ ID NO: 111799 - DNA, 457 bp, Zea Mays
gtcgcaggacgcgtcgagccacgcggcgcagaacgaccggctgccgatctagatggtggtgcgcgtgctctacttcgagcagctccgcctcaagtcgtccttctcgggcggcgggtccgggtgcgtcggcttgggcggcgccgacgggtccttctcgcagcggttcatgtgtagcagcagctcatgcgtccatgaaggacgacttgaggcggagctttgtacctccatgcagccgggtgaagggaaccagaagcaagacggctgcgcgggatacagacggcagcgtaggtaccagatcctagttcagacgggggcgcgggcaccagatccttgttcagacgggggcgcgggcaccatgtggcagatggccgcgcggaatgcagacggcggcgcgggcgagtctccagcgcgggcaccgtctgttaagttactcccgtctgttctctttcgcggctag

SEQ ID NO: 111800 - DNA, 675 bp, Zea Mays
tatcctcctctcgtcggcaacccaacgccaccaccgccgctcttctcttccatgtgcccgccatttatttatatttatcactactctaacctcgcctcgcctcgtttaaacaaaacaaataaactaataagctatgaccgtgagccgtcgtcgtcggagaagaagaagaaaggctagtgttgtgctgctgtcgcatcagccgcccgccgagcctcagatccaccaccagcaccgatgccggtcctctgcacccaccacgttcagctccgcctctggtggcgccgtctcggccgacgcagcgccacattcgccctcgcgctcctcgccgtcgccctcgtgctcacgctctcccgctacgccgcaggccctgcgccctccccgcccccgtcctcgtcctacgggcatcgcctcccggccctcgtcgacatcaccctcgtctacggcgccatcgacaagggcgcagtgtgcttggatggtacgccgcctgcctaccacttccttcctggatttggggacggatcccacaactggctcctccacttggagggcggaagctggtgccgcaatttcgaatcatgtgctcgccgtaagaaaacaaatctcggttcctctgcccacatggatactcgtgctgaattcgtcggcatcctaagtgacgatcaatctcaaaatcag

SEQ ID NO: 111801 - DNA, 271 bp, Zea Mays
gatctaaaacctaaactcgtaataccatgaaggaaggagagaatgtgtataatgtgtaatgttcattgcctgagccctcgagatgtttatcatggcttggagggcaaggcgcctctcctagagataaggaaggctatcatgggattacaatcaatcctaaactatccatatccggtgttgcctaatatactctaacacgattgaaggcttgatatcaaccaccaacgatttaacttgagtctcttttagcacggtcattaagacctcttac

SEQ ID NO: 111802 - DNA, 1103 bp, Zea Mays
tggcatgcatctctaccgcatattcgagaaaaaagaagaatttcacagtgatttttcttctaccttctatgcagagaagacatttctgggaagaaggtatatgcggggcttttataacgatgttgctcggctgcaggatgtgcgtaaaatattccctcattgcagctcagatatggaaccggggcagtgcttcttcccacaagaagttgcaaaaagcatcaccaccccgatgtttatactcaatccagcatatgatgtttggcaggtagagcatgtgttgtctccagaaggttctgaccgtgaaaatctatggcaaaattgcaggatggatattagcaggtgtagctcaaaacagcttgaagttcttcaaggtttcaggaaagcgctgcttgatgctataaatgaattcaagaagagaagggactggggtatgttcattgactcctgctttatacactgtcagtcaatgaaagctttggcttggcattcgccatcagctgctagagtgaacaacaagacggccgcagaagcggtgggagattggttctttgagcggagggaggtgaaggaaatagattgtgaatatccctgcaacccgacatgctacaatgtggttctcgatcagccctacaaggaagattaactgacttgcagtgttagttgtggtagatttaattcgtaattgactctccatgagttgatatttgtcgagctaaatgtgatcattagcagagttcggactgagacttgtacttgaggcctattaaaatacgaggagaacaatacttacaaagagaattctatacaatgagcgttgatatgacatacagtaggatatatgtgtgtgtcacgagacgagagggaccttgtccttgaaacagggtaggccatcgttttctttgagagggacattgtgctgtgcatggagagataggtaaggctgacaagttgaccaacgcaacagcatgctgtgtattcaccacgtcatctgttgtatttttttgttgttgttgttcaggttggctgatgacagtggcaagggatgttgtctccgtgagcggagcctggttggttgatgcgtttgtgttctccgggggtccagt

SEQ ID NO: 111803 - DNA, 88 bp, Zea Mays
atcatattgcatgcattctgaatctgttcatgctccggcctttatgacgctgaatgctgatgtcccagactcacacctatatatacta

SEQ ID NO: 111804 - DNA, 483 bp, Zea Mays
gaagatgagatcgagtcgaggacgactccaattcaagaggaggaggatgatgaggatatcacttctatacatacaatgaatggaccgataacacgatctcgtgcacgacagctaaatctccaggtacgttctaccctagtcaattgtgtttcagagcttatgcttggggccatggatgttttgatgattaggtaccttggagaggatcagcaaggacttgggaaaggccaaggtgttgaggaggagcagcaagggcagccacaacaggaaggagatcaagtccgactcggctgcgactccatctcgggtttcaggaccagtctgcactaaaatagacgcccaggatgcatcccaactccgatttagacggacttgatatggttggaaagataaggagattatctaaccaaccaaccggttccaccttaaaattcatccggagtcaacgggaatcgtcgaaacaattcagcgttcagattctgt

SEQ ID NO: 111805 - DNA, 3002 bp, Zea Mays
gggtaggtctggtgcaatggtgagagctgtctcattgagtcaccaggtcgtgggttcaaagcagcctctccgtattttcaggggaaggtctacctcagtttattttcttctctagaccccactcatgtgggagcctctagcacagggttttctttattttttcacacaattaacattttttagggtatgctgagctctcaaaagtcatcagccagaacgaaggctcttgatttgatcctaaatctgggggtacatgcacacctgctgcaacctatggttattggagatgcgccgcttatagataaaagtgaatctgtgaaccgttcttatctgagcaatgaatacggatcaagtataaatgaaccgagggaagcagaacctgaagtagaacagaagatcagtcctgctattgatcaatttgaatcatggcttcttaaaatgctttttgaggttctccttctcctagtacagatagaggagcgacaagagatcgtgtgggcctcagctttgagttgtctattttactttgtttgtgatggaggaaaaattatcaggagtagactgggaggtctggacataagggtggttaagactcttcttgagattagtgtggagcactcttgggcaaaagtagtgcacagcaagctcatttgcatgttatcaaatatgatgtaccaagtatcagatttaactcagaatggtgtttctgacacacattttgttcctgagcggattgatcttcttggtgggattgactacatttgtcttgagtattcacgagccaactcaagggaagagaagcgggatttgttctttgtcatttttgactacgtagtgcatcaaataaatgaggcatgcttggctggtggtatttcaacctatacttatgatgatgcccagccccttgcttcccttcttgcctttgctgatgctcctgaggctttctacatatctgtgaagcacggcgttgaaggcgtcggagacatgctaagaaaagctatatcagcagcattatctcagtctgctcaatatgaccaattgaatgtgcttctggataaggttatgaggaaacttgatggaactgccagcacattttccaggattgacaatgagttttcttatatgatccaagtaacgaaatcatgcaagtgttttggcagcattaaagatggatgtgatgatgctgatgtagcgcttagagccaggctttgctgggcaactttgcactcacttcttcactcacatatttcatcatataggcaccatggatatatttggttagttgaattgctcctttcagaaatcagtgaagaaacagatggttctgtatggtctaaaatccaaaagcttcaagaggaaattgaagttgctggtagccaagacctatcatgttcagaagtctctctgcctgtttgtatgctttgtgggcttctaaagtcaaaacacaatttcattaggtggggattcctatatgtgctggacaaatttcttatgcgttgcaaattattattggatgacaatgacatgcaagaccacacaactgctgatcataataaaaattgtcttgataaagcttttgcggttatagatattatgaatagtgctttgttacttgttgttcaaaacaatgagacggaccatatcaacatattaaagatgtgtgacatgctgttctctcaattatgcctgagaattccatccacaaatgcgatgcaagttaggggtcttcagtcccttggtcaactttttggttatacatctaagaacatcgatagtcatttggaaacccttgcatctcaccaaagtattggaaataagaatatttgccggagtgagacattgcaagatattggcatagatcaatctggtcaatccacttctttctgtgaagcatcaatggcagcactgcttctgagagggctcgcgatagccccaatgcagcttgtagcccgtgtaccaacctctttgtttttctggccattgatacagcttgaaggggcagccagtgatgacattgcattgggtattgctgttggtagcacaggaagaggcaaccttcctggtgctacatcagatatccgagcagcactccttttacttttgatcggtaaatgcacagctgatcaggaggcactgaaagaggtagaaggcaatgagttcttcaggggtcttctggatgacacagattcaagggtagcatactattctgccgcttttcttttgaagagaatgatgacagaggaaccagagatataccaacggatgcttcaaagcctcatctcaaaagctcaacagtgtaacaatgagaaacttctggagaacccataccttcagatgcgtgggatattgcagttatcaaatgacctaggagttcaatgataagatcgtgatgacatttcaatggataaagctctaagttagaatcactacttctggctgtgtttattgcagagaacctgaagatgttccgaactaagatgctatgtgaatcatgtaaattattgctttggccagatgcatgtacagatccatgaatttctttattctttgttagactagtcacagtccaagggagtcacagattaacaagataatctgatgatcatcctgtgttatggacacagtgcattgtggtttaccaacctggacgacttgacaaaggtttaagccaaggtggcgtagatgtgactccctacaattttgtattgcagaaaccgttgagatctgaggcaaggcattatatatattttttgggcgagacatgctcggttcaataaatatttgtgtgttcgctttgcatatatggtaactgatcagaggagtgtagatttgtattgcggagtaacaatgtaaatgttaggtttgaatatactgatttcgagatgatgtaatccttctatactagcttagcttccatgttggttgtttaatttcgataagaggttgtttacttttatatgctgtttggtttacatatttgtgacgtgatgaataaccgataa

SEQ ID NO: 111806 - DNA, 1397 bp, Zea Mays
tatcatattttttcatgattatttgaatttggaattgttgaagatgtgtgacatgctgttctctcaattatgcctgagaattccatccacaaatgcgatgcaagttaggggtcttcagtcccttggtcaactttttggttatacatctaagaacatcgatagtcatttggaaacccttgcatctcaccaaagtattggaaataagaatatttgccggagtgagacattgcaagatattggcatagatcaatctggtcaatccacttctttctgtgaagcatcaatggcagcactgcttctgagagggctcgcgatagccccaatgcagcttgtagcccgtgtaccaacctctttgtttttctggccattgatacagcttgaaggggcagccagtgatgacattgcattgggtattgctgttggtagcacaggaagaggcaaccttcctggtgctacatcagatatccgagcagcactccttttacttttgatcggtaaatgcacagctgatcaggaggcactgaaagaggtagaaggcaatgagttcttcaggggtcttctggatgacacagattcaagggtagcatactattctgccgcttttcttttgaagagaatgatgacagaggaaccagagatataccaacggatgcttcaaagcctcatctcaaaagctcaacagtgtaacaatgagaaacttctggagaacccataccttcagatgcgtgggatattgcagttatcaaatgacctaggagttcaatgataagatcgtgatgacatttcaatggataaagctctaagttagaatcactacttctggctgtgtttattgcagagaacctgaagatgttccgaactaagttttgcagatgctatgtgaatcatgtaaattattgctttggccagatgcatgtacagatccatgaatttctttattctttgttagactagtcacagtccaagggagtcacagattaacaagataatctgatgatcatcctgtgttatggacacagtgcattgtggtttaccaacctggacgacttgacaaaggtttaagccaaggtggcgtagatgtgactccctacaattttgtattgcagaaaccgttgagatctgaggcaaggcattatatatattttttgggcgagacatgctcggttcaataaatatttgtgtgttcgctttgcatatatggtaactgatcagaggagtgtagatttgtattgcggagtaacaatgtaaatgttaggtttgaatatactgatttcgagatgatgtaatccttctatactagcttagcttccatgttggttgtttaatttcgataagaggttgtttacttttatatgctgtttggtttacatatttgtgacgtgatgaataaccgataa

SEQ ID NO: 111807 - DNA, 1389 bp, Zea Mays
tatcatattttttcatgattatttgaatttggaattgttgaagatgtgtgacatgctgttctctcaattatgcctgagaattccatccacaaatgcgatgcaagttaggggtcttcagtcccttggtcaactttttggttatacatctaagaacatcgatagtcatttggaaacccttgcatctcaccaaagtattggaaataagaatatttgccggagtgagacattgcaagatattggcatagatcaatctggtcaatccacttctttctgtgaagcatcaatggcagcactgcttctgagagggctcgcgatagccccaatgcagcttgtagcccgtgtaccaacctctttgtttttctggccattgatacagcttgaaggggcagccagtgatgacattgcattgggtattgctgttggtagcacaggaagaggcaaccttcctggtgctacatcagatatccgagcagcactccttttacttttgatcggtaaatgcacagctgatcaggaggcactgaaagaggtagaaggcaatgagttcttcaggggtcttctggatgacacagattcaagggtagcatactattctgccgcttttcttttgaagagaatgatgacagaggaaccagagatataccaacggatgcttcaaagcctcatctcaaaagctcaacagtgtaacaatgagaaacttctggagaacccataccttcagatgcgtgggatattgcagttatcaaatgacctaggagttcaatgataagatcgtgatgacatttcaatggataaagctctaagttagaatcactacttctggctgtgtttattgcagagaacctgaagatgttccgaactaagatgctatgtgaatcatgtaaattattgctttggccagatgcatgtacagatccatgaatttctttattctttgttagactagtcacagtccaagggagtcacagattaacaagataatctgatgatcatcctgtgttatggacacagtgcattgtggtttaccaacctggacgacttgacaaaggtttaagccaaggtggcgtagatgtgactccctacaattttgtattgcagaaaccgttgagatctgaggcaaggcattatatatattttttgggcgagacatgctcggttcaataaatatttgtgtgttcgctttgcatatatggtaactgatcagaggagtgtagatttgtattgcggagtaacaatgtaaatgttaggtttgaatatactgatttcgagatgatgtaatccttctatactagcttagcttccatgttggttgtttaatttcgataagaggttgtttacttttatatgctgtttggtttacatatttgtgacgtgatgaataaccgataa

SEQ ID NO: 111808 - DNA, 704 bp, Zea Mays
aatttttcctatgcatctgtgttgatggaccaaccctttccagtatcctgccacttcttatgatcaagattattttgtcgtttcttatgattgaaatgctaggctaccagaataacattctccatagtccctatttgtactatcgaggttactaatatttcttgtttgtagttttgcagatgctatgtgaatcatgtaaattattgctttggccagatgcatgtacagatccatgaatttctttattctttgttagactagtcacagtccaagggagtcacagattaacaagataatctgatgatcatcctgtgttatggacacagtgcattgtggtttaccaacctggacgacttgacaaaggtttaagccaaggtggcgtagatgtgactccctacaattttgtattgcagaaaccgttgagatctgaggcaaggcattatatatattttttgggcgagacatgctcggttcaataaatatttgtgtgttcgctttgcatatatggtaactgatcagaggagtgtagatttgtattgcggagtaacaatgtaaatgttaggtttgaatatactgatttcgagatgatgtaatccttctatactagcttagcttccatgttggttgtttaatttcgataagaggttgtttacttttatatgctgtttggtttacatatttgtgacgtgatgaataaccgataa

SEQ ID NO: 111809 - DNA, 266 bp, Zea Mays
aaggaaagagagctagaagaaggagaagcacaaaagtcaccctccaagattgttgctgatagtctcagccagatcagtcgctcatccaccttccttccaaacattgttgtctgtttgaatgcttcaaacctttgtggtgaaacctttgtatgtttgaacctctgttgtggaagaactagtgtgctggaattgtgtatgacttgtgatgagaatgttgtgtatgatggcttttctgtgtattatgattctgtgagctatcatgagag

SEQ ID NO: 111810 - DNA, 791 bp, Zea Mays
cgaagttcctccccgctcggcgcccaacccctgcgtcgcgtccatcctctgctcttcctgttcgccggcagaagctccgagccgagcgttccttctcttcgccgcgcgcctagccgtcgaagctccctgccatcgtcgttttcggccctgccgttggtacaacatcatttgctgttgctagttgatgcaacgttgccgtccttcgacgccgcgccgtgagcagcgacttcgtcgatccgtcattttgatagggtacttgcgctgctctcctgtgtatgtgatgattggaaaaggagtcccagctgatgaaggattaagctgatgaaggattaaggaacgaaagctctagtacaccgcctgccagctgatcgtcgtacatcctaaaccagggtttaatcattttctttgtgaagttcgagccgattataattttggaaggagatttggtgctgaagtcgaagctagcagcccctttattcttcgtcgtcaacccacgccgcgtcgcgacgtgcccgtcgatcccgacgatctatctgctagatgcgtgccacttgtgttgagctccaaagcccctgtcgagctcttcccctgaaagccgccttcgagcacaacccctgtcatgtgttcgatgggaagtctgaaccaatgctcatcgtcgatctacgattatcaaatcattctggtcatggtaagtcgatgaattattcagaatagttcaattgttgaataaattaatgtgctagtgtgatgctcactagttgctcgataaattacgcgagtcacggaactct

SEQ ID NO: 111811 - DNA, 791 bp, Zea Mays
cgaagttcctccccgctcggcgcccaacccctgcgtcgcgtccatcctctgctcttcctgttcgccggcagaagctcccagccgagcgttccttctcttcgccgcgcgcccagccgtcgaagctccctgccatcgtcgttttcggccctgccgttggtacaacatcatttgctgttgctagttgatgcaacgttgccgtccttcgacgccgcgccgtgagcagcgacttcgtcgatccgtcattttgacaaggtacttgcgctactctcctgtgtatgtgatgattggaaaaggagtcccagctgatgaaggattaagctgatgaaggattaaggaacgaaagctctagtacaccgcctgccagctgatcatcgtacatcctgaaccagggtttaatcattttctttgtgaagttcgagccgattataattttggaaggagatttggtgctgaagtcaaagctagcagcccctttattcttcgtcgtcaacccacgccgcgtcgcgacgtgcccgtcgatcccgacgatctatctgccagatgcgtgccacttgtgttgagctccaaagcccctgtcgagctcttcccctgaaagccgccttcgagcacaacccctgtcatgtgttcgatgggaagtctgaaccaatgctcatcgtcgatctacgattatcaaatcattctggtcatggtaagtcgatgagttattcagaatagttcaattgttgaataaattaatgtgctagtgtgatgctcactagttgctcgataaattacgcgagtcacggaactct

SEQ ID NO: 111812 - DNA, 1205 bp, Zea Mays
agagttccgtgacgcgtaatttatcgagcaactagtgagcatcacactagcacattaatttattcaacaattgaactattctgaataactcatcgacttaccatgaccagaatgatttgataatcgtagatcgacgatgagcattggttcagacttcccatcgaacacatgacaggggttgtgctcgaaggcggctttcaggggaagagctcgacaggggctttggagctcaacacaagtggcacacatctggcagatagatcgtcgggatcgacgggcacgtcgcgacgcggcgtgggttgacgacgaagaataaaggggctgctagcttcgacttcagcaccaaatctccttccaaaattataatcggctcgaacttcacaaagaaaatgattaaaccctggttcaggatgtacgacgatcagctggcaggcggtgtactagagctttcgttccttaatccttcatcagcttaatccttcatcagctgggactccttttccaatcatcacatacacaggagagcagcgcaagtaccctgtcaaaatgacggatcgacgaagtcgctgctcacggcgcggcgtcgaaggacgacaacgttgcatcaactagcaacagtaaatgatgttgtaccaacggcagggccgaaaacgacgaaggcagggagcttcgacggctgggcgcacggcgaagagaaggaacgctcggctctgggagcttctgccggcgaacaggaagagcagaggatggacgcgacgcaggggttgggcgccgagcggggaggaacttcaagttgagccgcggggagctccacggcggagtcacggtttgggaaagaaagagacagcgtgcgtacagagagaaagagaggcgagctgagttgaagaggggcagggatggagctcggccatggggagcgggcagagctcggcgagctggagacgaccagggcgagctgaggaaacaccgagctagagctccacggcgcgcaaggaggcccggttggggtagaggaaatccgagcccagggaggaagaaacagctgggcggccagaaaatctgctcctgggagccgagcgcgagaggggataaacaccgacagccaggaaatatcaagagagaacgacggtgggagctttggctgccggaaaaatcttgcgatggctgaggacgacggcatagaggatagcgacgggaggagatga

SEQ ID NO: 111813 - DNA, 1741 bp, Zea Mays
attttggcccatttaggcgccatgcccagcccaatccaagaaacaacggaacgaggttggatgatgacgtggttttctcctttttccccaccaaaagaaatttgaaatccagtcagtccaggtttccccagcccctccgcttctccaatgtctaccgccgtccacgctgcagccatggcggaggacgccgccgccgatctgcgccggaggatgaaggacaagcgagccgccatcgagcgccggatcaccgactcccgggaccgcgccgccgccgcctcctccgccttcagcgccgccctcctcgaggcgcgctccatcgccaaccagaccgtctccaaccgaggcatatcaaactcttggccccctacttctactactcgcctcttttttcccccttcggctttggcttcgccctcctctccaatctttggtttagttagcataatggatcagccaggtccggtagggttagtgtttccgtgggaagccagcatccaatccaccaccgaggctcctaaaactagtcaaccaggcagctcgattctgcctggcacagccccgcctactatgttggccttgtgctgagatctcactcagtggcagatccaagtaggcaagtaatcaagcacctgcctagtactagtactcatttcttgataaaggtgttctctcgaggtggccgtcgctcaattcatctaccactcatcaatttggcaaacagctttggccgttgccttttagtacaacatttgccattagcatcttatctatatgcttgtttaagctcattattatttgcaaaattactttactcatctctctctctctctctctctctctctgtgtgtgtgtgtgtgtgttttggattggcagcaaaactcagcgaacaaaaacaacacctcaggaaattagaatcagatctagcacaggccctctccgtccaagcaagcagaaggtcaaaacacaagttcatgactgagtcgatttcaaacaccactgcaacaaatgaacatcttagacacttggctatggaccgtaggtctacaagagatgaatgcatgaatgccatatcaaatcaactaaaagatattgaatcccttgaagctgaaagtgacgcacatggagataagagcctagagacggctcttatgtggtatgataagtttcttggttttcaagttgttggaggagaaggggtgaaatttgtgttcaacaaaattgatgtgcaaaatcctgacaagaagtattctttttgcataaaacttgctggagaaagatacatcttagtctggtgtgttccatctgtggacgatgctgaagaattggtgaaggatcttaactgcagcaatgatctgtacaaatttgtgagggccatgagagagatgttccaggctgctacaatcagtggaaatctgttgccaagctccttttgccccgacgtttcatccataacatcttcatcgttctcagcgttatcactggattccagaagtgaaaaatagcattaatcagagtcataccatgacattgacttagcaatgggctgcggatatctgtacagtacaagttgaagcacttctgaagccctcttctgttacacacgctagcagtgttgtataatgcttgtctgctgcttgcattttgactccaaactcgcagttttgctgtttgtaactttgtactattacctatcattcttaataatcatggtaatgtttgagccttttaggtgctcgatccc

SEQ ID NO: 111814 - DNA, 1211 bp, Zea Mays
attttggcccatttaggcgccatgcccagcccaatccaagaaacaacggaacgaggttggatgatgacgtggttttctcctttttccccaccaaaagaaatttgaaatccagtcagtccaggtttccccagcccctccgcttctccaatgtctaccgccgtccacgctgcagccatggcggaggacgccgccgccgatctgcgccggaggatgaaggacaagcgagccgccatcgagcgccggatcaccgactcccgggaccgcgccgccgccgcctcctccgccttcagcgccgccctcctcgaggcgcgctccatcgccaaccagaccgtctccaaccgagcaaaactcagcgaacaaaaacaacacctcaggaaattagaatcagatctagcacaggccctctccgtccaagcaagcagaaggtcaaaacacaagttcatgactgagtcgatttcaaacaccactgcaacaaatgaacatcttagacacttggctatggaccgtaggtctacaagagatgaatgcatgaatgccatatcaaatcaactaaaagatattgaatcccttgaagctgaaagtgacgcacatggagataagagcctagagacggctcttatgtggtatgataagtttcttggttttcaagttgttggaggagaaggggtgaaatttgtgttcaacaaaattgatgtgcaaaatcctgacaagaagtattctttttgcataaaacttgctggagaaagatacatcttagtctggtgtgttccatctgtggacgatgctgaagaattggtgaaggatcttaactgcagcaatgatctgtacaaatttgtgagggccatgagagagatgttccaggctgctacaatcagtggaaatctgttgccaagctccttttgccccgacgtttcatccataacatcttcatcgttctcagcgttatcactggattccagaagtgaaaaatagcattaatcagagtcataccatgacattgacttagcaatgggctgcggatatctgtacagtacaagttgaagcacttctgaagccctcttctgttacacacgctagcagtgttgtataatgcttgtctgctgcttgcattttgactccaaactcgcagttttgctgtttgtaactttgtactattacctatcattcttaataatcatggtaatgtttgagccttttaggtgctcgatccc

SEQ ID NO: 111815 - DNA, 1554 bp, Zea Mays
attttggcccatttaggcgccatgcccagcccaatccaagaaacaacggaacgaggttggatgatgacgtggttttctcctttttccccaccaaaagaaatttgaaatccagtcagtccaggtttccccagcccctccgcttctccaatgtctaccgccgtccacgctgcagccatggcggaggacgccgccgccgatctgcgccggaggatgaaggacaagcgagccgccatcgagcgccggatcaccgactcccgggaccgcgccgccgccgcctcctccgccttcagcgccgccctcctcgaggcgcgctccatcgccaaccagaccgtctccaaccgagcaaaactcagcgaacaaaaacaacacctcaggaaattagaatcagatctagcacaggccctctccgtccaagcaagcagaaggtcaaaacacaagttcatgactgagtcgatttcaaacaccactgcaacaaatgaacatcttagacacttggctatggaccgtaggtctacaagagatgaatgcatgaatgccatatcaaatcaactaaaagatattgaatcccttgaagctgaaagtgacgcacatggagataagagcctagagacggctcttatgtggtatgataagtttcttggttttcaagttgttggaggagaaggggtgaaatttgtgttcaacaaaattgatgtgcaaaatcctgacaagaagtattctttttgcataaaacttgctggagaaagatacatcttagtctggtgtgttccatctgtggacgatgctgaagaattggtgaaggatcttaactgcagcaatgatctgtacaaatttgtgagggccatgagagagatgttccaggctgctacaatcagtggtattttatgctacatattctcgttacgtgttttgtcttcaatcatgacataggttccaagctcaggactattgggcatggtttgcggtagttttttttaagtcttttgaacttagttagttatttggtggtttgtaaatgtagcaaccaactcgtcgttattatttatttggagttatggtttgcgttttttttttgtgtgtgtgtgtgtgcaggaaatctgttgccaagctccttttgccccgacgtttcatccataacatcttcatcgttctcagcgttatcactggattccagaagtgaaaaatagcattaatcagagtcataccatgacattgacttagcaatgggctgcggatatctgtacagtacaagttgaagcacttctgaagccctcttctgttacacacgctagcagtgttgtataatgcttgtctgctgcttgcattttgactccaaactcgcagttttgctgtttgtaactttgtactattacctatcattcttaataatcatggtaatgtttgagccttttaggtgctcgatcccactgattttgatcaacgcattattttgtttttgtttctttattagccacccatcaaaattctcactgcgctttgcttaccaagaacattaattttcatggtttgacgtcttgtgaacagaaattagca

SEQ ID NO: 111816 - DNA, 1014 bp, Zea Mays
atggaggaagaggagggatcgtcgacatcatcagtcgctgtgcctgtgccgccgccgcctaataagtacgactcctggacgacagatccggaggagctgatgatgatgatggtcgacgaggcggcggtgcagcaggaagggccccgtcgccggcgggactccatgctcaacaagctcatctccacggtctactccggacccaccatcagcgacatagagagcgcgctctctttcaccggcggcggcgacgtggatgctcgcaactacaacaactcctccgccggcccaggggctttatcgtccccggagaaggtgctgatgagcaagatggagaacaagtacacgctcaagatcaagacctgtgggaacggcagcagccttgcggaggatggatacaaatggaggaaatacggccagaaatccatcaagaacagccccaacccaaggagctactaccggtgcacgaaccctcggtgcaacgccaagaagcaggtggagcggtcgacggacgagccggacacgctcgtcgtcacctacgagggcctccacctgcactacacctactcgcacttcctccaccaccagcaaccgccgccgcagcccaaaaagcccaagctcggcgccggcccaccacaacagcccatcgtcgtcatggacgacgaccttctccacggcccggcccaacaagacatcatcaccaccggcccactgggagctgctgtcatggctccagcaccagcaccaccaccagcagcagcatctttctgctacgaccttgacgacgatgtacctgcttttttcgacgaccacgaccaccaccaccaccagcagcagcacatcaccaacggcgggctgctggaagacatggtgccgctgctggtccggcggccctgcaccaccaccaccaccacctccgccggtagcacgtcgccggacctttccgcgtcgtcctctgtctcatggaaccccacctcgccttacatcgacatggccattctctccaacattttctag

SEQ ID NO: 111817 - DNA, 710 bp, Zea Mays
ctgtgttccaagttcatcattcactcgtcactaatagctttctatctgatcgattcatcatcatccgggcatgcatgagcatcatcgtctccagatcgttgggctctcgcagctacctacattcaacattcaagctcgctctacatatgcatgcaaatctgcaacactcgctcttggcagggatacattcacgccgagagagagagagagagagagagagagagagagagagagagagatgtgtgtgctgtagtcatcagccagccggtgatttctggagtggcatcatcaagattcacacactgcatgccaacataatgcgcgtgttcatgcatccatcgccgccgctgcatcatgcatcatatataatatatatatatgtgtatgtgtgggaatcttgatgatgctgcattggatatcaagggctatatatatatatggatcaagcatatatatatatatatcagatcaccagtcatatcgagttcttccttccaggcttgctaggtaatttataacttaaaccttgttgctgaactaactaattttacttagctagctagctactactatacttcattgttagtagtagctagcaagaaggaaagtaggcatcccggccggttcgtaccttctttttttttgcacagcaggatctgaccttctgtataaaatgcatttttgccttgagtttttttgtttttccacag

SEQ ID NO: 111818 - DNA, 281 bp, Zea Mays
tggacctccgccagagctcgaatgtggccatcccctgcatgcaacgcacacgccgggcctcaacagcgtcaggaacacaccgcggagaacctgggtcctggcggattgggcgaggaggaacggcgcaagagcaggccttgacggacggaggcggagcacagagcgatcgcgacgggggagggaaaggaggagagggactgcgggagaggcggaggaggagggaattcgaaatctggcttcttatatacggacggagacggagacggaggtgggagaagagg

SEQ ID NO: 111819 - DNA, 2609 bp, Zea Mays
cgtagcctagcatagcgtccactagctagctagctagctagcatcagtcatggaggatggcgccgagaaggcgacgacaccggattcttcttcttcgcaagcggcaccgccagcgctgagcgcggtgtacgtgaacaggcgcctcgtggcgggcaaccgcgccatggccgccgtccacgtcgcgctggtcgccacggtcatcggccagcgcgccctggcgctgctctctgctggaaccagcagcgcgtcgcccgcgtcccggtccctgcaggtgcagcacgtggccatggcgctggccgacctgacgctgctgttcgtgtgggcgctgtcgcagtcggggctgtggcgtcccgtgacgcgcgccgcgttcccgggccggctgctggcggcggtgccccgcggcgcgctcccgcgcgtggacgtgctggtggtgacggccgacccggacaaggagccgcctctcggggtggtgaacacggtggtgtcggcgatggcgctggactaccccggcggcaagctgagcgtgtacctgtcggacgacgccgggtcgccgctcacgctgctcgccgcccgtaaggcctacgccttcgctgccagggcctgggtgcccttctgcaggaggcactccgtgcagtgcccctggccggacaggtacttcgccggcgacgacgacgacgctgacggcgatcggcggcgggaggagctcgcggaggagagggcaagagtcaggaaactatacgagaagttgaaagcggatatagaggcggctaagaatgacgagactatttctgggagctggtcaaaagacaaacgtcagaatcacgatgcttacgtggagatcatcgaagacggcgacggcgttgaggagattccggcgctggtgtacgtagcccgcgagaagcggagagcgtggcctcaccacttcaaggccggcgctctcaacgccctgctgcgagtgtcgggcgtggtgagcaacgcgccctacgtgctggtcctcgactgtgacatggcctgcaacagccgcgcctccgccctggacgccatgtgcttcctcctcgaccgcaggccgccgccggacagcctcgccttcgtgcagttcccgcagctgttccacaacctcagccacaaggacatctacgccaacgagctcagatacatcttcgggacccgatggttcggcctggacggcgtccggggccctcccctctccggctccggcttctacgtcaggagagacgcgctttacggggccacaccgaccgcggacttcatgcccgatgccaccgccgtcgccgagctcaagacaaggttcggccactccgaccgtctcgtggcatccttacgcagccccggcgttccaccagaagcagaagcgatgatgtcccttgcggcgctggcctcctgcgcatacgaggccggcaccgcctggggcgccggcgtcggcttcatgtaccagtcggtggtggaggactacttcacggggttccagcgcttcttcgcccgggggtggacctccgcctactgctacccggagccgcgcccggcgttcctcggcagcgtgcccaccaacctcaacgacgtgctggtccagaacaagcgctggatgtccggcatgctcgccgtcggcgtctccaggcgccactccccgctcgcctgccgcccgctcctccgggcctccctgctccaggccatggcctacgcctacttcggcttcgccgcgctctgcgccgtccccgtgctctgctacgccaccctgccgcagctctgcctcctccggggcgtcccgctattcccctgccccgccgccaccgcggcggcgttcgcgtcctcgcttctgcagcacatggcggaggtgtgcgtgtccaggcggggtaggctggacctgcgcacgtggtggaacgagcagaggttctgggtgctcaacgccctcacagcccagctcttcggctgcgtcagcgccgcccaggagctgctcggcgcacgcgccttggacttcgacctcaccagcaaggccgccgtcgacgggagcctgtaccaggacggcgtgttcgacttcacgggctgctccgcgctgctgctccctgccaccacgctctccgtgctcaacgccgctgcgatcgtcgccggcacctggaagatgtcgtcgtcgtcgtcgtcatcgagcggcggcttccacttcgccccgcagctgttcctcatgtgctacggcgcggcgctcagctacccgctactggaggggatgttcctcaggcgggatcctgcgagggttccgccacgcatcaccgcactctcggtcgcattggcagccgtgctgcttgccgccatgcttggatgaacatcaaccgagagatgcacggcctgcttcaactcttgtctactgttctagatatactgtacttttaattactattcccactgtattcccaccgttgaagcacaacaacgcagtgaactaaacgacgaacgagaagaagcccaaggttaattagaactaatttatgatatacgttcggactaattattctacacatcaaagatatttatgtaatgcggtataatatatataatttgtttactattgcatacgcataaatttagaaagataagaa

SEQ ID NO: 111820 - DNA, 839 bp, Zea Mays
attgcatgcatggtaacgaaaatagaaaaaaaacacgagggtggggtagtggcctgacgtggacaggtaactggattagggctggttttgtgtggcctgctgatttatttatttatttttcagaaactatacgagaagttgaaagcggatatagaggcggctaagaatgacgagactatttctgggagctggtcaaaagacaaacgtcagaatcacgatgcttacgtggaggtaaaacttgttactcactcccttctaatgaccgaggaaaattaagagtgagattggttgaagactcaattagaccgaaaagactttattctagtttttaagaatagagttattttattatgtgttttgtaagtaaatcaaatatctagaaaatagaaataaagtttctcagcttctttcttattaaataccgacgcaccataagagcatccgatccgtggcagatcatcgaagacggcgacggcgttgaggagattccggcgctggtgtacgtagcccgcgagaagcggagagcgtggcctcaccacttcaaggccggcgctctcaacgccctggtacattataggcacagattttgtagtaatctggtctggactggaacaacaacaacaacaataataataatggatcatgcatgcatgcagctgcgagtgtcgggcgtggtgagcaacgcgccctacgtgctggtcctcgactgtgacatggcctgcaacagccgcgcctccgccctggacgccatgtgcttcctcctcgaccgcaggccgccgccggacagcctcgccttcgtgcagttcccgcagctgttccacaacctcagccacaaggac

SEQ ID NO: 111821 - DNA, 267 bp, Zea Mays
atggaggtgcggtctcagggtgcggtggagagagtgatgcagcatgtgaggtccttcatcgcaatcctaaagcagcaaggtgcagatgcaaggcagtggtgtaccgagtttggggcttgtgctgcttccagagcaaacgaggtatcagcacaagtgaagggaagcgtatctgcgtttggtgcaacccttggagacaagtcgaagagggcaatggaagagtgtaaggacggcctggagaggatttcacacagattcaagacagactag

SEQ ID NO: 111822 - DNA, 90 bp, Zea Mays
gtgtcatcgcctcccctagccattatgcttggccgacgactcggttcgtgccactgcatcgatgtctgcataggcttgcgatgtctcgtc

SEQ ID NO: 111823 - DNA, 778 bp, Zea Mays
agaaaagaaaagagaagagaagagaaaaagacgctgccttgctaacgaggtgagagagtgttggggccgccgctcttgggtgatagaggaagaggatacagcaagcgggggttgcgaggaggcagcggacgctatgggcaacgccgggagtgcgccggaccagcccaagaactcggcggatggggccggcgctgccgacgcggagtctcgccgcgggccgccgtctacggtgcgtttcttccccgatgcggagcgccacaaggcacggcagccgccgccaataaagctcgaggaggaggagggcgtcccgccgccgcccgccaccgaggaggagatggccccgcgcaacctctggcaggtgtatgcgcttggggcgttcattgtgttgagatgggcgtgggctaagaggaaggagaaccaggacagaaaggactcacctgatgctggggatgggaatgcaccggacagatcgacttaatctccggttgctgctgcgtggactaggctacccgcgaagatgaatgccgtttcgtgataagccaacgatgatggatcattctagctaatgcatcatataatggtcatcgatgttgctgtggatttatgtattttcctgacaatttgcaagttacattctccccctttttcactctagtgggatcctttttatctgaggtgtggcacctgcctgttcactctactgataaacaatgtctgtcaatgaacatgcgtggaagagaaccatcaggtggctaatttttggcaggcatctggttaa

SEQ ID NO: 111824 - DNA, 2175 bp, Zea Mays
atggccggctctggagagtcgccgacgatggtaggagatggcgtttgtcttgatccagagacagagggagtagttgatggtaactcactggtcacaccacctcctgctctactgggtcctgtgatcgacgagatgagcataggggaagaaggagaacaaagggttcgacctcctatgtccaatattagctccagggagatggatacgcctcaaatactgcattcacatattgttatgaacatattccatggtacaaacaacaatgtcaatgaatttgcaggaaaaaacattgatctaactatagtgccaatggtagggatgactttcaaggatgttgatgatgcatataaattctataaaaggtatgcatatgaagttgaatttccactgaagaaatacagagagaaaacattcagtaagtggataaattgttcacgtgaagctgcaaaaattgaactggtaaacttggagcataaccatgagttcataactgacgaagcagagaaacaacatttacgttgcaacaaaagtagggatgctgagttcataaattttgttgatgcaatgcatgatagccgagtgccgcagcattgcatagttgattttatatcagaaatgcatgatgggccgaagaacgtaccggtaactgctcaagatctgaaaaacataatgcaagaaacagaatccacaattttttgtgatttccagctagacaatgatgtgaaaatatgtacagtgtttggatttgttttgttgggagatgaaacagtacatacttttgaatgggctttcaattcattcaaaacatgtatgggatacgagggtccgagagttatgcttacagatcaagaccctgcaataccaattgctctaagaactgtatttccaaaaacagttcacagactgtgtttatggcatgtccagaacagatttatgtcattcctaaatgagatatatgcaaggtttgctgttaaggattttaaaacaacattccagtctattatacatcatccattaactcctcatgagtttgaatgtgcctgggaaatgatgctagaggagttcaatcttcatgaagatatgactctacgcaaattatatgaaataagaaaagaatggatacctgcattttttaaaaacgacttctgtggggtaatggtatctacacaacgaagtgagagcatgaacagattagtgaagcaatcacatgtagatgcgaacaccccactacatgagttcgctaaacaaatgatgaaaatgttgcacagcaggaaaatgaaagaatcaaaggaggcattggtgagcaagggaccaaggacaacaaatacattgtataggttcgaagtgagagtctctagagcatacaccagagctgttatgaatagatttgaggaatcaatgaaatacgccactgcatacaaaatattaaaggacgcagacggttgtgataaagattggatcgtacagcatacaaaaaggtctaataaaattgtgtggggacaacatctattcaagataacagcggacatagaagttggggagtatacatgcgagtgcaaacagtgggaacatacaggtctattgtgtgttcatcttttaagagccttcatgcatcttcaagttgaaaagataccttcaaagtatatattgcaaaggtacactgtctcatcaagaaaagatgtaccatttgaaagaattgataagagcttcaggggaaaggatggagttactaaatcatacagacagaaaatgttgttaacgaaaacaatgaaagtagttcaccaggcgtgtatgtcaaaagcagggtacgataaggcgatggatgtgttggatgagctcgatggcgttctatgccgattagagccaaatattggatgtaatgagtcaacagatgttagtgatgatgaggaagacaaggaaggagaattgaataaaaataatgctggcgatgggatggaagatgacaatacaattacatgccataaaatggatgagcataacaccatgactggatgtgaacatgcgttaacattaataacaactggtaaccaggaggacaacatgagaattccacctgaggttggtgatacaagttctccgtgtcacgtagcacatgaacaaatggaacatattgctgcatcctcagaagctaaaaaggtgagcattgataaatga

SEQ ID NO: 111825 - DNA, 2141 bp, Zea Mays
gatacgggactaatcgtccttgactgggaatgtggcatgctatgcctgtgtccactccctcccaccacctccaccatggcccgaagcagcttatgggccgctcattcccgccgtttattcttagggctcttcctcaactctcgcactgccgccgccgctgctacgcctacgcaaccgtcaccgtcatccccatggcttccacggcgaccacgcgccgccggccgcggcggggttccaagggccccaacgccgacctctcgcgcaccctaaccgactgcacccgccgcggggacgcggccgccgccatggccgctttcgacgccgccgtcgacgctgacgccgacgccgttccccgcctctccgctcaccagtacaaccaactcctccacctcctcgccgccaccgaccgctcctccttccccagcccccccgccgccgccgcgcgccgtgtcttcgcccacatgctccaggccgcggcgccgccctccgaggccaccataacctccctcgcgcgcgtcatcgccgccgacccggcgtcggccgccgatgaggcgttcgagctcgtggccacaatgaaggacaagtacggcctctccccgcgcctccgctcctacggccccgtcctcgcggcgttccggcgtgccggggaggccgctaaggcctacgctgtcgaggcgcacatgacggcctccggcgtctcgcctgaggagcccgagcttgccgcgctgctggatgtcagctccagagccggggatgcggacaaggtgtatgagtatatgcataagctgaggcaagccgtccactgtgtcagcgaggagactgccggagttgtggaggcctggttcaggagcgacgaggcggcaactgccggcaagcctcaatgggatgccgctcaggtgaaggacgccattgtggcgaacggtggtggctgcccaccgccttgggtggcttggaacccggcccttgaccgtgcagcgggtaagagtggggatgctgatcagtgtgggggatgtagattccatcttgcttgcattgacattgacatggagagacacagaggtttgctgattccgttgctgggtttggccctcgagagggagacaaaaacaaatttcagccgatttcaggagtggttggaagcaaataaagactaccaagctatagtcgatggtgcgaatattgcactatatcaacaaaattttgcggagggcggtttcagtttgacccagctggatggcgttataacagagcttcgggatagatatcatggaaaatggccacttgtcatactacacaataagcgaatttccaagcttatggaaaattcgtctaataggcatttgattgagacctggagaacaaatggggctttgtatacttcaccaagtgggtcaaatgatgactggtattggctatatgcagcgatcaaactaaattgtttgcttgtgactaatgatgaaatgagagatcacatattcgagcttctagggccgtctttttttccaaagtggaagcaacgccatcgggtaaagtacacctttaataaaggaaaagcggtgcttgtgatgccacccccttactcttcagaacttcaagagtcggagatgggatcttggcacattccaattgaagagaagtctgggaatgagagaggcaggatttggctttgtattggcaggggaggttcctgcaaagaacatggcgaagttccttcgactaatggagctgtccacaaagttcctcaaactgaggcatctaacgtggtgcagcaggggctgacagaaaataaggatgaatcgataactggtaaaagaaaggatagagattgatcaccttcacctatccaggagcaccatctgctcttgagtctgccatcttgtgagcgattgtggccacttgttgttgattcagctgaggcatttcaagaatagggatgcagcgataatgccatcccagatatgtagggtgtgataattattaatcactttcgctgggttgcagactttcattcttcacaaattgggtgtgatcttagacgatttctgtgctatgtatctgactgcatccatgatcatctagtgttaactccagaataccagctaatgaacttttttattaccatcaaactgaggcacatttgc

SEQ ID NO: 111826 - DNA, 1263 bp, Zea Mays
tcagtatctctgaacttgctgtttatgctcaattctcaaagacaacggaaagaccttgtggttgcggccaccttttcttgtaaactgggaggtgtttcttgtttatgttgtaattctgcagagatcgcagacatctattatcacatagtttgttgattattcacttttcttcattgttatgtttcctcctggatgtttctaattatatgagatgcaaacatccaggtattggctatatgcagcgatcaaactaaattgtttgcttgtgactaatgatgaaatgagagatcacatattcgagcttctagggccgtctttttttccaaagtggaagcaacgccatcgggtgagctctgcaaaaccgatcatatagtgctatttctctgtgcatggttaattggttattacaaaggaaccctggttctagaagcttagaatactggtacatagtttggactaaagagaatgtaacgaattctctttgttaacctgctccacgcattagattttgtcttttactgttaattgttatttgctaactgtctaaagtagttgcaactgcgcaggtaaagtacacctttaataaaggaaaagcggtgcttgtgatgccacccccttactcttcagaacttcaagtaagtgttctattttcagcattttctagagcttagtatctgatgttggtcatctcatcttgattgcaggagtcggagatgggatcttggcacattccaattgaagagaagtctgggaatgagagaggcaggatttggctttgtattggcaggggaggttcctgcaaagaacatggcgaagttccttcgactaatggagctgtccacaaagttcctcaaactgaggcatctaacgtggtgcagcaggggctgacagaaaataaggatgaatcgataactggtaaaagaaaggatagagattgatcaccttcacctatccaggagcaccatctgctcttgagtctgccatcttgtgagcgattgtggccacttgttgttgattcagctgaggcatttcaagaatagggatgcagcgataatgccatcccagatatgtagggtgtgataattattaatcactttcgctgggttgcagactttcattcttcacaaattgggtgtgatcttagacgatttctgtgctatgtatctgactgcatccatgatcatctagtgttaactccagaataccagctaatgaacttttttattaccatcaaactgaggcacatttgcaagtgcattgttg

SEQ ID NO: 111827 - DNA, 1305 bp, Zea Mays
aggacaatgcagggcggcggcggtgacgaggaggatgccctcgccgggcggcggcctccgcgcggtggtggcgacgacgagaaaatggagatcgggtggccgacggacgtccggcacgtggcgcacgtgacgttcgaccggttccacggcttccgcggcgtgcccgaggagctactgcagcagcaggcggcggcggcggtggtggtggacgtcgtggacggcatcgtccgggcgcccagcgccagcaagacggtgttcggcgtgtccacggagtcgatgcagtgctcctacgacgggcggggcaacagcgtccccaccgtgctcctccacctgcagcgccgcctcgtcgaccagggcggcctcagggcggagggcatcttcagggtggccgccgacggcgcccaggagcagtacgccagggaccagctcaacaactcgggcgtcgtgccagacggcgtggacgtgcactgcatcgcaggcctcatcaaggcgtggttccgtgagctccctggcgggctgctggacgcgctgccggcggatgaggtgacgcggtgccagacggaggaggactgcgcgcggctctgcggcgccaggctgccggcgcccagggcggcgctgctggactgggcggtgaacctgatggcggacgtggcgcgggaggagaaggctaacaagatgggcacgcgcaacgtggccatggtgttcgcgcccaacatgacgcgcgccgacgacccgctcacggcgctcgcgcacgccgtgcagctcatgaacttcctcaacatgctcgtcgagagggcgctcaagcacgagcaccaccggctggcctcgtcttcttcctcctcctctgcacgagcaccgactcggccacattcagagtcagagatgcgcagtagccatgacgatgccgaccgatcgccggatctgattaagtagcaatgcaaggtcgttgtactgaaatttagtgtaggagtagagagtgttttgatttaatcttcgtgtgtttgttgattgattgattgattaattccagcaaattaaaccagcagtgtgtgtttaattcatgtgcccatgctctgttcctctcctctagctatcaaatggccttgtgttcctcctcatcccttgttaacctgtgccctcctcatgctccacgcttctagccggggcactctgacggtgctagtgccattgttgaacgcgtacatgcgagtgccgccgtcgtcgacgagcgccgccggatagaccctggccatgatgcacaccctgccgcctccaccgaagctctccaccgcagagcgatcgatc

SEQ ID NO: 111828 - DNA, 1080 bp, Zea Mays
cagagccgtcaaggctcatcttgaggacgtgcttggcgccatccgggaccgcagccgacatgtccagcccggagttctcgcccggcatcgccgcgaagaagtccgggcactcccacatggcggaggcgttggaggagtagagcgggtggtccactctgtcccagcgcacgaagtcctcgctctcgtacagaagcgccgcgctgtggccgtcgacctcggccccgacggctatcctccacagcccgtccgggccgatccagccggtcgtcgggtctctgaactggcctgggttcagccctcgtccgaccggctggatcaccgggttgtcgtgtggcttcacccactcccgcaggtacggatcggacaggttcttggggaacgccacgttctggacctgacgcttctcggtgtcggcgccggtgtatatgatggcaggccggccgctctttaggatggtggctgaacctgtccagcagccattgatgtcgctcggagtcgtccgctctatcgccggcgcgagccggatccagttcacgagatctgtggagaccgagtgcgcccagactatgttgccccagagcgagccgtttgggttgtactggtagaactggtggtagataccattgtagtacattggtcctgaaaatcaagaggagcttcttctactgcagtttggtatgtatggaagcaagcggttggtgtttaatttgagatgcataacataccatttggatcttttttttttgagtcgttgtttgaaacggtccccgattcatttggatttttcaaggacgggaaaagaataaaagatgatatcagaaacttgatagggcaaagaccctgagtccaaaacatgcttttcagatggtatcaggaacttgaaatgaaaatataatcagcatatataagaccaaacgggggcaaagtgcatttccagacaaattttcagttggcctgaatgcattgcctaactgaaaactttaacacaatacttcagactatgccaatgtagtgcgaaaagggaatagcatcgatccctttaggtaaaacattgctatgacttcactaaaatgtaaaagc

SEQ ID NO: 111829 - DNA, 1754 bp, Zea Mays
atcagaaggaagaccaatcaaagggaggcaaacgccatagcggccaatcacttggcggcggcggcggcggcgatggggcggctgaccgaggagcaggcggcgcgcgaggcgggctcggcggggaccaacgctatgtccctcaagctcacacaccgcgctctctccgacgtgtcgtgcctgagcagcttcaagaacctggagcacctcgacctcggcttcaactgcctcgtcaccctcgagggtttgtcctcctgtgccaatttgaagtggctttcggttaaggaaaacaagcttgtgagcttaaaaggtgttgaggggctctcaaagctgcaggtactgaatgctggcaagaacgaacttacaaaaatggacgaggtcacatctttaacaagcctgggagcattgattcttaatgataacaatatttcttccatctgcaagcttgatcagttgcaacagttgaatacacttgttctctctaagaaccctgtctttaccattggcaatgctttggtcaaggctaagtctatgaaaaagctatccttgtctcactgccaaatagaaaatattggatcttctcttgttaagtgtgtggaactgaaggaacttaggctttctcacaacaagatcagtacaatcccttcagatttggccaaaaatgtgaagatcttgagccttgatttggggaataactttattgagaggagttcagatttgaaggtactttctgaattgcgctacttgaggaaccttaatttgcagggaaatcctgtttccaagaaagacagtcttgtcaaaaaggttaagaaatctgtgccaaccttgcgcatactgaacgcaaagcccctagaggccacctccaagagtgataagaggtctacaaaagagaatcctccgagcaaagatgaagacctcattgggattgatgcgaagaagaaggataaaaggaagggatctaaacaagaggtaaagggccttgaagagcttgaagtccagagtgtttctacaggtatcaccacttcgaaccctggtaaacttgaagtgccagacagtaaggaaaagaaaaaggtcaaggaagctaagacgaagaaatctgaagagccgtaccatgccaataacagtagcttaaagaacaaagaagttcaatcttttgtctatgataccagcacgaaggacaagaaggaagccaagaggaagaaatttgttgacgaagaagatgtagatgctgaaggaattgacaatacagaaatctcgtttgcagatttaatgttttccaatgtgggcaatccagagactaagctaaagaacatctcaaccctggaagcagctcctgatggaaaatctgttggaggtctggtaattgatcacacaaagaagagaaagaaaccaaaaggtgttgtcaccatcactgactcctcagctcttaagatgttttcctcaatgccagaggtaggagcaggagggcttggcctgtcaggatgggatgagtagcgtctagctctctagtaccataagtttgctgcctgatgaatatcgttttttggtgaaaacctcaattttatgtgaactgagcagcattttcttctcttcccatcaagtgcatttatgatgtgtgatttgaggaaccaagcccctctagatgagtggtgcatcttcggttcaaccaataatttagtggaataactacttttctcacgcttgcatgaattataaactactccgtccattctaaattataaaatattttacttttc

SEQ ID NO: 111830 - DNA, 575 bp, Zea Mays
aagggatattggggaagtaatattctatttcttaattgccaaatattcgaatacaagagataaataggcattatgccttctaacaaacatagatggaaaatctcctcaaattgagacagtggtttctagctgcggtgactcggtctccatcgatgatttgttgcaactcaatgttcagcaccttgagacagtggtttctggttgcggtgactcagtctccatcgatgatttgttgcaactcaatgttcagcaccagattaaattgactttcgctaacatcgttcctataaatcagacacaaatcagcttggtgctataacaaaacagagaaaatagaagtgaccaaatcaaaagaagagagagtataaccattcagtttagaatcacatgaaattatctcatacaagggaatccaatcaaggttttgctctttctcacacaacattgaattatctcaaactcatagcagggtactttattcacctcataaccattagcgtaattttttggttctcgcaacaaatcttgacttcattatctattaataacagagagatgtacatagccaccatgtc

SEQ ID NO: 111831 - DNA, 302 bp, Zea Mays
tcacaaatcaccaattttatacacataatcacatagatatacaaatttaattagtatgcacaatgatagatccacatcacataaaccatcaacaagcaccacaacaaaatcattcacaaaacctacacatgttattatgttttgcacatatttgcaaacactttacaaaatcattcacataagtactaacgcttcaagtgattcgcaaaagccttcacaaaagcactcgaacttcttgtatcctcttgttttaaggcacaagcttgtaggggttgtgatgtcgccacttacttgatgctaac

SEQ ID NO: 111832 - DNA, 2976 bp, Zea Mays
ctcctcctcctccaacagcagctatggtggagtctagttagctacctcggctgccgacgcgtaccggcaccggcgccgccatggctctacccatccgcctgctttcgtggctcgcgctcgccacgcttctctccgtgccaggtgctgccgcgcaaccggtcaccaacatcaccgcggggaactccctgcaggcggccgccggcgccgcctggccgtccccgtcgggccgcttcgcgttcggcttctacgtcacggacgggggcctcgccgtgggcgtctggctcgccaccacccccaatgtcaccgtcacctggacggccaaccgcaacgtcacgccatccacgggcggcgcgctctgggttacctacgacggccgcctggtctggacgggccccgccgatggtcaggacaggcccctcgcggtgccgccgcggcctgccaccgccgccgccatgcgcgacgacggcagcttcgtgctctacggcgccgacggcgccatggtctggtccaccttcgccgccgcgcccaccgacaccctgctcccgggccaagacctcgttcccggcgcgcagctcttctccagcgtctcgcccaccaacagcgccacggggaggtaccgcctcacgaaccagatcaacgacggcaacctcgtcctgtatccggtccagacggagaacaccgcgaacgccgcgtactgggccaccggcacgttccagatcggcttcccgctcaccctgcgcatcgacaccaccggagtgctctacgtcaccggaaacggcggcaactacaccaagaacctgacgcttccctgggccgcgccgtcgcccggtgaggcggacgttttctaccgcgtcacgctcgaccctgacggcgtccttcgcctgtaccgccacgccgtcacgcgcggcggcgcgtggacgacaggcgtccagtgggtagggccgaacgaccggtgccacgtcaagggcgcgtgcggcctcaacagctactgcgtcctcagccgcgacgcgcagcccgactgccggtgcccgccggggttcggcttcatcgacgccgccgacgccacgctcgggtgcaccgagacctcgagcgccggcggctgcgcggcggctggttctagtgcggcgccggccatggccgcgatgcagaacatgtcgtgggcggacacgccgtacgccgtgctgggcgcgggcacgagcgccgccgactgccaggccgcgtgcgtggccgactgcctctgcgccgccgtgctgctcgacagcagcgacggcacctgcaccaagcagcagctcccgctccggtacggccacgcgggcggcgggttcactctgttcgtcaagaacgcggtggggggcccagcgctcgacggcggcagggaccgccgcgtcgggcgctcgaccaccgtcgctctggtctgcatcgggatcctgacgttcgtgtctctagccgcgctcgtggcggcggtgcggctggtcctggcgaaccggaggacgactgcggagccggacgcggcggaggcgctggacgaggaggcgcccctgaggtcgtacagctaccaggagctggatcacgcgacgtggagcttccgcgagccgctgggccgcggcgcgttcggcacggtgttccgaggcacgctgctttacagcggcggcgagaaggcgatcgcggtgaagcggctggagaaaatggtggaggagggggagttggagttccagcgggaggtgcgcgccatcgggcggacgagccaccggaacctggtccggctgctggggttctgtcacgagggcgccaaccggctgctggtgtacgagtacatgagcaacgggtcgctggcggagcgtctgttcaagaacagcggcggcgggggcccgccggggtgggacgagcggatgggcatcgcgctggacgtcgcacgcgggctgcgctacctccatgacgagctggacagccgggtgatccactgcgacgtgaagccgcagaacatcctgatggacgcgtcggggacggccaagatcgccgacttcgggctggccaagctgctgcagccggagcagacgcggacgttcacgggggtgcgcggcacgcgcgggtacctggcccccgagtggtaccgcggcgccgggcccgtgacggtgaaggcggacgtgtacagctacggcgtggtgctgctggaaatcgtgacgtgccggcggagcatggagctggaggaggcaggcgaggagcggacgctcatggagtgcgcgcacgagtggttggtgcgcggcgaggtgtggcgggtggttggcggcgacgatgccgtggacgtcacggaggtggagcgggcggttaaggtggcagtgtggtgcgcgcaggcggagccccaggcgaggcccgacatgaggagcgtcatcctgatgctcgaagggctcgtggaggtgccgttccccccgccgccgccggcatccttgtgatccccagatacgggtgggggattggaggtgcggcatcatcattacacttgtaaatgaaacaaggtcgacacagcagtttaaaaggaagactaaatcatataggtcattacacttacaaattgcaggaattacaaaacgatgagtcgatcctcgatcgatgtatgagaagaaatcaacgcgacaaacagatagtagtagtatagtagaagaatagaaaggaaaaaaattcgacggggtcgagaaattagaggaggaaaattgatcgaatcatatgtgggttgctgacggagcagcgattatatcgagctgaagcgatgaatgcgctgggcgatcaagccggcgcggcgccggcggcaccggcgccctgatccgtggagccgcacgcctggttgcacatcttggtgcaggcggggtctttcttgccgttggcgcagcgctcgtagcagtcgtcgtagcagccgtacgcggtggccacgggcgccgccgccgccaccaccagcagggccaccagggccagcgccacaat

SEQ ID NO: 111833 - DNA, 968 bp, Zea Mays
gatagtcctgctccttctgcctccagcagtcctgctgcgttctgtactgcacatttttaaaggaaaccaggacaggtatctaacgcccgtcattgttgtgctcagacctggtacgttttgcagctactcgagtcattattgcttcacttcaacaagagcgcgaggaagcagagaagaggggatgatggagaagcgacacggcggcgacggcggagccggagctggaggcttcactgtgctccacctcctcggcgccggtgtcttggcgttcctgctgccgcgggccgccggagcgaccgacgatgccaagtggcacgcccatgcccattccgccgctggcagcaacggcgccgtcaccgtcggccacggtgcccccgcgccccacgtgcacgcggccggtctcccgccgctctcggcaccggcgcccacagcgggagctgacgacctgccgccaccgcccgcgcccgtgccgacgtccgtgtcctcaccgccgagccgcgagcccggcccgcacttcggcttcccgctgcagccgggcccgggcaccgcgtccgctgcggcacctgggctgggacccggcggcgaggggtatccgttcatcggaagcaacccaacggtgccgttgcccaccggcacgaccaacaccgccaccgtgctgccgctgacggacaccggggacgccgccgccgccgccaccaaggtgctctctgctttctttcccttttgctcgtcaggtcactgtgctgtgcaagtgcaatcaaccgttggtgtttgttcatgcttcgctgcaggtggtggggttggcagcgtcccttggtgctcgcgtctccatgattgggcttgggatttccctcgccaccctgtccctgtccaagatctaattaatccaaaatgtgtactactgagatactgatgctgctgccgccgctttcatctaaaatgtgtactagccttgagtttttgtcatg

SEQ ID NO: 111834 - DNA, 912 bp, Zea Mays
gatagtcctgctccttctgcctccagcagtcctgctgcgttctgtactgcacatttttaaaggaaaccaggacaggtatctaacgcccgtcattgttgtgctcagacctggtacgttttgcagctactcgagtcattattgcttcacttcaacaagagcgcgaggaagcagagaagaggggatgatggagaagcgacacggcggcgacggcggagccggagctggaggcttcactgtgctccacctcctcggcgccggtgtcttggcgttcctgctgccgcgggccgccggagcgaccgacgatgccaagtggcacgcccatgcccattccgccgctggcagcaacggcgccgtcaccgtcggccacggtgcccccgcgccccacgtgcacgcggccggtctcccgccgctctcggcaccggcgcccacagcgggagctgacgacctgccgccaccgcccgcgcccgtgccgacgtccgtgtcctcaccgccgagccgcgagcccggcccgcacttcggcttcccgctgcagccgggcccgggcaccgcgtccgctgcggcacctgggctgggacccggcggcgaggggtatccgttcatcggaagcaacccaacggtgccgttgcccaccggcacgaccaacaccgccaccgtgctgccgctgacggacaccggggacgccgccgccgccgccaccaaggtggtggggttggcagcgtcccttggtgctcgcgtctccatgattgggcttgggatttccctcgccaccctgtccctgtccaagatctaattaatccaaaatgtgtactactgagatactgatgctgctgccgccgctttcatctaaaatgtgtactagccttgagtttttgtcatggacagatctagagattttactggcagtttctttca

SEQ ID NO: 111835 - DNA, 241 bp, Zea Mays
atctcagtcgtccattctaccgttctacaatctcagccgtccaatcccgcacaccagttttctgcgcgcagaaaaaaaaatcaaagtgtggcttcctaggatcgaaccttggatctattaagcagaatgtctagccttccaccatctagccaacatgactcatgttgaattgtgtataacttcaactaaaacgtcttttgtgtttaacccaccgtccactctgtatgctcactgagtctag

SEQ ID NO: 111836 - DNA, 1394 bp, Zea Mays
cttactctctttaggctagctctgccagtcttgctctccacactcgctctgctactagctactagcagtagagaagtagaggagagagcatctagctagcgccgtcggacggagctacctcaccgccgaccgcgcgcgaagagatcgatggctcatgctgttacgctcgctgctgcagccgcggtcgtcgtcctcatcgtcgtctgctgctgctcctcttcggaggccgccggccacagcgtcaacgcgaggcagccgccgctggcgcccagcctgtccttggacttctacaagcggagctgccccagggcggagtccgtcgtgcggaggttcgtgcaggacgccgtgcgcagggacgccggcctcgcagccggcctcctccgcctccacttccacgactgcttcgtccagggctgcgacgcgtccgtgctcctggacggctcagccaccggcccgggcgagcagcaggcgccgcccaacctcacgctgcgccccaccgcgttcaaggccatcaacgacatccacgaccgcctccagaaggagtgcggtggcgcagtcgtgtcctgctccgacgtcctcgcgctcgccgccagggactcagtcgtcgtgtccggaggtcccagctacaaggtgccgctgggtcggcgcgacagtgcgagcttcgcgacgcgagaggacgtcctgagcgggctcccgccgccgacggccgccgtgccggcgcttctcgccgtgctgtactgctgtccaagatcaacctggacgcgacggacctggtggcgctgtcgggcggccacaccatcgggctgggccactgcgcgtccttcgagagccgcctgttcccgcgccaggacccgacgctgaacgccaccttcgccggccacctgcgccggacctgcccggccaagggcaccgaccgccggacgccgctggacgtgcgcacgcccgacgcgttcgacaacaagtactacgtcaacctggtgaaccgtgaggggctcttcacctccgaccaggacctcttcagcaaccccggcaccaggcccctcgtcgagaagttcgcgcgcagccagagagacttcttcgaccagttcgccttctccgtggtgaagatggggcagatcaaggtgctcacgggcgcgcaggggcagatccgcaggaactgctccgcccgcaacgcaggcatgacgtggtccgtcgtcgacgaggctgcacagcagagcttcgtgttctagactttgtacgtactagctggctactgtgtgggcggcggtgtcctgtcaacagaacagatagctagcagtagcactggacggcatgcagcgcccccatgcatctagcttggacaaataaaaatggccatgcataaataaatctaccgcaaccaatcttcaaatagt

SEQ ID NO: 111837 - DNA, 952 bp, Zea Mays
ctaatcatgtcgataatgggaatcacagtgcaatctctacatctgttaataaagttatgctcttgaaaaaacggctatgtggtgggaaagacagtgctgcttgcctattgtctaggcaccacctaggatctttttttgaaacagagtgcttatcgcatagacctagataatatattaacagggttctctttccattttcattcggtccattttcattaggaccttctaatttagaagcgtatgtctctgcacaattaaatttgggtgcggtatcttgaggcaatagaagggcttaactggggttaaagcagttgtcagtactattttttgatggcccagttgaatatggaaaaactgatttggagaccaaatcccaactacacaagacttttgaatgtttcactgaacataacttttattttaaccttacagttcggcctatagagttctaagtttcttttgcttcacaaccaggcttatttcgatagcttttttattgctaaatctaaatgatttctacgcgcaggacgcgcgcaatttactagtttggtacaatttgcgaacacggtgagattagacaacaacgctcgagtttccaatctctaccggtgcagaacgacggctcgatgatggtaggaaaggttggcaatcacaacacgaataagagagtaataaagagagcgagagggaagtacgcattaccgactcctggatctcctcccggacgatgtagaacggatcctgcgccgagctcatggcctctccgacgaacggattgccaggcctgggcgcctggattttcctcccctcgaatccctagcaatattttgggggcaggggatttgcttggtgcggagtcgcggactcgcggtgcagacgagagaggagagatccagatcccacttccactggttccttccttgtttcgtctcggtgacactgccaccagggt

SEQ ID NO: 111838 - DNA, 960 bp, Zea Mays
gctgcatcgggaaaaggggagcgagaggcgaagcagataaggaagccagccggcaaggggagccactccggcgtcgagaaacctagggcgagcgcctcgacgactcctatcaccccatggcggccttcgctacgggcagcaccacagcgcgcgcgacgctggcatcgccgacttcgtgccagccggccgcgcgccgggcgccggcccgatggatgccgctgcgctgctcgccgccggccctgggcctcaggggaggagcgcgttctcggcggagcgccacgctacgggtggaagctaagaagcaaactttttcttcatttgatgagttgctggagaagtctgagaagccattgttagttgacttctatgcaacttggtgtggtccatgccaatacatggttcccatacttcaagaagtgagtgagaagttaggcgacaaaattcaagttgtgaaaattgatactgagaagtacactagcattgcaagtcgttacagaattgaagcattgccaacttttatcatattcaaggatgggaaaccttgttatcgctttgagggagcattacctgttgaccagatgatcgaacagattgaaaatgctttggcagtcacaaagtagcacatatggtgatgagcagggcagaatccccccccccccccccaaaaaaaaaaaagaaacttggtggtacctcataacgtgtgcctctacatattgaaaaatcttgattattgtctacaagatcacaacatcaagggcctaacatttgtaaggatttgttggatcttctagattcttatggggagttagatgttctcttccgatgagacatgtagatgttggtctgccattggcgtattaatggttccttgtgtcttttatcgggagcaagagccctcgcattgcctagtgttggtaataaggattattttaatcctccgatatgcatgaacgtctatca

SEQ ID NO: 111839 - DNA, 390 bp, Zea Mays
atgcatgcgaagcaagcttcaaactgcttatttgcttattatctagagcacgaggctaccggcggcgtccgcgacggtctcgatgacgacggacgaccacggcaggtcactgtcaccagcagcggcgccgttgcgcgcggagcagttggcgcggacctgtccctgggagcccgtgagcacgttgacctgccccatcttgacgtaggagtagacgaactggtggaagaaggcgtcctggtcgacggcgaagcgcgtgacgatggggcgcgtggtagcgttggtcagcaggtcctggtccgacgtgaagaggccctcccggttgagcaggtccacgtagtacttgttgtcgaaggcgttgggcgtgcggacgtcgttggccgtcgtgttcac

SEQ ID NO: 111840 - DNA, 1081 bp, Zea Mays
gttttctgtccgcgccaccgctcctcgacccccgcccaacactcccagccgtcacgccgtcgccgccgcgagtccttcattcaccatgatcatctccaagaagaaccgccgcgagatctgcaagtacatcttccatgagggggttctatatgccaagaaggactacaacctggccaagcaccccaagcttgacgtgcccaacctggaggtgattaagctcatgcagagcttcaagtccaaggagtatgtcagggagaccttctcctggcagtactactactggtacctcaccaacgatggcattgagcacctccgcagcttcctcaacctgccgtcagaggttgtgcccaacaccctcaagaagtcctccaagcccccgtcccgtccctttggctctggcccaccgggtgaccgccccaggggtccccctcgctttggggaagacagacctaggtttggggatagggatggttacagaggaggtccacgaggtgcaatgggtgattttggtggtgagaagggtagtgctcctgcggatttccagccatcttttaggggtagcagacctggcttcggccgtggtggcggcagcgcttttggtgccagtggatcttccatggagtgatctatcaacttaagcgggaaaattgattcaggataggcacatgtttgttgatctttgaacttttgaggacaatgagattttggtttaccgagctgttgccgtggcttgacatggttttgtgatcctcctttttttgttacattaaattattaaagcagcaagtcatcattcgcatcgatggtgctattgccccctgttttgatatctgatctcgctgggaatgaccttgctctctgtattgttgtgctcagagttttgatatcgctggacaaggcattgcactccctatcgcttgaaatcgtctctgttggtgctggtgtataaaactttgacgtgtgccgtttataatatatatgtaactgcaaaaccaagtttctatacaagtcaaaacagtatacaatttggatcagaaggtggtgcaatgtataacccttctaaatttaaggatgttttgtg

SEQ ID NO: 111841 - DNA, 2056 bp, Zea Mays
agttaaaccctagtatctccccgcgtcgccgcacacatcgcccgttcgcacgcgccgtccccctggaggatcgagccaccctcctcacctggaatggaggacggcctggaggagccgccgcccgcggggagcgcggccgccaacgccagctccacctccggcggcggcagcggcgggagcaaggggtccccgtgcgaggagtgtggggagcagccgtggaagtaccggtgccccgggtgcggccgcctcacctgcagcctcccctgcgtgcaggcccacaagcgccgtaccgcctgcacgggcaagcgcccacgcacggaccccgtcccgctcgcccgattcgacgacaaccagctcatatccgattacaacttgctggaggaggtgaagcaggcccacgattccgcgcacaggctcatcggcggcttcggccgcaactacgggggacggggatcaggcggcgcccagctgcccagatggctgttctacctcagcaaggcggcgcaccgccgtggtgtcaagctctgctttctccccaggggcatggccaggagagagcagaatcgatcgcaacacaattacaggaaggattgcatattctggacacttgagtggaaattcaattcaactgatgttgtcctaactgatcatgggatagatgagcacacaaccttgctctctctattggaaaaacatcttattcctggcccttggaaagatcagcttacacaatatcggaacaccaaattacatgatctgaaactgttcattcaaaagtgtgccaagcaatcagagtcaccgtaccgcctactcaatatagaagagccattgcgcccacagctgaggggtatacttgttgtggagtacccaactatcaatgtatttcttccgtcagacaattgtgactttgaaatggagaaaatggtgaacagacttcctaaagatggaaaaggccctggcagcatgactgacgagccacctgtagagggcagcaagtttcatgaggaggaaatagaggaaggcgaactttcacctgaaactgagattatagatctcaaggaccatggaacttcaaatgcctgcaaaatttctccagcagatgttacaagtgaatcaaagatagttaacaatgtcgattcttctgtgctctcataccccggttgtcaagctcaagcattacatggtcagccgaaaggactgaatcaatatagcaagatatcaccaaatggtacctctgggcctgcagaaactaaatcccgcatggaagtctgtcctctggatatggagaagacaagggaaagcgggttgtcctcagagggacgcgttgtagatctgaaggggtatggaatttcatatcctgtcagcactgcagaggcaggaggtgcagctctatcgaagatagacaccaaggcaacatatcccttagtaccatcttccaccagcattgtagtatctgatggcgcgacgggtcctcagctggaacacagtcagcaaaacaaacggacgccaagctcgactcctgaagcgctgaaaaggaaatcttgcatgaaagtttatccgctggacattgacgagggattgttccccgaggtacccgacttggcctttgagcaagagatgttggatacctacccagagctcttcgagaacatggatgtcgatgacttcttaagctgcgattttgcaatggtgaacagggacgaaccagtagatgcaacgtctgggttaccgagggacgacttggaggaaggggagattccaacattgtgaaggaagaacgtgatgcttcacaggatgttgcactcgagcggaagagtctgtgtcgtgcttttctaggacatgtcatgcgacgtaatggtagaacactcacatgtacctagcttgtatagctgcaacttgaaactatgcagcctcttttattctttatcgttttctttagtctcgctgttgtgttatgtagctctgccagagcagcaagaaattttggggttctaattttgtaagagatgatggctgtttggggatatggatgtcgaggatttctcaagctgtgcaa

SEQ ID NO: 111842 - DNA, 2039 bp, Zea Mays
ggggaaaagaatctgctgaaacgcgcggcacgcgtgagttgtgaaagttgagacgcctcagaaaaacgcaacccttttttgggctttggcttttgctgcaaacaaaaggcgacgcggctgggatctagcacgctagcgagcgagagagacgcacatctatctgtcaagcgacgccgcggcctcgatcagagtcggaggcgaacacccccatggcggcggctggcggcggcgcaggagggaaggtatccttcaagatcatcctcacctccgaccccaagctccctttcaaagtgttcagcgtgcccgaggcggcgccctttaccgcggtgctcaagtacgccgcggaggagttcaaggtcccgccccagaccagcgccatcatcaccaacggtacgccacccgtccatcgccccctcgcgtcatgaaaattcttcgcttggattgtgatctctctctctctctctctcttgctcgtacgcgattcggatcgtcctcgcctagacgcgtagctgcccggagaggatctacccgatcatgatgtctgatagcaattttagaagggaggaatcgtgcggtaccaattttacaaggactcttgcgagctatacgttgttttcgttttcggtggatgattgcattgctttttatcacaactattttgggatctgtggcaagctgttcaataccacgttgcccaggaatggaaacctgtcgctgcagtatataagaatgctgctgctggagcggtctttgtttttttttgttcgccatcgtgggtttattatgccctaggcaatggcattctgtagtttcaaattgttccagtcttttccttgatattatggttccatgcatcctgatacagcgatacaatctaaacctcaatgcatagtggaaggtaatttgggcctttcgagctgttgcgtatagaggcgtagacatcatttagttcctgttaagcaaattatcatcagattttcggtcctctcgttgatcacccaaatcctgattcagtacacttggaaaaatgggatgataatttgcaagcattaaaatttacgcaatcataggttcaaccggaaaagaatgtggtcctcttcccactcttaatagctttctgtctttgttgtcgttgcctgatggtgatcagcaacgttgtaaaatagcactttttatgcgactatttgtaacctttgtttcttttcttcttataatataatgaggcacagttctctcttgtgtttttgaggacaaaaaaaaccatcaagcttgtggcacaccataccctctctctctctctctcaatgattttgcattttatttccctttgcagatggaattggcatcaacccccagcaaagtgcaggtaccatttcaagatacccatacatttttttcagaacagtattttcccccctagcgtacctcagaccttccagaaagtcactacttaggcctgtttggatccctggagctaatacaaataaagtctagtcactttagaggctaaagatctaaacaggaagagttaaaagtgaataaattaataaaaatgtattcttttagtcacttttagctcctaaggaggagctaaactttagctagtttgctttagcttctggatccaaacaggcccttaaactgtgctgacgctgaagctgtcagctgaaattaccaacagggtggtgattggagtgttaccttttttttgtgtggtatgaggcctcggtttctgacatgaactactggtttttcccccctttcaggcaacgtgtttctgaaacatggttcggagctgcgtctcatccctcgcgatagagttggagctgtagtcatgtcttccggttagaggatatatacagtccaatgcataatgagcaaaacttgagagaaataaagctttgatgttggccttgcttggctgtaggatgttgttacaaggataataagcgaaccttaccgtacatgtctcaagttgtatgctctctgtttgtatgtggagagatttctgaaagtgaatccagtatctgaatcgactc

SEQ ID NO: 111843 - DNA, 728 bp, Zea Mays
ggggaaaagaatctgctgaaacgcgcggcacgcgtgagttgtgaaagttgagacgcctcagaaaaacgcaacccttttttgggctttggcttttgctgcaaacaaaaggcgacgcggctgggatctagcacgctagcgagcgagagagacgcacatctatctgtcaagcgacgccgcggcctcgatcagagtcggaggcgaacacccccatggcggcggctggcggcggcgcaggagggaaggtatccttcaagatcatcctcacctccgaccccaagctccctttcaaagtgttcagcgtgcccgaggcggcgccctttaccgcggtgctcaagtacgccgcggaggagttcaaggtcccgccccagaccagcgccatcatcaccaacgatggaattggcatcaacccccagcaaagtgcaggcaacgtgtttctgaaacatggttcggagctgcgtctcatccctcgcgatagagttggagctgtagtcatgtcttccggttagaggatatatacagtccaatgcataatgagcaaaacttgagagaaataaagctttgatgttggccttgcttggctgtaggatgttgttacaaggataataagcgaaccttaccgtacatgtctcaagttgtatgctctctgtttgtatgtggagagatttctgaaagtgaatccagtatctgaatcgactcaattagccgctttctgtctgcacagagcgata

SEQ ID NO: 111844 - DNA, 2254 bp, Zea Mays
tgtgttttttttttctttccgattttcgtttctctctcttttcctttccccccgtccctctctttctttctctcttggaattgtaattggactcaaaagtttcggcggccttctccatgaacacggtggcttcgctgcctttggcgccgcgcctgctcattaagccctccctcgcctgcttctccagaaaggacgtcggccgctatggcgggatcaaggtgtacgccgtgctcagggaagacggggccgagttcgcccggaacaacaacctggaggccctgttccaggtggacgaccccgggccgcgggcccccgtcaagaagttcctggacgtgaacgaggctctggaggtggtccgcttcgacatccagtactgcgactggagggcgcgccaggatctcctcaccatcatgcttctccacagcaaggtggtggaggtcctcaaccctctggcgagggagttcaagtccatcgggaccttgaggaaagagctcgccgagctacagcaggagctggaaaaagctcacaatcaggtccatctctcggaagccagagtctcatcggcgctcgacaagctagcgcatatggagaccctggtgagcgcaccatccacagccgagccgcccacttcttcctccctgtctgcaactgcaagcagcaccgcccgtgtccgagccaagaacaaacagccacgtcggaggcttgacgtgtccggcccagtgaagccttacaaccccagcctcaagaacttctggtacccagtcgccttctccagcgatctcaaggctcctgacaccatggtgccaatcgactgcttcgaggagcagtgggtgatcttccgaggcaaagacggaaggcccgggtgtgttcagaacacatgcgcccacagggcatgcccgctgcatcttggttcagtgaacgagggcaggatccagtgcccttaccatggtaattaagaaggcaaatcagtcgatcgacctactgaaaaaacaattaatgcacggttaacatataacgcctatatataataatcttcaggttgggagtactcgaccgatggcaagtgcgaaaagatgccatccacaaagatgctcgacgtgcgcatccagtcgctgccatgctttgagcaggaagggatggtctggatctggcccggggacgacccacccaaggctaccatcccttctctgctgcctccttcaggatttacggtccacgcagagtgttctctctatcttgcagatagtgatggagctaccagttgaacatggactcctcctggacaatctcctggaccttgctcacgctcctttcacacacacgtccacctttgccaagggctggagtgtgccaagtttggtcaagttcctgacacccgcgtctgggctccaagggtactgggacccgtacccgatcgacatggagttccggccaccgtgcatggtcctatcgaccatcggcatctccaagcccgggaagctacaagggaagagcacgaggcagtgctccacgcacctccaccagctccacgtctgcctgccctcctcccggaacaagaccaggctgctgtaccggatgtcgctggacttcgcgccgtggctcaagcacgtgccgctcatgcacctgctgtggtcgcatttcgcagagaaggtgttgaacgaggacctacggctcgttcttggccagcaagaggggatgatcgacggcgccaacgtctggaactggccggtgtcgtacgacaaactcgggatccggtaccggctgtggagggacgccgtcgagaggggcgccgacgaccggttgccgttcagcagcacccaagctgagagtttgtcgtagcgaccggaacgggacgggacctcttcctcgtcgcatttctccgcaagacgacggacggacagccagagttaatgtgacctaggcgtacgtgcgtctctctctctctctctgcgcggttcatcgttcacctcgggctgctgcgcactgaaggattctggaagggtgaaggttgacggccggagacgatgatgggcagcatcatggtctatggtgtccacatgcatgtacactactagcgacgacggcatcatgggatgcaattgtaatctgagattgatctcttttttttttcaccctttctgtgtaaagattcagcaaattgttgcgttactcttccaaagcatgtataatcaactacggagaagtgttcatatatataaatatgagaaattgcagctattgctacagttcatct

SEQ ID NO: 111845 - DNA, 2125 bp, Zea Mays
ttttttttctttccgattttcgtttctctctcttttcctttccccccgtccctctctttctttctctcttggaattgtaattggactcaaaagtttcggcggccttctccatgaacacggtggcttcgctgcctttggcgccgcgcctgctcattaagccctccctcgcctgcttctccagaaaggacgtcggccgctatggcgggatcaaggtgtacgccgtgctcagggaagacggggccgagttcgcccggaacaacaacctggaggccctgttccaggtggacgaccccgggccgcgggcccccgtcaagaagttcctggacgtgaacgaggctctggaggtggtccgcttcgacatccagtactgcgactggagggcgcgccaggatctcctcaccatcatgcttctccacagcaaggtggtggaggtcctcaaccctctggcgagggagttcaagtccatcgggaccttgaggaaagagctcgccgagctacagcaggagctggaaaaagctcacaatcagcaggtccatctctcggaagccagagtctcatcggcgctcgacaagctagcgcatatggagaccctggtgagcgcaccatccacagccgagccgcccacttcttcctccctgtctgcaactgcaagcagcaccgcccgtgtccgagccaagaacaaacagccacgtcggaggcttgacgtgtccggcccagtgaagccttacaaccccagcctcaagaacttctggtacccagtcgccttctccagcgatctcaaggctcctgacaccatggtgccaatcgactgcttcgaggagcagtgggtgatcttccgaggcaaagacggaaggcccgggtgtgttcagaacacatgcgcccacagggcatgcccgctgcatcttggttcagtgaacgagggcaggatccagtgcccttaccatggttgggagtactcgaccgatggcaagtgcgaaaagatgccatccacaaagatgctcgacgtgcgcatccagtcgctgccatgctttgagcaggaagggatggtctggatctggcccggggacgacccacccaaggctaccatcccttctctgctgcctccttcaggatttacggtccacgcagagatagtgatggagctaccagttgaacatggactcctcctggacaatctcctggaccttgctcacgctcctttcacacacacgtccacctttgccaagggctggagtgtgccaagtttggtcaagttcctgacacccgcgtctgggctccaagggtactgggacccgtacccgatcgacatggagttccggccaccgtgcatggtcctatcgaccatcggcatctccaagcccgggaagctacaagggaagagcacgaggcagtgctccacgcacctccaccagctccacgtctgcctgccctcctcccggaacaagaccaggctgctgtaccggatgtcgctggacttcgcgccgtggctcaagcacgtgccgctcatgcacctgctgtggtcgcatttcgcagagaaggtgttgaacgaggacctacggctcgttcttggccagcaagaggggatgatcgacggcgccaacgtctggaactggccggtgtcgtacgacaaactcgggatccggtaccggctgtggagggacgccgtcgagaggggcgccgacgaccggttgccgttcagcagcacccaagctgagagtttgtcgtagcgaccggaacgggacgggacctcttcctcgtcgcatttctccgcaagacgacggacggacagccagagttaatgtgacctaggcgtacgtgcgtctctctctctctctctgcgcggttcatcgttcacctcgggctgctgcgcactgaaggattctggaagggtgaaggttgacggccggagacgatgatgggcagcatcatggtctatggtgtccacatgcatgtacactactagcgacgacggcatcatgggatgcaattgtaatctgagattgatctcttttttttttcaccctttctgtgtaaagattcagcaaattgttgcgttactcttccaaagcatgtataatcaactacggagaagtgttcatatatataaatatgagaaattgcagct

SEQ ID NO: 111846 - DNA, 114 bp, Zea Mays
gtcatcctcgtgcagcgagcaaaaacttaaatttatatagaaggaatgtttgccagcaacttagacctatgttgacttcagaaccactattatttaccaaaaacgagaaaagaa

SEQ ID NO: 111847 - DNA, 2606 bp, Zea Mays
tttgaagaacgacgactagagtgacctgttttgacaaatttctcggctgggcgtgggcgggtttctgatgttgggttgggaagagaagagatagctcgtcctcagcatccgccttcctcctcggcggccatgctgctccgcctccgcccgccgcggcacccgtccaccgcggcggccacaaccctctcttccttcctcccctccacttccttccgccgactcatccccttgccgcgctggcgcccccctccgcgccgccgcctctccgccgccgccaaggattcgatcggccggttggatccgcgccaggagcggtacgacgtcattgtggtcggaggcggccatgccggatgcgaggccgcccttgcttcggctcgcctcggcgcgcgcaccctgcttcttacgctcaacattgaccggattgcgtggcagccttgtaaccctgctgttggtggccctgcgaagtctcaacttgtccatgaggtagatgcccttggtggtgaaattggaaaaattactgataggtgctacttgcaaaagcgtgtactgaacagctcaaaaggccctgctgtacgtgcactgcgtgctcagactgataagagagagtatgcaatagagatgaagaacagtgtggaaagcacagaaaaccttttcattagagaagcaatggctacagaggttttaattggaaaaaatgacagcattgagggtgttcgcactttcttcggcatggacttttatgcaccatctgttgtacttaccaccggaacattcatgagtggtaagatttgggttggtaggacatcaatgcctgctgggcgagctggagagtcagcttctcatggactaactgaaaacttgcagtttctgggttttgaaactgaccgcttgaaaaccggtacaccaccacgaattgatcgcagaacagttgatttttctggattggaaccccagcatggtgatgaagaggtaggttggtttagttttgatcctgaatttcacgtcgagagagaacagatgtgctgctatctaacacgaactacaaaagagacgcaccaaattgttatcgacaacttagatgaaacaccaacttatggtggttgggttgaagcgaagggaccaagatactgcccgtcaattgaagacaagattgtaaggttcaaagataaagagtctcatcagatctttcttgaacctgagggtagaaatgttcctgaactatatctacagggcttttctactgggcttcctgagagattgcaattgtcccttgtgcgaactataccagggctggagaactgtctaatgctaagacctgcatatgcagttgaatatgattacttacccgcatatcaatgctcaagatcacttatgacaaagaagattgagggtttattcttctctggccagataaatggaacaacgggatacgaagaagctgcagctcagggtataatttctggaatcaatgcagctaggcattctgatgggaaatcattaattattcttgagagggaaagcagttatataggaactcttattgatgatcttgttacaaaagatcttagagagccctatcgcatgctaacaagccgttcagaacaccggctattgcttcgatcagataatgctgatagtcgtttgacccctttgggacgagagattggtttaatagatgatagacgttgggagctttatcagtcaaagcaagcccgcattaagcaagagaaagaacggttgagatctacaaaagttccaggaggtgaatttgctgctgaagttactgcagtatccaaccaacctgtaaaggattcatctacacttgaagccatattaaagaagccacacgtacaatataaactccttgacgagcatggatgcggaaatgaaaatttatctcgaattgagaaggaatgtgtagagattgatatcaagtatgaaggtttcatcgcacgacaacaaagtcaattacatcagatcgtaaaccaagaacacaggaaacttcctgaagatttggattaccactcaatgacaaatctatcacttgaagctcgtgagaaactttccaaggtgcgtccacaaacaataggtcaagctagcagaatcggcggtgtgagcccagcagacatgacagttctcctcatttggatggagagcaaccgacgcatggctacccacaggagacagcgagagcagctgggatcagttgcagtcgagtcggatggttcttcagaggaggccgtccaagccagcacggcataaacgtggggagcttctggcagctgaacaaggaacaacaaaattcggtgaggcatccagggagcctgcgcgtctgtggtacaacgatgcagggaggcgccaagtgcatgcatgtcttttcttgacgacatgaggaaatagtcggccccctggttccttcatgttgtgcctcattgtctaccagtatgtgtgcatgttgtttaggaatgctggtggaatacaggttgatatttgcagtagtagaattgagagagcagactgtaaagaacgacaacaaataggggtttaaaacatacattcgcactcacttagctaaaaaaatacactttttgtgtgttttatacttt

SEQ ID NO: 111848 - DNA, 1813 bp, Zea Mays
aatttttaattatattctttgataaatttgtatttcaataaaatattacaagcaaagcaaggtggacagtgcacacaagagacaaactcctccagcaggggccccaacccaagcaaagcaatcttgtcgtttatcggacaggtcacggtcgcggccaccagttacgatcccatctccatcccactggactccacgaagcggcgaagtctatctttttctcctcctgccgtacgtccgttccagcttgcaaagcgctcgcgagctgctgccatggcaggcgccggtgcgcccgcagttccccaggccggtcgcccagcccccaacttcgacgtcatcgtggtgggcgccggcatcatgggcagctgcacggcgcacgcggcggcgtctcgcggcgcccgcgtcctgctgctggagcgcttcgacctgctccacccgctgggctcctcgcacggcgactcccgcatcatccgggacgcctacgcgcagccgcggtacctccgcatggtgcgcctcgcccgctgcctctgggccgccgccgaggcggaggccggctaccgcgtgctcaccccgacgccgcacctctccatgggcccgcggagcagcgcctcgctcgccgccgccatcgctaacatcggtgccgaggaggtggacgtggacgaccttcaccgcaggtggggcggcgccttcgccctcaccgtcccgggcccggtggacgcgtgggtcaccgcgctcagcgaccacggcggcgtgctcagcgccaccaaggccgtggccatgttccagtcgctcgccgtcgcgaaaggcgccgtggtcagggacaacaccgaggtcgtcggcatcgacagggcgcccgagcccgacggcggcggcgtcgtggtgagggccgccggcggcgaggcgttccgcggcgccaggtgcgtcgtcacggtgggcgcgtgggcggccaagctgctcggctcctggggcgtggacctccccatcaggccgctgcacacgctacacctctactggcgcgtgaagcccggccaggagcagactgtctcggcgagcgccgggttcccgaccttctccagctacggcgacccgcccgtgtacggcgcgccgtcgctggagctcccggggctcatcaagatcagctgcgacggcggcccgccgtgcgacccggacgcccgcgactggctcgcgggcgacgcggaggtcacgcaccgggtggccaggtggatccaggaggccatgccggaccacgtggacgccgcgggagggccggtcgtccggcagtcgtgcatctgctccatgacccccgacgccgacttcgtcatggacttcctgggcggcggccgggacgtggtggtcggggccggcttctcgggccacggcttcaagatgggccccgccgtggggaagatcctggcggagatggccattgatggcggctccgagacggcggcggaggccggcctggacctcggcttcttccggatcgggcgcttcgatggcaaccccatgggaaatgccaagtagtgagctatgctgctgctgccatgcatgtagtactaaatatggatcgatggtggtcaataatgaaagtaataaaacattcatattctagcatcataggctgagaatactttcttgatgtatggcacctgagaaactatcctctttcagattttgtatggtcagtcactctaataaacgatttgctgtattttaaacattaacgtattctcaagtgatactccttcgtttcttcgaatcgaagaacgactttgaagcatagtaattgccacaatcaaaaggtcaaggcaatgtt

SEQ ID NO: 111849 - DNA, 2694 bp, Zea Mays
atggcggctgctggatctgaggatgacgacaatctttcatcacctagaccacagatcctttgtatggagtttcaagtgcatgttggagtgaaatttgatggtagtgtagatggttattctggtggaagggttggttacatgagatttatggagccacaaggggtcgattggtttacaatgcaggaaaatcttgtgtatcatggctacgaaggaaatgccaccttgtactatttaaaacctagccatacggcaccacaaggtcttgttttgatggataatgcagaacatgtacaacagttgatgaaggaccatgagggccttaaggtgtgcaaattgttcattttgggaactgaagaaggagatggtgatgtatgggaaggtgaagaaagggatgtatgggaagatgatgaagaatatgtcgcatgggaaactgaagaagatgatggagatttatatgttatcaagaatagcagtgatttgaaacaaattcaaaaggatcatacaggacaattgataaatgaaattgataaaagggtttatttgtcggatgaggttaatgaaggtgttcacagtcctgtaaattttgatggtgagggtatatatgtacatcgatctctcggggtagattatgtgaggtttgacaattcaaccatgagacacccaattatggatgttggaacattttttaccgatgtgaagcaatttagagcagcactaaataatttgatcatttgtgagggtagagaagttatgagacctaagaatgatcttgtgcaagtttcagcaaagtgcaaaattgtagactgtgcttggtatatatatgcctctagacttccagatggtcgttccttcaagatcaagaagtatgtaaaggaacacacttgtgggaaaagtcacacggtgaagcaaatggatgctaaatggattggcacagagtatgagcattttttcagaagtgagaaagattggcgagttaagtcccttagggacatcgtccttagggacacacaggtggggatatcacttaccaaagcctatagagcgaagagatatgcagtgcaacagattagtggtgagtaccatgaacaatacaggaggatacaagattatgctcacacagtgttatctgctaatcctggaagttgcatagtgataaaatgttttgtggatccaacacgagcaataaatcctagattcgagaggatgtatgtgtcctttgatgctcaagtaaaaggattcctagctggttgtagacctttctttgggttagatggcacccatgtcaaactaccaaatggaggacaaattctaacagcacaaggaagagatgcaaacaacaatctttttcctatagcattcgctttggtagggtctgaaaatgctaattcgtggacatggtttttggagttgctggtgcagtccattgggcaaggagagcattgtggtggctggactattatgaacggtgttagggccattttcccacatgcagagcatagatattgtttgaggcacttgtatgctaacttttcaaaggctgggttcaagggtccccgactaaaagagctaatggatagggctgcctatgcgtacaaggagtttgatttcaaacaagctatggatgatattaagaaagaaaacactagagcatggcaatggttgtttgacattgatagtaagcattggtcaaggcataggttcagcccccatgctaaaactgacttggtcgttaataacattagcgagtcatacaattcttggattttggaggcaagagaagaacctgtgtgcacgatggtggagcacattaggactaagttgatggagtctattaatattaaaagagatggtgcaaagaaggacacatggttcatagctccaaattatcagaaaaagcttgagtttgagaagaaaaatgcttcatattgcagggccatctgtgctgggcatgggatatggcaagtcacaagtggagacagtcaatatgttgttgatctcaacaatcacaaatgtggatgctacaagtgggatgttactggagtgccatgctcacatgcagtggctgctattcatgagttcaaacacaagccagaaaactatatgtcattattcttcactagggagaaatatgtagccacatatgagggtatgattatgcctgtgccagacaagagacaatggttaagcacagacttgcctgatgtggatcctccattttatcatgcccagcctggaagaccaaagaagaagcgagtgagagcgcaaggagaacctcgtgttgagtccagagcctcaaaaagggctgcagtgaaatgctccaattgccacacttatggtcacaatgttaagggatgtggggtgccacttagggctgattgggagcctaggaagggagctaagtacacaagggcctcaattggtgttcctacttcatctcaaccaaacccgtcaacatttgaaggttcaagccaatacaatttggctccatttgaaggccaaaactacatgaacaatgatgaaggcaatggagtctgtcagaacatcgaaggaggacctggaattaggccacaaaagttgttctcaataaggaaaaggaatgattaactgtgatatgtgccttattaatgcaaactgcgactattgtgccttgttactgcaaaatatgattctgaaacgatttttattgggtcacta

SEQ ID NO: 111850 - DNA, 585 bp, Zea Mays
tatatatgtctttcatcatatataatgtatgtacatcgatagaacgacgacgagccaaacgattcgattgatctccgcaatactacgtacaatgcaatgcaaactcatcaccaccagatttcttgagctgaacaatacaatgaaggatcatcatcagtagacttcgacgttccattgctcgctcttcttgagctgcttcttgtagtccaaccaacaacttaccgtccttggctgcgaggtcgagcatgatgtcgtcgatgcccttctccatgcccttgagcccgcacatgtagacgtaggtgttgtccttcttgagcagctcccacagctcctccttgtactccgccatgcgcgtctggatgtacatcttctccccggccgcgttcgtctgctcccggctcaccgcgaagtccagccggaagttgtccggcgccatctccttcatcttctccagctcctccttgtacagcagggtgtcgctggtcgggacgcccaggaacagccacgccagcccggtgtactatgtatatcatgttggatatagattcagttcattaattaattagttcatttcatcaatttgtc

SEQ ID NO: 111851 - DNA, 1764 bp, Zea Mays
ttgatctccgcaatactacgtacaatgcaatgcaaactcatcaccaccagattgcttgagctgaacaatacaatgaaggatcatcatcagtagacttcgacgttccattgctcgctcttcttgagctgcttcttgtagtccaaccaacagcttaccgtccttggctgcgaggtcgagcatgatgtcgtcgatgcccttctccatgcccttgagcccgcacatgtagacgtaggtgttgtccttcttgagcagctcccacagctcctccttgtactccgccatgcgcgtctggatgtacatcttctccccggccgcgttcgtctgctcccggctcaccgcgaagtccagccggaagttgtccggcgccatctccttcatcttctccagctcctccttgtacagcagggtgtcgctggtcgggacgcccaggaacagccacgccagcccgtttgagaccttgtagtcctcgtgctcctcgaagaacatcttccacaagaaggagcggaacggagcgatgccggtacccgttgcgagcatgatgattgttgcgttggggtctttgggcatgagcatctccttgcccactggccctgtgatcttcacctcagcgcctggcttcaagtcacctgcattagtatgtatatatatgcttagtatataatatattagtctgcatggaagaactgagacatggcggaaattaaagctagacaactgacagaggaagttcgagcagactcctttgacgacctccccctgatcgttggtgtagaccagcctcttcacgcacagcgacacctgcacatcaacaaaagttgccatagctatcttaatggtgatacatacatataattaattaattaatttgtattaatcattggctcaccgtcttggagtcgccgaaatctccgagggcgctgctggcgatggagtagagcctgagcttgtgcggcttgccgttcttgtcctcgccatccgcgatgacgccgatggactggccctctctgtaggggacctcgcctgcatgcacgaccacccaatacatcaccttaccttatcctaactaacactagattactgctactaattaggtaagctacctaccttctgtgctgaagaccatgtgccacgtctccccgggcgcttggtcgccggtgatcctggtgttgagcaggcacctcccgacgtacggctccttgggcttgtacttgttggtgacgagcccctcctcctgcttcttggacaccttctccagcttcttgaccggctccgcctccgcggtctcggtggtggacacctgcacgcgcagccgcaccgcgcgcgggccgccgtgccgccgcgggaactggaggtggccgcatggagacgacggggacgcggacgcggacgccttggccttggcggcggcaggggaggaggaggaggagggcagagagacggccgccgcggtcacggcagccatggctgtgggtggggtcgaatggagcgctagtggaccagattacagagccgccgtagcaaagatagctagctagctactgtggtgcaggtgcagtagaggagggagaggatgggatttgtatcggcggcatgcagtgcagtactgctgctcgatccgaagaagagaggcgaggcgaaggggcgagggaggggatgagtggaagagagacgaggtggggagagcgagtggctgctgcccactcactgcctgtgtctgtctctctctctctcccccctctttgacagcttagcagtgctccaggc

SEQ ID NO: 111852 - DNA, 123 bp, Zea Mays
atgccgtcgcaatgcaaagacattgtactagtttttaataattgtaatacccaatttgtaagagataatataaaaggagaaaaattatttcctttgtttatatgtgtgttgtatctatttacc

SEQ ID NO: 111853 - DNA, 1467 bp, Zea Mays
accaccaccacggcagaaagaagcgggggagggaattacgtcccgttcacttcactccctccatccgatcccgatcgccgccttcctcctcctcctcctgccgcgacccgccacctaaccaacgaagccgcctccctccaagccaagctcccgcatacagctccaaaaccgaacctgcacccagcccaacgcaacgcgacaccgccgacagcgatggaagtgaaggcgcacacggcacgggtcctggtggcccggctgcgcggcgccaccgccgcgcgcgacggggccgcggcggcggcggtgtccgagatccgcctcgccaccaagacggacccggagatccgggcgccgctggcggacgcgggcgcgctgcccctcctggccgcgcagctccagcgcgcgtcccccgcggccgtggacgcggcggccgcgctcctcaacatctccatctcggcgcgggaccaggtggcgtcggccccgggcgtgctggacgcgctgacggccgcgctgcgctcgggcgacgccgcgcaccacgcggcgtccgtggtccacagcctcctctgcggcggggagccgcaccgcgcggcggtgtgcgagcggcgcccgctcctggccgcgctggtggcgctcctccgcgcgccgccgcacaggccgggcgccacgcgcgccaccaaggacgccctcagggcgctgttcggcgccgcgctctacccgcccgcccgcgccgcgctcgtctcgctcggcgccgtgcaggcgctcttcgcgctcgtgctcacggacgcgcgcgacggcgtcgtggaggacgccaccgccgtggtcgcgcaggtggccgggtgcgccgagagcctcgaggccttccgctgggtctccggggtgcgcatcctcctcgacctcgtcgagtcggggggcgccgccacgcccagggcgcgggagaacgccgctgccgcgctgctcaacctcgtcgtggccggcggggaggccgccgcggcagatgtggtcgcagtcggcggcgccgaggagaccgtgcgggagctcgccgaggacagcgccgccagcccccgggggaaggccaaggcggaggcgctgctgcgcgcgctcgaggacgccgccgtcaggaggcgcgagcaccgcctagctgatttcctcgacgggctcgtgcagtccgatccttacatctcgtcgccggcgtcggcgtccacgcacggctagtcaaaggctgatgattctggtttgagtttggtttgacgaccgacaacttcctcttctttcttccttcttcttccttgtatataaaaaacaacatcttttatgtagtgtagcttggctaaaaaatactaatcgcatttgttgattgatgcaaattcttcctgtgctgcgtgtcgtcaactttgtgtaaaattcgcccaaactctggctacattcaggacttcggatgagaccaaccgatcgataaaattctgcatcaca

SEQ ID NO: 111854 - DNA, 522 bp, Zea Mays
cccttccccattgcaacgttgttggttttcgttttatttttggatccatgcaagccatttcctgttgataggaaggcagagtaacaagttgatttcgagtaccatacctcctttccggttcacagacagatcgagggtcacaccttacacttgcgtcacctgcctgcccttctcggtttaattgaataagacctaggaccaaggatgcattttttgaatggagtcttctctctaaatatagagatggcaatgggtacccgaaacccgaatacccgacgggttttacccgatatgaaggcgggtacgggatgatttctctacccgcgggtatgttaatgggtaaaaacctctacccgttgggtagacgggtacgggtatgggttggtactacccatacccgtctacccgtgggtaaaatatacccgcatcaatagcactataaacatgtaatagagtccaacttagctagaataaaacccttctctagttatcatttgtctagataccaagttatgtaatcat

SEQ ID NO: 111855 - DNA, 1312 bp, Zea Mays
ttcggctccgtcgaggcgcacgctgaaacgtcgaggcgcacgccaccgaatttccaaagttcccatgcaggttcgctttctggcccttggttttctgcttcttttattcttggcccaagtccactctctggtctgggtacgtacgcactccgcctcccggccttcaaccttccgcggtccacgctggcacacgcatcctcttccgtcttccctcccttctcgttctctcccgccatgccgtgaagcttccaaatgcgcgtcgccttcattacctgccctcctggcctcctctatggagtgtgttatatatacgtatcacctcgcaacaacaccatgcatggttcgcagcgccagggtcgcaagcttatagcagtcaacaaatactagtgcccattaccgccggatcgatcggaagccggccggcggcaaggaaggagtatcccagcgcagcaccgactccacgacttggccatcaatcatcatccatcgcagtatcgcaccgcagcaacagacaccgaccgaggatggttgttgccgtcgccgcgcggtcgtcgtcgtccgcgaccagcagcagcagcgagctggggtcgctgttcgcggcgttcgacgcggacgcggacgggcggatctcggcggccgagctgcgggagtgcgtgcgggcgacgctggggcccgacgccgcggcggtgtcggcggaggaggcggaggcgctggtggcgggcgcggacgcggacggcgacgggctgctggacgccgccgagttcgcgcggctcgtggccggcctgcacgcgggtgccgccgaggaggaccgccaccgctgcctgcgccaggccttccggatgtactcctccgacgacgacgcggcggagggccggggctcctcctgcatcacccccgacagcctgcgccgcatgctcgccaggctcggcgcgcaccaggacgtggacgactgccgcgccatgatctgcaggttcgacctcgacggcgacggcgtgctcagcttccacgagttcaaggtcatgatgggcgccgcgtgacccgatccagttccgccgccgccgctgctgctgcttagatggtccttgttcatatgtgggttgcttcattcattggttgattcattcgttgcttgtgtgtcatcaaaataataagtcattagttgcaggtagctaggattattagccatgctgtgatgtacatcattttcgtgcagcctgtgttgtgcagttgtgctccttcccccttgcgtgtgaagatgaattgctaattttttatttcatatatacatcgccatctaaaataaatattgaat

SEQ ID NO: 111856 - DNA, 3260 bp, Zea Mays
atctctgcttcgaacgttcacggagacacgaggctggaggctgcagcgctaaccctagccggcgtcggcggtggcggccagcgggaggggagctgccaaacgcctaaccctaacggctgcaggcggctgggcgcaaggcatccgtggccagcgtgccgcgcgcacgagcggacagttgcggcggcaggggcgcagggcgcgacctcggcgcggtgggcgcgggcgcaccgctgagcaggctgtagggggaggtgggattggattttttttgacgtggaagttggaatactcaagttggaaattctgctcctccactgccgccgccgctcgccacgtgctcgggtctagactcgtcggtttattcgccaggtcttcgttgtgcccttcgccggcgaccagcacgcaccagttactgggtcacgcatgtcgtctgctgctgcggtggacgagatggagctggacggcattgagcggcaccgggataaggagaggagggagaggcataggagggaggagaaggatcacaatggcagtggaagaagggacagggagaaagagaaggacgaccggagaagggacaaggatgatggcaagcatagggatagggatagagatagggagagagacagggataaggatagcaagtacagagaccgggataaggagccagagcgtgaacgtaaccgtgaccgtgaccggggcaaagatcgggagcgggaaccagatcggcagcgtgacaaggaccgtagcaaagaccgggataaagaagcagagcgtgataaggaaagggagcggagggacagggataaggagagaagccgcaatagagacaaggacaaggataggacgcagagggaggatagggatcacgagaagtcaagggtgaagggtcgtggagaagacgaagcagatttatccaagggcgacaagggggttcagaagcagagagttgatgcctcaggggatgctgagcagcccgcagcagatgagctcagagagcgcattgcaagggcaaaggaggaaagattgaaggagaaaaaggaaggagggatactggatggtaatgacggggcttctgagatactgtcttgggtgggaaagagtcgtaaacttgatgaaaaaagacaagctgaaaaggagaaagcattacgtcttgcacgagcactggaagaacaggataatatcttggcagaaaatggcgatgacgatgatgacgataaagaggaagatacacaagtgggagatcacttatctggtgtcaaggtgcttcatggccttgataaggttttggaaggtggtgcagttgtcatgactctcaaagatcagagtattcttgccaatggggatatcaatgaagacgctgacatgcttgagaacattgagattggtgagcagaaacaaagagatgaagcttataaggcttcaaagaagaaaggaacttatgatgacaagttcaacaatgattcatcgtcaaaaaagtcgatactgtcacattatgatgaccaaatggaagatgagggcgtgacccttgatgaaggtggacgtttcactggtgaagcagaaaagaagctggaagagcttcggaaaaggattgaaggtggttatgttcagaaaaagacagaagaccttacttccaccacaaagatatcaacagactattttacccctgatgaaatgcttaaatttaaaaaaccaaagaaaaagaaatccctgaggaagaaggagaagctggatctggatgcacttgaggcagaagcaattgcttctggattgggggccgctgatcgtgggtcgaggaatgatggaaagagacagtctgctagggaggaagaacaagcggctgatgctgaaaagagaagcagtggttatcaaactgccattgcaaaggctgaagaggcatcaagagcattgcgcggggagaaaactgcacctgctaaaccagctgaagaacttgttttcggtgatgattatgaagatctgcagaaatctctagagcaagcaagaaagttggccctaaggaagcaggaagaggcttcagcttctggtcctcgttccatagtcgaactggctactgcaaccaagagccaagaggaaacagaagccacagaaggagattcagaacagaataaggttgttatcacagagatggaggaatttgtgtggggactgcaattgaatcaaggaacacgcaagccagaagacgatgtgtttatggatgaagatgatgatgccatgccttcagataatgttgcaaaagatgacactaatgggttggcagagatggaagaggatgctctgacagaaataccagccaaggtcgaagaggatgaagtcaaaccagatgaggttatacatgaagttgcagtaggaaagggtttagctggtgctttaaagattcttaaggagcgaggaagcctcaacgagggaacagattggggaggcagaacaacagacaagaaaaagagcaagcttataggtgtcgaggatggacctaaagacattcgcattgaaagaatagatgaatttggcagagtgatgacacctaaggaggcattccgtcatctttcgcacaagtttcatggcaaggggcctggtaaaatgaaacaagaaaaacgccagaagaaatatcatgatgagctgaaaaccaagcatatgaaatcttctgacacaccattattggccgcggaaaagatgagagaggctcaatctcgtaatcaaacaccatacctcattttaagtggcaatgcaaaaacaggtcaaacaagtgatagcggcggctatgctaccttggagacagagcaacctgggagcctaacgcccatgcttggggacaaaaaggtcgagcattttttgggcatcaaacgaagtgccaagcctggaagcttacctcctccagtcccaaagaaaccgaagaactgaacctggtggtagcactcagccaacgaagcaggctacaacgcatttactgtgagcagcaatcagcccacaagcttccacggctcaaccccccgccgccgcactagaaatgcaatatcctctgtatttcttctaagctgattacactaacattctggcatgttcgatggggttttgtaattcagtgatatacgtgtgcatccttgatctgccttgaacatgtaagtgatggaactaaatattgttctaacgacacaccgtttccgtttgaataaagtgtagttatgatgtgacggtttaaggttaaagcagctgtgttcaagagctacattcgttctgaaaat

SEQ ID NO: 111857 - DNA, 1404 bp, Zea Mays
gtccggtcggcctctctctctcacacacacacttttttctccggacgcgctcgttcgttcgcgaaggcgccccttcctgccctcacatccgctcctccctccccgacaccgaccgacccctcgtccgctcgcctccctccccgatccccaccgccatggccgccgccgccgccgccgcgtcctcctcttcctcctccgaggttccgatcgccgcccgcacctgcgtctccgtcggcgaggtggcggtgggcgcggtggctacaggcagcggcgaccgggtggcggcggattgcggggtgtgcgccatctgcctcgacaggaaagcgctccaggagacggccctcgtcaagggttgggaccacccctactgtgtgacctgtattttgaggtgggcatcctacaaggagaaccctctctgcccacagtgcaagcatccattcgaattcctcagcgtgcaccgctctctcgacggctgcctacatgactacctgtttgaggagagtgtttgcctccttctgagggcagcttggtttgaacctctgatcgtagaggctcacgaggaggctctggaagaagaagagtttctccaccagcagtaccaatacgatgatgacgaagatgatcttgacgaggaatcttattacatgaacaggtccccaagcatccgtattggtaacaggagatggggtgacaatgggtacatcaggggaggcaggaaagaggcgaggccagtgaatactgatgtggctgctggtccatccaggactccgaagaagaaagagaaagccgcatcctcttcggcgtcggtgtcagtgtctggttcggggtcaggatcggggtctgtatccaaggatgtcgctggaaggcgggcgaagagggcgcagaagcgagaagctgcagacaaggcagctgcagagaagcacctgaagcacctgcagaggttggggctgagaaaatcgccagagcctgtagtgcccgaggaggttgggccacaggtgaatgagtgacttaagccgccgcctagtgctatatggtgctgctaaaaacactgcagccctttgggccacaaaataatcttccactgtgaagagcttgagcgtggccttgtatcatggcagcttttcgcctcgttgtacatagtctagtttctcatcactgttttagattcagcacagaaatgcagctgctgtctgcacgactgttgcagctatgaagctgtatgtacctcactgttggtgcactattttagttattgctaatcacaggggatgcaatcggcatctgtgttgattactatggggacaaatgaggcgtggaaccaattctacaacgcaaacttgtaaccatatggaatcactcgccgttgacatgatactaatcctgttaactagtctggtccttgct

SEQ ID NO: 111858 - DNA, 1277 bp, Zea Mays
gtccggtcggcctctctctctcacacacacacttttttctccggacgcgctcgttcgttcgcgaaggcgccccttcctgccctcacatccgctcctccctccccgacaccgaccgacccctcgtccgctcgcctccctccccgatccccaccgccatggccgccgccgccgccgccgcgtcctcctcttcctcctccgaggttccgatcgccgcccgcacctgcgtctccgtcggcgaggtggcggtgggcgcggtggctacaggcagcggcgaccgggtggcggcggattgcggggtgtgcgccatctgcctcgacaggaaagcgctccaggagacggccctcgtcaagggttgggaccacccctactgtgtgacctgtattttgaggtgggcatcctacaaggagaaccctctctgcccacagtgcaagcatccattcgaattcctcagcgtgcaccgctctctcgacggctggtaaccccttgttcatctgaaatggtgggagggtggctgaaaattttcaggtccccaagcatccgtattggtaacaggagatggggtgacaatgggtacatcaggggaggcaggaaagaggcgaggccagtgaatactgatgtggctgctggtccatccaggactccgaagaagaaagagaaagccgcatcctcttcggcgtcggtgtcagtgtctggttcggggtcaggatcggggtctgtatccaaggatgtcgctggaaggcgggcgaagagggcgcagaagcgagaagctgcagacaaggcagctgcagagaagcacctgaagcacctgcagaggttggggctgagaaaatcgccagagcctgtagtgcccgaggaggttgggccacaggtgaatgagtgacttaagccgccgcctagtgctatatggtgctgctaaaaacactgcagccctttgggccacaaaataatcttccactgtgaagagcttgagcgtggccttgtatcatggcagcttttcgcctcgttgtacatagtctagtttctcatcactgttttagattcagcacagaaatgcagctgctgtctgcacgactgttgcagctatgaagctgtatgtacctcactgttggtgcactattttagttattgctaatcacaggggatgcaatcggcatctgtgttgattactatggggacaaatgaggcgtggaaccaattctacaacgcaaacttgtaaccatatggaatcactcgccgttgacatgatactaatcctgttaactagtctggtccttgct

SEQ ID NO: 111859 - DNA, 1380 bp, Zea Mays
gtccggtcggcctctctctctcacacacacacttttttctccggacgcgctcgttcgttcgcgaaggcgccccttcctgccctcacatccgctcctccctccccgacaccgaccgacccctcgtccgctcgcctccctccccgatccccaccgccatggccgccgccgccgccgccgcgtcctcctcttcctcctccgaggttccgatcgccgcccgcacctgcgtctccgtcggcgaggtggcggtgggcgcggtggctacaggcagcggcgaccgggtggcggcggattgcggggtgtgcgccatctgcctcgacaggaaagcgctccaggagacggccctcgtcaagggttgggaccacccctactgtgtgacctgtattttgaggtgggcatcctacaaggagaaccctctctgcccacagtgcaagcatccattcgaattcctcagcgtgcaccgctctctcgacggctggtaaccccttgttcatctgaaatggtgggagggtggctgaaaattttcagaggctcacgaggaggctctggaagaagaagagtttctccaccagcagtaccaatacgatgatgacgaagatgatcttgacgaggaatcttattacatgaacaggtccccaagcatccgtattggtaacaggagatggggtgacaatgggtacatcaggggaggcaggaaagaggcgaggccagtgaatactgatgtggctgctggtccatccaggactccgaagaagaaagagaaagccgcatcctcttcggcgtcggtgtcagtgtctggttcggggtcaggatcggggtctgtatccaaggatgtcgctggaaggcgggcgaagagggcgcagaagcgagaagctgcagacaaggcagctgcagagaagcacctgaagcacctgcagaggttggggctgagaaaatcgccagagcctgtagtgcccgaggaggttgggccacaggtgaatgagtgacttaagccgccgcctagtgctatatggtgctgctaaaaacactgcagccctttgggccacaaaataatcttccactgtgaagagcttgagcgtggccttgtatcatggcagcttttcgcctcgttgtacatagtctagtttctcatcactgttttagattcagcacagaaatgcagctgctgtctgcacgactgttgcagctatgaagctgtatgtacctcactgttggtgcactattttagttattgctaatcacaggggatgcaatcggcatctgtgttgattactatggggacaaatgaggcgtggaaccaattctacaacgcaaacttgtaaccatatggaatcactcgccgttgacatgatactaatcctgttaactagtctggtccttgct

SEQ ID NO: 111860 - DNA, 1749 bp, Zea Mays
cgagctgagtggctgacgcacgggcctggcgtatttattggcttccccgccgcgtcgtgcacctgcaccagcaccagcacggcgaccaaccctctcccaacccgactagtcggactcgcagctccgccccaagtccaggtccaagcatggaagtcgcggcggcgtcggcgaggcccgtcctgcgcgtggctgccatctgcggctccctccgcaaggcctccttcaaccgcggcctcctccgcgccgccgcggaggtgtgcgaggactccatcccggggctccgcatcgacgagctcgacatctccgacctgcccatcatcaacaccgaccttgagaccggcagcggcagcggcaccgtcttcccgcccgccgtcgaggccttccgcgccaaggtctgccaggccgactgcttcctcttcggcgcgcccgagtacaactactccatcgccagtatgtccttcgccaccccctccctcctccctgccttgctcctcgttcgtttcagatctcctgcccgcacgcacctactgcaaggggattaacatggataaaatgctcggggtcggggggtatttctggcttctcctgcaaactttaagacgacgtttcgcttacattcattcattcagcaattaacagcattgatgccatgaagacaaattgtgcaacacaattcaatatttgatttttaaccttcagttaaaatacaattagacataggtggcaatggactctagattgtacactataaaattcaaggataggataaaattgagatgggctctatttatattcaatttttaactaaaattaattaagagctcgatcaaattgtgaagaaatgtttagatcgtgatccattaccatccttagacctcacaggcccagctcaccgagctcaccatgtgcattactgccaaattaggtgcacaatgggttgtcatggtgcattattgcatcacatcattaggatgttaggtttgtgtaattctctgccaaacaggaactcaagattacattgtcggcacactgactcagtgatggtgaaatgacctacactacctgaagaaataaaaaaaacgggggtatttgggctttaacaaaggcatgtctcccatgatgtgtatgctttcctttattcctttcttgcaaaaccttatcaacagaggagcacgtcaacattcttgacagtatatgctgttatggagtacataattccactccatttctgcatcctttacatggtctgtgtcacaactgcagcccccctgaagaacgcgcttgactgggcctctagaggaaagaactgttgggcagacaaacctgctgcgatcgtgagtgcaggcggcggctttggaggagggaggtcgcagtaccatctccgtcaggtcggggttttcctggatctccatttcatcaacaagccagaactgtgcgtccaagccttccagcagccacccaagtttgacagcgatggaaatctggtcgatgctgaaatcagagagcggctcaagaaagtgctcctatcccttcaggccttcacgctcaggcttcagaaggaggactgaatcaactcggtaccattgtagtacgtgcttccctgagaagcgtttattgctcttggaagtttgtaacgcgttgctgggtggcctggaagtttgtaataaatccaagaagtgttctcgctgaatatttaagatttgatcgcatctatatataataaagattgtgttctagcgtttttgcgtt

SEQ ID NO: 111861 - DNA, 1646 bp, Zea Mays
cgagctgagtggctgacgcacgggcctggcgtatttattggcttccccgccgcgtcgtgcacctgcaccagcaccagcacggcgaccaaccctctcccaacccgactagtcggactcgcagctccgccccaagtccaggtccaagcatggaagtcgcggcggcgtcggcgaggcccgtcctgcgcgtggctgccatctgcggctccctccgcaaggcctccttcaaccgcggcctcctccgcgccgccgcggaggtgtgcgaggactccatcccggggctccgcatcgacgagctcgacatctccgacctgcccatcatcaacaccgaccttgagaccggcagcggcagcggcaccgtcttcccgcccgccgtcgaggccttccgcgccaaggtctgccaggccgactgcttcctcttcggcgcgcccgagtacaactactccatcgccacccccctgaagaacgcgcttgactgggcctctagaggaaagaactgttgggcagacaaacctgctgcgatcgtgagtgcaggcggcggctttggaggagggaggtcgcagtaccatctccgtcaggtcggggttttcctggatctccatttcatcaacaagccagaactgtgcgtccaagccttccagcagccacccaagtttgacagcgatggaaatctggtcgatgctgaaatcagagagcggctcaagaaagtgctcctatcccttcaggccttcacgctcaggcttcagaaggaggactgaatcaactcggtaccattgtagtacgtgcttccctgagaagcgtttattgctcttggaagtttgtaacgcgttgctgggtggcctggaagtttgtaataaatccaagaagtgttctcgctgaatatttaagatttgatcgcatctatatataataaagattgtgttctagcgtttttgcgtttcccagtaaatgagaatcgattccagtagttgtctcgtcttagcaatttttttttgaattttggtgtttcagtggtgcagcgagccaaagcctatggttgtacaaatacagttgaatgaaatctaatctcgatggccagtgctgcgagccagacttcctgtagttattctccattggttattaaaacttccactgcgcatcaacttttttgtacaaactaatacgtcccagacacctctgcttctgcttttggctttggttaaattctctgaagcttgtcgccccaaagcaggaagaggaggtagcaccggtttccgctatggtatggacgaaacaagtatgggatgacagaacagcaattcctagggggagccaaatgaacagcaattcataagggctacagtgtttccaggtaggacatcttgtccacaagctgtacatgattgtggtttgtcattgactcttggatctggcgcgctcgctgctggaattatactctcctatgcattttgtgaaagactgactggatgaaaccttcttagttcatatactgtcatcatgtatccatgtggaaggagttgggtccagatccagaaggcactgttctggcttattgcataagcttgtacccttttaacattgagtaaaagatgtatatacagtagaaacacagatcgggagtagcaatatcttagacgtctttgttgatt

SEQ ID NO: 111862 - DNA, 747 bp, Zea Mays
atgattagcatggaccaccagatgttcgacgaccccttcgggagcagcggcatctcgtcgctggaggcggacatcttctccgccgccgccggcagccagctgccgtcgccgccgtggccggacttcgacgacgactacgacatccccgacctctccgcgctgcccgccaacgccgccacctcctcgggcggcggctacggctccggcggatccggcggacaccgcaagctcagccacaacgcgtacgagcgtgaccgacggaagcagctcaacgacctctactcctcgctccgctccctcctcccggacgctgaccacaccaagaagctgagcatccccaccaccgtgtcccgagtcctcaagtacatcccggagctgcagaagcaggtggacaacctggagaggaggaagcgggagctgaccaacgccaactgcaagccgggagttctcaacaccagcgagatcgtaactactcccattgtttctgctacttgcctcaacgacacggagatcatggttcaggtcagcctgcacagcaatgtggcagccacggctctccctctctccaagtgcataaaggtgctggaggacgcaggccttcacctcatcagctcatcaacctactccacctttgggaacaagacattctatagcctccatcttcagggaacagaccagccaactggtgtaaactgtgcaaaccaaaacattgttggaggtgggagagtgtatttaaaaatatactag

SEQ ID NO: 111863 - DNA, 540 bp, Zea Mays
atggcacgacgacgacggcagcagggggcagagccgcagggagaaggcgtaccgcgtcggcggcagcaggtactgctcgtgcacgcacggcgaccagctgtcgtcgccgcccagccccatgtgcctgtggtcaagatgcacctcgatgtcgtcccccttcaccagcctgtggacgtgcgttgccctgtccagctccgcggcgccgtagtagctcgcgctcatctgcatcggcggggagccgccgtgcgccgacgcgtacaggccgagcccgccggcgtcgcggagtgccacccacctgacgtccgcccgcccgccgcactccacgggggcaatgtacggcacgtgcagctcctccacgctgctctcgtacacgccgacgtgcgccgccgccttgcggtccgggtagcactcgaagggcccgcgcccgtaccacgtgacgtggctcagggacctcccggcgctgaacacgacgcccacccggggaaggggagggaggtcgctcctggggtttacctcgtagtcgagaaccacgtcgcctga

SEQ ID NO: 111864 - DNA, 447 bp, Zea Mays
gaaagagctcgtcctcctttctttcgctgttctttgggttctcggagctaattaatggaatgaaggtgtgagctcctggggatggaggggcggttacgggctctaagtgaagaacaattacgacgtaccttacctagcggctgctgcttcggccggcaaattttgttgtgctcgtggtcatggacacccttgtgttcgttaggagggggtcggggtggaacggtgaaaaggaagctgtagatagaaaaggcaggcgtctcatgctcttgttgtctagtctaatttttaattttactcggcttattaatcacggtactgactagctgcctcaaaacctgtgatggatcagttggctgctgatgttgttttcgctcagttcttttcccacaaatatgtacactcaatattcaaataaactcttttccaatatctaagatttagaatatc

SEQ ID NO: 111865 - DNA, 738 bp, Zea Mays
agcagtgcaggaagatatccggagcgtgccaaattctgtacatcacaacaatgagatagagtcagattctccacctcacgtctgtgagatagaaagtgtgaaaagcaaccaagaaggataccaatcttcggatggtagtgctttccccaagacaagatctgagcgaagtattgaccaatgggtatttgcaaagtcaaaatctgaggaaagcatggatcagtggtctgaaataccttcagatgtcgaatccttcagcgaaggtaaaagttatctcagtaacgaggagctgagtgacgttgatagtgccaacgttgttgtcatggacaaatacatggattcactcctctctgaccggaggaaccttccctgcgctagctcctcggtgcgccaggattcagtcagacgaaaacctacttcgtccgccgattacagccaccgacctctgcagccaactccacctgcatcgctgtcaaagaaggaatcgtgggatgtcattgaagattcggagttcgatatacttgacagttagtaattgatatctttgcgatctcaaggttgtttatccttctattttcttccatgtttccccacacttcacctggtttgtaaatgtggacgtgcaggtggtgtcagtgatagtgggaaaggactaatgttctttttaccaatatataataacagtgtgtgcatataaatcttctgagctcgcaagctgtgagcctcccaagttaaaagtgt

SEQ ID NO: 111866 - DNA, 156 bp, Zea Mays
atgtcgaagagcattgaaatcgccgacaaggcaatcatcttgatgcaggatcatgccaagcatatctatcgtatttgcaatgagaagctacccttgggtaaggggttgactgcatttgaggttaaggaacttcgagaaacacttgaggccatttga

SEQ ID NO: 111867 - DNA, 596 bp, Zea Mays
tcccaagtcttcttctccccagtccccacggcttctctctgtctgcaggaagcgcgtccgctgccgccggccgattcttcgtcttcacgcgcacccagggtagagcagccccaccacgcctggtcgtcctctcctctcctccactaatgcttccccatcacggctcctcttctcccgctagccgtaagtttctcctccactaatgactcgcaaacgtccgtaataaagccgccgccattaatgaccaataaagctccacctgcgtccgttagtctctcagcctcgctcctgacctataaatcgaacaccgcggatctacgtgcttgttactagcctcccttttcttttctcacgttgtctattgtgctgctcatggagccgagccaccgccgtcatcgtccttcgccgccgtgccgtttcagagcccctccgcagccggtgaagacttcctcgtgaccctggacgcccactcttccacttttctgtgctcggcactgccccggttcacctcgacaccgccagccgtgccaccatccaccctccgcacaagtaacaacaagaagctcattgtgtggtagaggatccgaatttgtttg

SEQ ID NO: 111868 - DNA, 1851 bp, Zea Mays
ctgagcacagccacgtgatcacgccatggacgccgctgtcgcgccgctcctcgcagtcgccgtccttctcttcctgggcctccggcggcgcgggggccaccgcaaccactgcccctacccgaaccccgtgctcggcaacgtggtgcccctggtccgcaacctgcaccgcttcctcgactgggccaccgaccagctcacggccgccccgtcctccaccatagaggtgcgcggcgcgctcggcctcggccgcggcgtcgccacggcggacccgggcgtcgtcaaccacatgctgcgggcgaggtttcccaactacgttaagggcgcgcgcttcgcggggcccttcggcgacctcctcggcagcggcatcttcctcgcggacggccgcctgtggagcctccagcgcaagctcgcgtcctactccttctcgtcccgctcgctgcgccgcttttcggggcgcgtcctccggggccacctgcaccgccggctccttcctcttctcgcgagtgcggctgactccggcgaggccgttgacctgcaggacgtgctcaagcgcttcgccttcgacaacatctgcggcgtcgcgttcggagtcgagggctcgacgctgctcgagctcgaggaggccggcggccggggcaggggacgaccccgccggcacgacacgttcttcgaggcgttcgacgccgccgtcgagatctccttcgcgcgcatgctccacccgaccgccgtcgtgtggaaggcgatgcagctcgctggcgtcggaagcgagaggcggctccgcgaggccatccgcatcgtcgacgagcacgtcgcggcgatcatggagtcggaggagcggtcgcgcggcgtcggcgacggaggcggctgcgacgagcagcaccttctgtcgcggttcgcggcggcgatggaggaagaggaggggagcgaactcggcgccatgttccggtcgccggaggcgaagcggcggttcctgcgggacatcgtcgtcagcttcgtgctcgccgggaaggactccacgtcctccgcgctcacatggttcttctggctcctcgccgccaacccgcgctgcgagcggcgcgtgtacgaggaggtggcgtcgctctcgctccacagatatggcgtcgacgacgaaggcggctacgacgagctcagggggctgcactacctgcacgcggcgctcaccgaggcgatgcggctgtatccgccggtgcccatcaactcgagggtggcggccgcgggggacgtgctgccggatggcacgacggtgcgcgccggctggttcgcggactactgcgcgtacgcgatggggaggatgccgcagctgtggggcgacgactgccgcgagttccgccccgagcggtggctcgatggcggaggcgagttcgtggcggtggacgcggcgaggtacccggtgttccacgccggcccgagggcgtgcctcggtaaggagatggcgtatgtgcagatgaaggccgttgtggccgccgtggtcaggaggttcgccgtggagacggtgcgggcggcaagcatggaggcgcctccgccgtacgagatgacggtgacgctgaggatgaagggcgggctgcctgtgcggataaggaggcgggagagcgacgcaggccggcactgatgatgacaggaagccgaagcagaaaaggccggctatcatgattcatgagaggaagacagagagatggagtatgcaagcaacaaagcaacacacatcgcaatggtcagccgaggaatcggagatttaaaagagacatttttcctgaaaattactgtaaaatattccccccatctatccaaaacaatgatgtaattcttacctctcaagaagccaaagttttt

SEQ ID NO: 111869 - DNA, 1357 bp, Zea Mays
actgcgtggcaatgatgggcaggtaaaagtgaaagaacgcagttgcatacatagatcatagatggggcgcactcttatcacatcaacactcgcccgaatgtcctccggctacgtttggcgagttgcttaaacatcctcaagaaaagccggattgatacgcctgccacccctccatgcgatactgtctcgcggtctctacagggttactggcctttataatccctcgtccgactataattatatcactacctctgtcgttgatgacctaaaagggagtgttatattgttgcccaagggcatctcctccagcagctatctgaaccccaggagtggcatggataaatgctgggcttgacggtgctggtgaccaagatgcaggattcactgatataaatcctattacaaagtcaggatgttgctcggcaatctttacagccgcagcagtgtagtctccataagcaaggttgccagctgagctcatttcagcaagcaaaagtaggccccttcctttaggcaaacccttcaatgccagaagacaacagtgactgtgagcaacgcaatgcatgagctattagcagctgcaaattaactattatctttaactcagtaattgtgtaagacctatgcatatatgtcatgaaataccttgagcttcaagccatctacaatcccaggtccaggaactatatgcgcattaataatatccgcccagtctaagatgcggaatatacctctgaaccgaagtaaagaaaatgccaactatgtcacacaaatgtatgtataagaaggaaaataaattaaatagttatagttcctttttctcacccttcagattgcatagttactgtgttcccaatgtcagcaaacttgcggtcttcaaagatcagaaagttgtgcttcccagcaatcttcaattgaaagttaagaatcagcacaatactgaatcagctatgcggtaaccagatgcagagtataacttcagcaatcggaacaggaatacacaaaacgcctctagtaatgaataaaataaaatcaagctaaaagaaccaagtaaattggcctggtatagggattttgcctttcatttatggacaacccattccgattacacataatgatactgtgtatacatgataatgaaagcaccgacatctgatttgaaacaaagtacaacttcaggactctaactgggcgattatggacactgacatccttatgatcagtaacactacaacaaaaagataaggaaactgctgtcagaagagaacatactgtgcgaaggttggccccaaaatctggtgtaaaatcagacaagatatcaacatgtgttttcagcatacaaatctctggaccaacc

SEQ ID NO: 111870 - DNA, 2624 bp, Zea Mays
gaacccatcgtctcacggacgccgaacccagaagccgccgacccctttcccgccgcacggatccaaaaccctagcccctcctcggcgtttttcccctcccggcgacggcgaggcggcggagatgatgcggcagcagcagcagcagcttccacctccgccgcagcacccgccgccccaagcctcctccgccgccggtggcggcggcggtggcgagttctaccgcggcccgccgatgcggcagctgtccgcggcgtcctccaccaatctcccgcccgactacgccgcacacccggcccccccgtcacagcagcagcatcagcctccttacgacgcttatggtgacagttttggtgctaaaaggatgcggaagcctgtccagcgacgaacagtggactacacaagcagtgttgtccgttatgttcaggctcgcatgtggcagcgggacgctagggatagattcacattgcagccaactccagcagctgtcctggatatgttaccttctgtcgcatatccagacaatccctcaacaagttttgctgccaaatttgtacattcgtcaatcaataagaaccggtgctctattaatcgtgtcttgtggacccctacaggccgtcgacttatcactggatcacaaagtggtgaatttacgctatggaatgggcaatcttttaactttgaaatgatacttcaggctcatgatctacctgtgagatcaatggtttggagtcacaatgaaaactggatggtgacgggagatgatggtggtgcaatcaagtattggcaaagtaacatgaacaacgtcaaagtgaataaaacagctcatagagaatcagttcgtggtttaagtttttccaggacagacttaaaattctgctcctgctccgatgaccgaacagtgaaggtttgggacttcgcaagatgccaagaggaaaaatcattaactggccacggttgggatgttaaaactgtcgattggcatcctacaaagtctttactggtttcaggtggcaaagactatcttgtgaaactttgggatgcaaaaagtggcagagagctgagctcattccatggtcataaaaatattgtgcattgcgtgaagtggaatcagaatgggaactgggtactgactgcctcgaaggatcagattattaagctgtatgatattagatccatgaaagagctgcaatccttccgtgggcacaccaaggacgtcactgcattggcgtggcacccatttcatgaagaatattttgttagtgggagctttgatggagctatatttcattggttagtcggccatgaagctccacagattgaaataagtaatgcacatgacagtagtgtctgggatctttcgtggcatcctgtaggctatctactttgcagtggaggcaatgatcacgctacaaagttctggtgtagaaacaggcctggtgatcttacccgtgatagatacaacagtggccaaatgcaaggttttggtgaccaacatgctgcttttggtgctcgtggtatgggtggattccagatgcctgaacctccaataacgcctggaccatttgctcctggattgtcacgcaatgaaggtaccatccctggcattggggttgcaatgaccttggcaggccagtcttttgatggatctgatggagagcagaggccatctattccgggtcttccacctgggcaacccccgctgccaccaggtcctcatccatcacttcttgggcagcaacaacagtatcaacagatacctcagcagcaacatccccagttttcgcagccaccacctccgaacatgccccaactgcaggcaccagctcacatgctttcacattcacaaggatctcggcctactcttccccagcttccaccaatgggtggaccatcagtgccatcacaagtgaacccaccgcttccgcctatgcctcacccaacgagtcagatgatgccccaaatgccacagcacatgatgggcctaaatcagatgcatgctggttctgtgcctcctggtactgtacccccaatgggtgggttcccaagtgggatgggaaacatccaaggagcatcaggttcgtctggcgtacaaaattttcctatgggtggcatgtataatcggcctcagggacaaatggctccacaagggcaaatgacatccattcctggtctaagctcttaccagggaatgggtaatgttggccttacaccgccaccgccacagcacccgccgcctcgaggaggctcggcaacacagtgaccatccctggagcaaaacaaggattgtactgaacctaaactttctcgtgacactaaatttgtagcatgtaaatccatctcgagcaatatcagcgtgtctagactcccgcaaatcacgagggatttcttcacgattattgctcaggcagctaggatttttgctatctcgtgctgtggtttacaactgggggccttctgtcatgtgcctcatttgtactgtaattcgaatcgtgcctttacttgccggctgcttagatgttgaacatagagaattctttccctcagttttgagaagcgtgaacttcacttgtgccagttattgcatgtgtactttacgagttgttgacagacgatggcagtcaata

SEQ ID NO: 111871 - DNA, 2642 bp, Zea Mays
gaacccatcgtctcacggacgccgaacccagaagccgccgacccctttcccgccgcacggatccaaaaccctagcccctcctcggcgtttttcccctcccggcgacggcgaggcggcggagatgatgcggcagcagcagcagcagcttccacctccgccgcagcacccgccgccccaagcctcctccgccgccggtggcggcggcggtggcgagttctaccgcggcccgccgatgcggcagctgtccgcggcgtcctccaccaatctcccgcccgactacgccgcacacccggcccccccgtcacagcagcagcatcagcctccttacgacgcttatggtgacagttttggtgctaaaaggatgcggaagcctgtccagcgacgaacagtggactacacaagcagtgttgtccgttatgttcaggctcgcatgtggcagcgggacgctagggatagattcacattgcagccaactccagcagctgtcctggatatgttaccttctgtcgcatatccagacaatccctcaacaagttttgctgccaaatttgtacattcgtcaatcaataagaaccggtgctctattaatcgtgtcttgtggacccctacaggccgtcgacttatcactggatcacaaagtggtgaatttacgctatggaatgggcaatcttttaactttgaaatgatacttcaggctcatgatctacctgtgagatcaatggtttggagtcacaatgaaaactggatggtgacgggagatgatggtggtgcaatcaagtattggcaaagtaacatgaacaacgtcaaagtgaataaaacagctcatagagaatcagttcgtggtttaagtttttccaggacagacttaaaattctgctcctgctccgatgaccgaacagtgaaggtttgggacttcgcaagatgccaagaggaaaaatcattaactggccacggttgggatgttaaaactgtcgattggcatcctacaaagtctttactggtttcaggtggcaaagactatcttgtgaaactttgggatgcaaaaagtggcagagagctgagctcattccatggtcataaaaatattgtgcattgcgtgaagtggaatcagaatgggaactgggtactgactgcctcgaaggatcagattattaagctgtatgatattagatccatgaaagagctgcaatccttccgtgggcacaccaaggacgtcactgcattggcgtggcacccatttcatgaagaatattttgttagtgggagctttgatggagctatatttcattggttagtcggccatgaagctccacagattgaaataagtaatgcacatgacagtagtgtctgggatctttcgtggcatcctgtaggctatctactttgcagtggaggcaatgatcacgctacaaagttctggtgtagaaacaggcctggtgatcttacccgtgatagatacaacagtggccaaatgcaaggttttggtgaccaacatgctgcttttggtgctcgtggtatgggtggattccagatgcctgaacctccaataacgcctggaccatttgctcctggattgtcacgcaatgaaggtaccatccctggcattggggttgcaatgaccttggcaggccagtcttttgatggatctgatggagagcagaggccatctattccgggtcttccacctgggcaacccccgctgccaccaggtcctcatccatcacttcttgggcagcaacaacagtatcaacagatacctcagcagcaacatccccagttttcgcagccaccacctccgaacatgccccaactgcaggcaccagctcacatgctttcacattcacaaggatctcggcctactcttccccagcttccaccaatgggtggaccatcagtgccatcacaagtgaacccaccgcttccgcctatgcctcacccaacggcaatgcatggttcacagagtcagatgatgccccaaatgccacagcacatgatgggcctaaatcagatgcatgctggttctgtgcctcctggtactgtacccccaatgggtgggttcccaagtgggatgggaaacatccaaggagcatcaggttcgtctggcgtacaaaattttcctatgggtggcatgtataatcggcctcagggacaaatggctccacaagggcaaatgacatccattcctggtctaagctcttaccagggaatgggtaatgttggccttacaccgccaccgccacagcacccgccgcctcgaggaggctcggcaacacagtgaccatccctggagcaaaacaaggattgtactgaacctaaactttctcgtgacactaaatttgtagcatgtaaatccatctcgagcaatatcagcgtgtctagactcccgcaaatcacgagggatttcttcacgattattgctcaggcagctaggatttttgctatctcgtgctgtggtttacaactgggggccttctgtcatgtgcctcatttgtactgtaattcgaatcgtgcctttacttgccggctgcttagatgttgaacatagagaattctttccctcagttttgagaagcgtgaacttcacttgtgccagttattgcatgtgtactttacgagttgttgacagacgatggcagtcaata

SEQ ID NO: 111872 - DNA, 2500 bp, Zea Mays
cctttcccgccgcacggatccaaaaccctagcccctcctcggcgtttttcccctcccggcgacggcgaggcggcggagatgatgcggcagcagcagcagcagcttccacctccgccgcagcacccgccgcccgactacgccgcacacccggcccccccgtcacagcagcagcatcagcctccttacgacgcttatggtgacagttttggtgctaaaaggatgcggaagcctgtccagcgacgaacagtggactacacaagcagtgttgtccgttatgttcaggctcgcatgtggcagcgggacgctagggatagattcacattgcagccaactccagcagctgtcctggatatgttaccttctgtcgcatatccagacaatccctcaacaagttttgctgccaaatttgtacattcgtcaatcaataagaaccggtgctctattaatcgtgtcttgtggacccctacaggccgtcgacttatcactggatcacaaagtggtgaatttacgctatggaatgggcaatcttttaactttgaaatgatacttcaggctcatgatctacctgtgagatcaatggtttggagtcacaatgaaaactggatggtgacgggagatgatggtggtgcaatcaagtattggcaaagtaacatgaacaacgtcaaagtgaataaaacagctcatagagaatcagttcgtggtttaagtttttccaggacagacttaaaattctgctcctgctccgatgaccgaacagtgaaggtttgggacttcgcaagatgccaagaggaaaaatcattaactggccacggttgggatgttaaaactgtcgattggcatcctacaaagtctttactggtttcaggtggcaaagactatcttgtgaaactttgggatgcaaaaagtggcagagagctgagctcattccatggtcataaaaatattgtgcattgcgtgaagtggaatcagaatgggaactgggtactgactgcctcgaaggatcagattattaagctgtatgatattagatccatgaaagagctgcaatccttccgtgggcacaccaaggacgtcactgcattggcgtggcacccatttcatgaagaatattttgttagtgggagctttgatggagctatatttcattggttagtcggccatgaagctccacagattgaaataagtaatgcacatgacagtagtgtctgggatctttcgtggcatcctgtaggctatctactttgcagtggaggcaatgatcacgctacaaagttctggtgtagaaacaggcctggtgatcttacccgtgatagatacaacagtggccaaatgcaaggttttggtgaccaacatgctgcttttggtgctcgtggtatgggtggattccagatgcctgaacctccaataacgcctggaccatttgctcctggattgtcacgcaatgaaggtaccatccctggcattggggttgcaatgaccttggcaggccagtcttttgatggatctgatggagagcagaggccatctattccgggtcttccacctgggcaacccccgctgccaccaggtcctcatccatcacttcttgggcagcaacaacagtatcaacagatacctcagcagcaacatccccagttttcgcagccaccacctccgaacatgccccaactgcaggcaccagctcacatgctttcacattcacaaggatctcggcctactcttccccagcttccaccaatgggtggaccatcagtgccatcacaagtgaacccaccgcttccgcctatgcctcacccaacggcaatgcatggttcacagagtcagatgatgccccaaatgccacagcacatgatgggcctaaatcagatgcatgctggttctgtgcctcctggtactgtacccccaatgggtgggttcccaagtgggatgggaaacatccaaggagcatcaggttcgtctggcgtacaaaattttcctatgggtggcatgtataatcggcctcagggacaaatggctccacaagggcaaatgacatccattcctggtctaagctcttaccagggaatgggtaatgttggccttacaccgccaccgccacagcacccgccgcctcgaggaggctcggcaacacagtgaccatccctggagcaaaacaaggattgtactgaacctaaactttctcgtgacactaaatttgtagcatgtaaatccatctcgagcaatatcagcgtgtctagactcccgcaaatcacgagggatttcttcacgattattgctcaggcagctaggatttttgctatctcgtgctgtggtttacaactgggggccttctgtcatgtgcctcatttgtactgtaattcgaatcgtgcctttacttgccggctgcttagatgttgaacatagagaattctttccctcagttttgagaagcgtgaacttcacttgtgccagttattgcatgtgtactttacgagttgttgacagacgatggcagtcaata

SEQ ID NO: 111873 - DNA, 1016 bp, Zea Mays
cttgtgatgctgcggggctggcgacaaccaccagcagcatcgaagacaggaggagaaaggagaggtggtggggcgatggcagcgactgcggcggagggggtggccgcgacggcgctgcgagccgtgctggggcgggcgggtatggcggcggagcggtcggggtgcgccgcggaggcggtacgggttgtggcggtggggaagaccaagcctgtttcgatgctgcggcagctatacgacgcgggccaccgctgcttcggcgagaactacgtgcaggagttcgtcaccaaggccccccagcttccgcaagatacccggtggcattttatcgggcacctgcagagcaacaaagtgaaaccactgttagctgctgttccaaatcttgatatggttgagggcgtagacaatgaaaagattgctaaccacctagatcgagctgtcaacagtttgggaaggcagcctttgaaagttttggttcaagtgaacactagtggagaagaatctaaatctggaatcgatccctccaaatgtgtcgaccttgctaagcatgtgaaactagcatgcccacacctaatattttcaggtctgatgacaataggtatgaaagactactcgtcaacaccagaaaattttaaggcattggttaattgtaagcttgaagtttgcaaggcccttgacataccaacagaacagtttgaactctccatgggaatgtctggtgactttgagcaagcgattgagatgggcagcacgaatgtgaggattggatcaaccatttttggaccaagggagtatccaaacaaaaggcagaactagtgagattcaacgcataagtgtcatctcaatacccagtcctcttgattaaccttttgcctatgtaagcatgatgctatgtataaatgcacatgtgaataggtaacatgtacaacctcatacaacactgtttgcagggggaggggggggaactctccatacaacagtacggcactgtataagaaattttgtgacatggccttgaa

SEQ ID NO: 111874 - DNA, 1372 bp, Zea Mays
cccttctccgcaaaccgtttcgcatctccgctacccccagccaagtcgctcccggtggctccgttctccgcgccttcgttccccctcggttttcctgctgtttcgcctcggtcctgcttgctggtgctgcagatctgcgttcgccggccccttctccctgctatcgcatgccagccaggcgcccacgggcacggccagcccccaccccacaggcgtggcactgcccctgtccggctgttccttgcttttgcttgcctgtgcctgctcctgttgggcttcggcacctgcacagaggagacagaggtatacagagccacgcagccaaggatttcgaattcgtgacttgttggagtttctgaatggccagcccaggggatgcggagggcatcaccatctccatgggggagctgagcgtagaagcagcgacttcgtcagctaacggcggtggtgatgttgccgctgtcgaccaggatgatgtgtgggaagatgtttcagattctcatgggcacgcgtctaccttagacagagaatggatccacaggcagaaccagtttcaaaagatgggctatcgggacggaataacacaagggcagaaggactctgcccaggaaggcttcaatgctgggttcaggcaatctgtaaacgctggctacaagtggggccttgttcgcggggttgccaggtgtatatccttccaagaactgatctcttgtattgccattctcctctagtcttgccctccgattttgatttcctttcctatctgtcgtcattccaaagtagtgcgctagccaatcttccagacagcttgaaagagaaactggtgccggacgtccagtgcagagggaaactacaggatctgcacagctccgtgcgagaaatatcagcagatgacgctctccagatgttccacgagagtatccgccagagtaaccctccgtcagaggggtcaggatcatatgtagtagcatcagccaccgatggagctacggaaccaaacaggatgaaaagcctaccgaaggatctcgtgttgttgctgcgtgaatgctcggatatcaaagtcagcaaggagttggcgtgggattcatgaacaaggcgactcagaaattccaaccactacaagtgtggcagaatcacactgagttcccagattactgaacgcctacctgggctgatggatgaatgtgattcggggattttgttttggaagtgactgagatactcgaaaggttcagggacctcgaatcgaatgtgtctgtagtaatgcagatttttattccatatttcccttttttttgctgcaacctgtaactagaattgtaactataaatttgcagttcttaaacaattgtaatgtttttttttctctccc

SEQ ID NO: 111875 - DNA, 1342 bp, Zea Mays
cccttctccgcaaaccgtttcgcatctccgctacccccagccaagtcgctcccggtggctccgttctccgcgccttcgttccccctcggttttcctgctgtttcgcctcggtcctgcttgctggtgctgcagatctgcgttcgccggccccttctccctgctatcgcatgccagccaggcgcccacgggcacggccagcccccaccccacaggcgtggcactgcccctgtccggctgttccttgcttttgcttgcctgtgcctgctcctgttgggcttcggcacctgcacagaggagacagaggtatacagagccacgcagccaaggatttcgaattcgtgacttgttggagtttctgaatggccagcccaggggatgcggagggcatcaccatctccatgggggagctgagcgtagaagcagcgacttcgtcagctaacggcggtggtgatgttgccgctgtcgaccaggatgatgtgtgggaagatgtttcagattctcatgggcacgcgtctaccttagacagagaatggatccacaggcagaaccagtttcaaaagatgggctatcgggacggaataacacaagggcagaaggactctgcccaggaaggcttcaatgctgggttcaggcaatctgtaaacgctggctacaagtggggccttgttcgcggggttgccagtgcgctagccaatcttccagacagcttgaaagagaaactggtgccggacgtccagtgcagagggaaactacaggatctgcacagctccgtgcgagaaatatcagcagatgacgctctccagatgttccacgagagtatccgccagagtaaccctccgtcagaggggtcaggatcatatgtagtagcatcagccaccgatggagctacggaaccaaacaggatgaaaagcctaccgaaggatctcgtgttgttgctgcgtgaatgctcggatatcaaagtcagcaaggagttggcgtgggattcatgaacaaggcgactcagaaattccaaccactacaagtgtggcagaatcacactgagttcccagattactgaacgcctacctgggctgatggatgaatgtgattcggggattttgttttggaagtgactgagatactcgaaaggttcagggacctcgaatcgaatgtgtctgtagtaatgcagatttttattccatatttcccttttttttgctgcaacctgtaactagaattgtaactataaatttgcagttcttaaacaattgtaatgtttttttttctctccctgaattctgtcatcttcctgaacaatggtcttcatgtggaagtatagtattttgccacgttttgagccgac

SEQ ID NO: 111876 - DNA, 1345 bp, Zea Mays
cccttctccgcaaaccgtttcgcatctccgctacccccagccaagtcgctcccggtggctccgttctccgcgccttcgttccccctcggttttcctgctgtttcgcctcggtcctgcttgctggtgctgcagatctgcgttcgccggccccttctccctgctatcgcatgccagccaggcgcccacgggcacggccagcccccaccccacaggcgtggcactgcccctgtccggctgttccttgcttttgcttgcctgtgcctgctcctgttgggcttcggcacctgcacagaggagacagaggtatacagagccacgcagccaaggatttcgaattcgtgacttgttggagtttctgaatggccagcccaggggatgcggagggcatcaccatctccatgggggagctgagcgtagaagcagcgacttcgtcagctaacggcggtggtgatgttgccgctgtcgaccaggatgatgtgtgggaagatgtttcagattctcatgggcacgcgtctaccttagacagagaatggatccacaggcagaaccagtttcaaaagatgggctatcgggacggaataacacaagggcagaaggactctgcccaggaaggcttcaatgctgggttcaggcaatctgtaaacgctggctacaagtggggccttgttcgcggggttgccagtagtgcgctagccaatcttccagacagcttgaaagagaaactggtgccggacgtccagtgcagagggaaactacaggatctgcacagctccgtgcgagaaatatcagcagatgacgctctccagatgttccacgagagtatccgccagagtaaccctccgtcagaggggtcaggatcatatgtagtagcatcagccaccgatggagctacggaaccaaacaggatgaaaagcctaccgaaggatctcgtgttgttgctgcgtgaatgctcggatatcaaagtcagcaaggagttggcgtgggattcatgaacaaggcgactcagaaattccaaccactacaagtgtggcagaatcacactgagttcccagattactgaacgcctacctgggctgatggatgaatgtgattcggggattttgttttggaagtgactgagatactcgaaaggttcagggacctcgaatcgaatgtgtctgtagtaatgcagatttttattccatatttcccttttttttgctgcaacctgtaactagaattgtaactataaatttgcagttcttaaacaattgtaatgtttttttttctctccctgaattctgtcatcttcctgaacaatggtcttcatgtggaagtatagtattttgccacgttttgagccgac

SEQ ID NO: 111877 - DNA, 1240 bp, Zea Mays
ctccgctacccccagccaagtcgctcccggtggctccgttctccgcgccttcgttccccctcggttttcctgctgtttcgcctcggtcctgcttgctggtgctgcagatctgcgttcgccggccccttctccctgctatcgcatgccagccaggcgcccacgggcacggccagcccccaccccacaggcgtggcactgcccctgtccggctgttccttgcttttgcttgcctgtgcctgctcctgttgggcttcggcacctgcacagaggagacagaggttggagtttctgaatggccagcccaggggatgcggagggcatcaccatctccatgggggagctgagcgtagaagcagcgacttcgtcaggatgatgtgtgggaagatgtttcagattctcatgggcacgcgtctaccttagacagagaatggatccacaggcagaaccagtttcaaaagatgggctatcgggacggaataacacaagggcagaaggactctgcccaggaaggcttcaatgctgggttcaggcaatctgtaaacgctggctacaagtggggccttgttcgcggggttgccagtgcgctagccaatcttccagacagcttgaaagagaaactggtgccggacgtccagtgcagagggaaactacaggatctgcacagctccgtgcgagaaatatcagcagatgacgctctccagatgttccacgagagtatccgccagagtaaccctccgtcagaggggtcaggatcatatgtagtagcatcagccaccgatggagctacggaaccaaacaggatgaaaagcctaccgaaggatctcgtgttgttgctgcgtgaatgctcggatatcaaagtcagcaaggagttggcgtgggattcatgaacaaggcgactcagaaattccaaccactacaagtgtggcagaatcacactgagttcccagattactgaacgcctacctgggctgatggatgaatgtgattcggggattttgttttggaagtgactgagatactcgaaaggttcagggacctcgaatcgaatgtgtctgtagtaatgcagatttttattccatatttcccttttttttgctgcaacctgtaactagaattgtaactataaatttgcagttcttaaacaattgtaatgtttttttttctctccctgaattctgtcatcttcctgaacaatggtcttcatgtggaagtatagtattttgccacgttttgagccgac

SEQ ID NO: 111878 - DNA, 1275 bp, Zea Mays
ctccgctacccccagccaagtcgctcccggtggctccgttctccgcgccttcgttccccctcggttttcctgctgtttcgcctcggtcctgcttgctggtgctgcagatctgcgttcgccggccccttctccctgctatcgcatgccagccaggcgcccacgggcacggccagcccccaccccacaggcgtggcactgcccctgtccggctgttccttgcttttgcttgcctgtgcctgctcctgttgggcttcggcacctgcacagaggagacagaggttggagtttctgaatggccagcccaggggatgcggagggcatcaccatctccatgggggagctgagcgtagaagcagcgacttcgtcagctaacggcggtggtgatgttgccgctgtcgaccaggatgatgtgtgggaagatgtttcagattctcatgggcacgcgtctaccttagacagagaatggatccacaggcagaaccagtttcaaaagatgggctatcgggacggaataacacaagggcagaaggactctgcccaggaaggcttcaatgctgggttcaggcaatctgtaaacgctggctacaagtggggccttgttcgcggggttgccagtgcgctagccaatcttccagacagcttgaaagagaaactggtgccggacgtccagtgcagagggaaactacaggatctgcacagctccgtgcgagaaatatcagcagatgacgctctccagatgttccacgagagtatccgccagagtaaccctccgtcagaggggtcaggatcatatgtagtagcatcagccaccgatggagctacggaaccaaacaggatgaaaagcctaccgaaggatctcgtgttgttgctgcgtgaatgctcggatatcaaagtcagcaaggagttggcgtgggattcatgaacaaggcgactcagaaattccaaccactacaagtgtggcagaatcacactgagttcccagattactgaacgcctacctgggctgatggatgaatgtgattcggggattttgttttggaagtgactgagatactcgaaaggttcagggacctcgaatcgaatgtgtctgtagtaatgcagatttttattccatatttcccttttttttgctgcaacctgtaactagaattgtaactataaatttgcagttcttaaacaattgtaatgtttttttttctctccctgaattctgtcatcttcctgaacaatggtcttcatgtggaagtatagtattttgccacgttttgagccgac

SEQ ID NO: 111879 - DNA, 771 bp, Zea Mays
attagtgccatcagccacggcgagcaagcgatgatgagcggcggcgcggtgaaggtgatcggcgccctggacagcccattcagccaccgcgcggaggcggcgctgcgcctcaagggagtcccctacgagcttgtcctggagaaggacctgcgcgacaaaagcgagctgctgctgcggcacaaccccgtccacaagaaggtgcccgtgctccttcacggcggccgccgcaccgtctgcgagtcgctcgtcatcgtcgagtacgtcgacgaggcattccgcggcccgccgctcctccccgccgacccctccgcccgcgccgccgcccgcttctgggcccgcttcatcgacgacaagtgctcgacgcccttctggctggcgatgtggacggagggcgaggcgcagagggggttcgtgaaggagatcaaggagaacctgaagctgctggaggggcaggtgaagggcaagcggttcttcggcggcggcgacgtgggctacctcgacgtcgccgccagcgtgttcgcgcactggcttccggtctgcgaggaggtcgcgggcgtcagcctggtcacggccgaggagtacccggacctgtgccggtgggcgagggagtacacctcccacgacgccgtcaagcggtgcctgcctggcagggaggagctgctcgcccgtttcagcgccaggaaggactcgtttgtggccgcggcgaggtcaatggcgcatggatagcataaatttaagtattgtgacaagtggtcaggactgctgtcacgt

SEQ ID NO: 111880 - DNA, 974 bp, Zea Mays
gcgcatttaacaagtgcagagcaggagtggcaaagctcgtagtacatcacgagtgctccaaacaaatagagttttccttcaccgagccagacccagaagaaggggagccggaggtagaaagaccagagaagatggcgaccaccgagccggcggcggtgaggctggtgggctccttcgccagcccgttcgtccaccgcgccgaggtggccctgcgcctcaaaggggtgccctacgagctcatcctggaggacctggccaacaagagcgagctgctgctggcacacaaccccgtgcacaaactcgtgcccgtgctcctccacggcgacagggccatctccgagtcgctcgtcatcctcgagtacgtcgacgaggccttcgacgggccgcctctcctccccgcggaaccccacgcgagggcggacgcgcggttctgggcccacttcatcgaccaaaagttcgcgcggccgttctggatgtcgttctggacggacgacgaggagcgcagggaggctatggcgaaggaggccaaggagaacctggctctgctcgaggcgcagctcagggggcagaggttcttcggcggcgaggccatcggcttcgtcgacatcgccgcctgtgcgctggcgcactgggtcggggtcatcgaggaggccgccggggtggtcctcgtcggcggcgaggagttcccagcgctccgcgagtgggccgacgcctacatcaacgacgccaccgtgaaggcgtgaagcagtgcttgaggagccgcgacgagctcgtcgattacttctcctccaggaaggagatgtacttgctgcgagcgagggccactccgcgcagctgatctggacccatgtttccttccgttcgcaataagccaataataaagactagtttggtaacccatttttctaaactgaaacattcagttcagtcgagctagctctcagacgccatgcgcgacacgcatttcgcattag

SEQ ID NO: 111881 - DNA, 91 bp, Zea Mays
gtacaatataagaattgcagtcacttcacacagtcgaatgagtttgtatgtccctgtgatcatatctatggtgatctattgcctggtccaa

SEQ ID NO: 111882 - DNA, 1718 bp, Zea Mays
gacggattccagccgaaccccctcgcagtggcagccccctcacgccccgcgacatgggcaagatcaggatgcccgtgccgttcctgttccgccgccgctcctccaagccgccgccgccgcagccgcagcagcaggcgcctgccgcgggcgacggcgacggcagcgggtccccggagcgggcgacggcggaggaggagatggcgcgcgtgttccgcaagttcgacgcgaacggcgacgggcggatctcgcggtcggagctggcggcgctgttcgagagcctgggccacggcgcgtcggacgacgaggtggcgcgcatgatggccgaggcggacgcggacggcgacggcttcatcagcctgcccgagttcgcggccctcaacgccacggtggccggcgacgcggccgccgtcgaggaggacctgcgccacgccttccgcgtcttcgacgccgacggcagcggcgccatctccgccgccgagctcgcgcgcgtcctccgcagcctcggcgagcccgcctccgtcgcgcagtgccgccgcatgatcgagggcgtcgaccagaacggcgacggcctcatctccttcgacgagttcaaggtcatgatggccaggggaggagcatgcttcgcaaagatcgcctaggaatattcttgcgaaggtggggaggagcttgaggaattgtcctgattgcgtacctatcaatcattggcatcatcagggcgcgatgggagctcgaatctcttcattagtttatatctactggttggaattggaagcagaacatgcggaggccttgggttgcatctgtctgctccagtatactagtagaagatacgtacgtacacctgtcataggaaatcctgtcacaggttgcgtagtattactactaaatagttgtatgttttggtagggatacttaattctagtccttagagaactgtttagcgcggctcatgggatggatgacagacagaaacagctgatgactagcgttggctgcttggctccaatccaaggaagcgtgcgtcagccactcacatgtgtgctcgtggtttacgcggtgagtatctgtgctgtgccacctggatccaatttggcaccgtgcattgcatccgattccgaaccaactctcgtcaagttcggcatcatcaattcatcatcatctctacgaacaaatatgtggctcgcgtgcctccgagttgcggtgtgttgacgcttgacgggtaccatccgcatcgttgttgacgatgccagttgggccaacaacggaagggctgatgcgcagcctgccgctgagcccagcccaaatgtacaacacggaccgggggaatggacagagatgggctgcaattagaggtgataatggatcacgattcacaaattgtttgagctattaactagttttagtttaaaaataaatagaaatcttagctcatacatcactccaccaaaacatcagtgctataagactagctcatacatcactcgtgctataagactagctccaccaaggagctctaaagggtcctgtaccctaaatttagaggacgaggtcctctactccctccaacagtgtagtctaaacggtcctctaaatttagaggacgttgttggatcctctatatataaagtttctataaacggttctctatttatttgaatactttaaacaatcggtttagtaaaactaaaatatgtacaatacatttggtagtatgacaa

SEQ ID NO: 111883 - DNA, 894 bp, Zea Mays
atgggcaagatcaggatgcccgtgccgttcctgttccgccgccgctcctccaagccgccgccgccgcagccgcagcagcaggcgcctgccgcgggcgacggcgacggcagcgggtccccggagcgggcgacggcggaggaggagatggcgcgcgtgttccgcaagttcgacgcgaacggcgacgggcggatctcgcggtcggagctggcggcgctgttcgagagcctgggccacggcgcgtcggacgacgaggtggcgcgcatgatggccgaggcggacgcggacggcgacggcttcatcagcctgcccgagttcgcggccctcaacgccacggtggccggcgacgcggccgccgtcgaggaggacctgcgccacgccttccgcgtcttcgacgccgacggcagcggcgccatctccgccgccgagctcgcgcgcgtcctccgcagcctcggcgagcccgcctccgtcgcgcagtgccgccgcatgatcgagggcgtcgaccagaacggcgacggcctcatctccttcgacgagttcaaggtcatgatggccaggggaggagcatgcttcgcaaagatcgcctaggaatattcttgcgaaggtggggaggagcttgaggaattgtcctgattgcgtacctatcaatcattggcatcatcagggcgcgatgggagctcgaatctcttcattagtttatatctactggttggaattggaagcagaacatgcggaggccttgggttgcatctgtctgctccagtatactagtagaagatacgtacgtacacctgtcataggaaatcctgtcacaggttgcgtagtattactactaaatagttgtatgttttggtagggatacttaattctagtccttagagaactgtttagcgcggc

SEQ ID NO: 111884 - DNA, 331 bp, Zea Mays
tctttgatattgtccttcaagatattgatctaatgcaatgcatttgatcttgtcattaacttcagtttttttctaaccaggcaaagagtgcattatggacaacatccaaatcacaatttgcgttcttagtgaacttgtttcctaccctcacatgatggttgtgcaggagacaacattacaatgtttagtagccttttcgacgtttcctcacccaaagatttatcatgtgcggcgaaaggttgtgcaggcagcaatcagggctctcgacgataagaaacaggttgttcgtcaagtggttgtccgatgccggcacacatggtgcgaacatttt

SEQ ID NO: 111885 - DNA, 742 bp, Zea Mays
gagagagagagaaaaggaggggagagaggcacacaacgctgctgtgctgcacacacaaacaagtagcagtagtggaagaagcgaagggatcggaggaggagaggagaggaagtgtggccggtgacagacagaagagaagaagaagaacaagaagagatgatggtggtggtgaaaagagacggggatgatgcagcacaggcggtggcggcttcagtttgagcagctgcgtgcagaagctgagccaagaaagcaagcagcaggggacctcttccagtcccccccctgactctcccagccagccgccagcaggctcagtcgtacaagcagcaagcaccaaagcgatagatcgagatgctctccgtccatgctggtccccctcgcgcgcctctccactcccccctctctctctctctttctctgatccatccacccaattcgccagctccgccgccaccctagctagctagcagctagagtacagaagcggaaggtagaccgctcggaggcgggaggaaggtcgaccgacacgagtagagtcgagcaggccggcacagcagcttgcctctcgaccggcggcggccatggaggacaccctcaagtcgctgtccatggactacctcaacctgctcatcaacgggcaggccttcagcgacgtcacgttcagcgtggagggccgcctggtgcacgcgcaccgctgcatcctggccgcgcgcagcctcttcttccgcaagtcttctgcgga

SEQ ID NO: 111886 - DNA, 1565 bp, Zea Mays
gccggcggcgcgggagcctccgcggcagcggcgccgggcgccgtcatacccgtcaactccgtcagctacgaggtgttcctgctgctgctgcagttcctctacagcggccaggtgtccctggtgccgcagaagggggatccccggccgggctgcggcgagcgcgcgtgctggcacacgcactgcgccgccgccgtcgacctcgcgctcgacacgctcgccgccgcacgctccttcggggtcgaggagctcgcgctgctcacccagaagcagctggccggcatggtggagaaggcgtcgatcgaggacgtgatgaaggtgctgatggcgtcgcggaagcaggacctgcaccagctgtggaccacgtgctcccacctcgtggccaagtccgggctcccccctgaggtgctggacaagcacctccccatcgacgtggtggccaagatcgtggagctccgcctcaagtcctcgatgtcccgccgctcgccgttcctcgcgcaccaccacccgcaccaccacccggcggcgggcggcatggaggcctcgtccgcggccgacatcgacgagcaccacaagatccgccgcatgcgccgcgcgctcgactcctccgacgtggagctggtgaagctgatggtgatgggcgaagggctgaacctggacgaggcgctcgcgctgcactacgccgtggagaactgcagccgggaggtggtgaaggcgctgctggagctcggcgccgccgacgtgaaccacccggccggccccgccgggaagacgccgctgcacgtcgccgccgagatggtgtgcccggacatggtcgccgtgctgctagaccaccacgccgaccccaacgtgcgcaccgtggagggcgtgacgccgctggacatcctccgcacgctcacctccgacttcctgttcaagggcgccgtgccggggctggcgcacgtggagcccaacaagctccggctctgcctcgagctggtgcagtcggcggccatggtcatgtcccgcgaggacgcgcacacggcggtcaaccccgcggccgcgcccatgtacggcgagccttccggaggcggcgccgtgtacagcgcgagcggcaccagctcgagcatggtgaacctcagcctggacaacaggatggtgtatctgaacctagggatggacgcgcagttcggcaagatggacgacggcggcgacggtgatgacggcgggggcagagggcaagggggcccgccttctttgttctccccgcatggctaccattgacacaagctggccggagcggctgctgctctacgactatctctccttgtaagctttagaactaattaattacatgttgttattcatatccacattacaggagatgatgatgatggtgagataatccgtttggccctctatcatcctctgagccttttaattagcagagccgattagagagagatcacgcaaatgcatgcatgcagagtgatgcatcgtcatcacaagagtatgcatggatcttggtgagttgcctactccagttgttgtagcatgcggcgccgggggggcgttgtctgggacatttt

SEQ ID NO: 111887 - DNA, 1394 bp, Zea Mays
ctgagtgagtcacagtgaaagcgagcaagcttgcacatggagagtgactgttgaagaattcattcattccttgggttgttgtcgcgctcgcagaagcagctggccggcatggtggagaaggcgtcgatcgaggacgtgatgaaggtgctgatggcgtcgcggaagcaggacctgcaccagctgtggaccacgtgctcccacctcgtggccaagtccgggctcccccctgaggtgctggacaagcacctccccatcgacgtggtggccaagatcgtggagctccgcctcaagtcctcgatgtcccgccgctcgccgttcctcgcgcaccaccacccgcaccaccacccggcggcgggcggcatggaggcctcgtccgcggccgacatcgacgagcaccacaagatccgccgcatgcgccgcgcgctcgactcctccgacgtggagctggtgaagctgatggtgatgggcgaagggctgaacctggacgaggcgctcgcgctgcactacgccgtggagaactgcagccgggaggtggtgaaggcgctgctggagctcggcgccgccgacgtgaaccacccggccggccccgccgggaagacgccgctgcacgtcgccgccgagatggtgtgcccggacatggtcgccgtgctgctagaccaccacgccgaccccaacgtgcgcaccgtggagggcgtgacgccgctggacatcctccgcacgctcacctccgacttcctgttcaagggcgccgtgccggggctggcgcacgtggagcccaacaagctccggctctgcctcgagctggtgcagtcggcggccatggtcatgtcccgcgaggacgcgcacacggcggtcaaccccgcggccgcgcccatgtacggcgagccttccggaggcggcgccgtgtacagcgcgagcggcaccagctcgagcatggtgaacctcagcctggacaacaggatggtgtatctgaacctagggatggacgcgcagttcggcaagatggacgacggcggcgacggtgatgacggcgggggcagagggcaagggggcccgccttctttgttctccccgcatggctaccattgacacaagctggccggagcggctgctgctctacgactatctctccttgtaagctttagaactaattaattacatgttgttattcatatccacattacaggagatgatgatgatggtgagataatccgtttggccctctatcatcctctgagccttttaattagcagagccgattagagagagatcacgcaaatgcatgcatgcagagtgatgcatcgtcatcacaagagtatgcatggatcttggtgagttgcctactccagttgttgtagcatgcggcgccgggggggcgttgtctgggacatttt

SEQ ID NO: 111888 - DNA, 98 bp, Zea Mays
caccacaattatatattcacaaaagcatcacaattataatatcattcacaactagatcactaatgtttcatatcactccaactattgttcaaaagccc

SEQ ID NO: 111889 - DNA, 839 bp, Zea Mays
ccagcaaattattcaatgagaactaagatcagttggcattctaacttgtacacatagaatcagttatgaaatgaaatgacgtgccgcaaaaactaattctaaacaaaatctgctccttctatatagagcgctgaatttaactatcaacctatatcgccctccatttggtggcaacaagtagctctcacttttgagtacttctgtgcctaacgaccacaatgtcgataacaatgacttcttgccttctcagagatttaaacaccccatgaatgcaacccaacactaatctgttgatatgtcaaggacagacataacaagaaacaacttttattttaggtggcaccatatgtatcttcaataagtaagcaggattggtgtggcctagcaagcggttgcagggccttcacatgtgcacacagtgtcgttggaatcatggcttgcgctcctagagatgggtaagtatttcattaaaaaaccatgaagtcgctccccctgtggtgtatgttcattattctgctggtgttcttcgagagctccgttttatatgataagccgctcactaagtgaatatgtttcactgccttctaatagccttggcttccatagtctcctgcacaaatgtacatcatccgataaaaaatttgaagggcggggaaacagaaaaaaaagatggaaccaatccaagtcccttctcttcaccagccataattgagtgtagggactgcagttctatgtcttttataggaatgagaataggaggggattaaggagtgagcgcttacgtttggtggagccgaacatggctgccgatgcttagtgaagctagcgttccgttgacg

SEQ ID NO: 111890 - DNA, 111 bp, Zea Mays
gtgctggatgatatcgaggatacccatcgttagctgcacatcagccagcgggtacgccttcgggttcaccgtggactccatcgcagggcggatccgaggcgcgcggcaccg

SEQ ID NO: 111891 - DNA, 801 bp, Zea Mays
gcgaattgcagcttgcaggcaaggcagccccgtcccgtcccggtgtggctataagcctatacgtacccgtacgtcagagctactgctatatatatagaatccagaccattggtgttgctcacgcttccactacaacagcatcatcgatcgccgagcgtgcgtgctctagctctagcaatagcagcgaggagacggtcgaggatggatcagaacaacagcaacaggcagcagcagcaggcgccgccgccaccacccgcgggctacccgacggcaggcgcggagcagcagggaggcagcggcaggaagcagggacgccgggggaagacgacctcgcgcggggagaagggcttcatcgaaggatgcatcgcggcgctctgctgctgctggatctgcgagatgtgctgcgactaggcagcccccccttccctccgccgccaggctttgagcctttgacaggaacggagagatctgctccacccatagctgcagttgtggctgcacgtacttgttgagctgttgtgttgtgtccatctcggtactttttgatttgttattagtagtagctgtgatgacgatgcatgggctgctctgtcttctgcagctctagcattacactcactactacgtgtgcgtgttgtaccgttttgtattgagtggtgacttgaaggtggcgctggtgatttgtactaccttctatatatgcatactccttggtacgcaaaataacaaaagtgacgaaagctagcgcagagaaatgcaaatgggcttgggccgtatcggcatactgggccgtgagtttct

SEQ ID NO: 111892 - DNA, 2627 bp, Zea Mays
agagtcagagacgcgttgcagcgaatggcacatcgcccaatccgccgtatcttactcgcgatcgcgacctgctaccgtcacatgaatcctacctggactaataaaactgatatacacgtcttgctccgccgcgcccatggacgacgacttgaccgcttcgccgtgcccaccgcccgcttactccactctccacactccctcgcttcctccgctcggttccatcccttcccaccccacaaaagcccccaccgccgtcgccgcaccgggccacgcgatggcgatggcgagggcggcggtggacgtggaggacctgctggtgcgcgtcaagaccggcgcggaggcggacctcgccgccgcggcgcgggaggtggccgcgctggcagcgaacggcaggctcggagaggacgacgacgaggatggcctcctcgtcgcggcgctgctcgcgcgcctcgcagccgccgccgccaccgccgacgccagggtcagcgtcatggccgcgctcaggcgcctcgcgggctgcgtcgccggcgagagcaaggagaggctggccagcaccgaggcgctgtccagcatcgtccgctccctgtccagggacgcggacgagaggagggaggccatcgcggtgctgctggacctgtcggacatcccgcaggtccgccagaggatcggcaggatcaaaggctgtgtcgtcatgctggtcaccttgaggaacgcgcacgagccaggcaccggggatgacgccgataagttgctcgccattctgtcgtccaacccgcagaacgtgctgttgatggcggaggctggttacttccgcccgttgatacagtacctcaaacaaggttcagacatgaacaaggtcctcatggcaacggccatctcgaaaatgttcctatctgaacatatgaaatcttccctcggcgaggatggagctattgaaccgctcgtggacatgtttaaacatggaaaccttgaagccaagcactcggccttaggcgccttgtgtaatctctctagctctctacagaatgcagaactcctgataaattctggcataacaggaccgctgctccagctccttttctccgtgacgtcagcactcatggccctcagagagccggcctcggctatactcgcagctatagcacaatctgagcgtattctacttcataaggatgtagcgcctcagatgctctcgcttcttaatttatcgagtccggtgattcaacttcatctcctgagggccttgaacagcatttccgggcacgcgaatgctaaaagagccaggagtaaaatcaggcaaaatggaggagtgcagctgcttctacctttcctgacagaaaagaatgtgggtatcaaaatcgccgcgttgcacttaatgttccatttgtcgaaagactcttctcaagaattggctgagcagttcagggagacccatctggatatttttgtgaagatcatctcttcccctacttctcgagacgagaaggctgcagctgtcggtatcctgagcaacctcccagcgacagacaagaaggcaactgagattctgatgcgggcaaacttgctccctattctgatcaccttgtttgaggcaaacatggccgctgccgtgacacctcaaagaatgtggttgcttgagggcatcgctggtgtgtttatccggttcacagtcacctgggacaggaagctgcagagttcagcagttggacacggggtggttccttgccttgtgaagttgctttcagaaggatcggtggacgccaagtctaaagcggcaacatccttggcccaactgtcacagagcacgatggcgctgcgcaagtcaaaaacgccaaggtggctctgcgttcctccatcggccgaatcctactgtacagtccacagctgccagtgcacagtcaaaagcaccttctgcttagtaaaagccggcgccgtccatcctctggtccagacactggaaggcgaagagcgcggagctgatggagcggcgctggaagcgttgggcacccttatggaggacgaggtctgggagaacgggagcagggtgatagaaagggcgtcaggcatccatgctctgctgaggatcgccgaagccggagagccgagctcccaggacaaggcgatatggatgctggagaggatgttccggctcgaagcccacagggagcggtacggcgagatcgcgcaggctctgctcatcgatctcgcccagaaaggagaccctgccctgaaaccgatgatcggcaagatactggctcaccttgagctgctgcaaacacaatctagctacttttaagcgtgctggcgggcgtcgctgcagataccagatcgccagatttgtgggccgtgaagtgtgcatacctgtagctttaggagccatagcaaactgtgctgatatttggcgttggtaagttcaaatctgaactgaccatgcccaactattaaagggcacatggatcgttatttttcttgtaagtagatacagcgagttttgctccaaagaggaagaagatgcagactgtaatgaagtgtaaagtgatgatagtggttatagataagatggagtactgtgtatacaaacaaattgccatctccacagcaaactcgttcaacagattcgcctgtga

SEQ ID NO: 111893 - DNA, 3541 bp, Zea Mays
agagtcagagacgcgttgcagcgaatggcacatcgcccaatccgccgtatcttactcgcgatcgcgacctgctaccgtcacatgaatcctacctggactaataaaactgatatacacgtcttgctccgccgcgcccatggacgacgacttgaccgcttcgccgtgcccaccgcccgcttactccactctccacactccctcgcttcctccgctcggttccatcccttcccaccccacaaaagcccccaccgccgtcgccgcaccgggccacgcgatggcgatggcgagggcggcggtggacgtggaggacctgctggtgcgcgtcaagaccggcgcggaggcggacctcgccgccgcggcgcgggaggtggccgcgctggcagcgaacggcaggctcggagaggacgacgacgaggatggcctcctcgtcgcggcgctgctcgcgcgcctcgcagccgccgccgccaccgccgacgccagggtcagcgtcatggccgcgctcaggcgcctcgcgggctgcgtcgccggcgagagcaaggagaggctggccagcaccgaggcgctgtccagcatcgtccgctccctgtccagggacgcggacgagaggagggaggccatcgcggtgctgctggacctgtcggacatcccgcaggtccgccagaggatcggcaggatcaaaggctgtgtcgtcatgctggtcaccttgaggaacgcgcacgagccaggcaccggggatgacgccgataagttgctcgccattctgtcgtccaacccgcagaacgtgctgttgatggcggaggctggttacttccgcccgttgatacagtacctcaaacaaggttcagacatgaacaaggtcctcatggcaacggccatctcgaaaatgttcctatctgaacatatgaaatcttccctcggcgaggatggagctattgaaccgctcgtggacatgtttaaacatggaaaccttgaagccaagcactcggccttaggcgccttgtgtaatctctctagctctctacagaatgcagaactcctgataaattctggcataacaggaccgctgctccagctccttttctccgtgacgtcagcactcatggccctcagagagccggcctcggctatactcgcagctatagcacaatctgagcgtattctacttcataaggatgtagcgcctcagatgctctcgcttcttaatttatcgagtccggtgattcaacttcatctcctgagggccttgaacagcatttccgggcacgcgaatgctaaaagagccaggagtaaaatcaggcaaaatggaggagtgcagctgcttctacctttcctgacagaaaagaatgtgggtatcaaaatcgccgcgttgcacttaatgttccatttgtcgaaagactcttctcaagaattggctgagcagttcagggagacccatctggatatttttgtgaagatcatctcttcccctacttctcgagacgagaaggctgcagctgtcggtatcctgagcaacctcccagcgacagacaagaaggcaactgagattctgatgcgggcaaacttgctccctattctgatcaccttgtttgaggcaaacatggccgctgccgtgacacctcaaagaatgtggttgcttgagggcatcgctggtgtgtttatccggttcacagtcacctgggacaggaagctgcagagttcagcagttggacacggggtggttccttgccttgtgaagttgctttcagaaggatcggtggacgccaagtctaaagcggcaacatccttggcccaactgtcacagagcacgatggcgctgcgcaagtcaaaaacgccaaggtggctctgcgttcctccatcggccgaatcctactgtacagtccacagctgccagtgcacagtcaaaagcaccttctgcttagtaaaagccggcgccgtccatcctctggtccagacactggaaggcgaagagcgcggagctgatggagcggcgctggaagcgttgggcacccttatggaggacgaggtctgggagaacgggagcagggtgatagaaagggcgtcaggcatccatgctctgctgaggatcgccgaagccggagagccgagctcccaggacaaggcgatatggatgctggagaggatgttccggctcgaagcccacagggagcggtacggcgagatcgcgcaggctctgctcatcgatctcgcccagaaaggagaccctgccctgaaaccgatgatcggcaagatactggctcaccttgagctgctgcaaacacaatctagctacttttaagcgtgctggcgggcgtcgctgcagataccagatcgccagatttgtgggccgtgaagtgtgcatacctgtagctttaggagccatagcaaactgtgctgatatttggcgttggtaagttcaaatctgaactgaccatgcccaactattaaagggcacatggatcgttatttttcttgtaagtagatacagcgagttttgctccaaagaggaagaagatgcagactgtaatgaagtgtaaagtgatgatagtggttatagataagatggagtactgtgtatacaaacaaattgccatctccacagcaaactcgttcaacagattcgcctgtgatgtgaaagcgtttatgactcgtcgtgatgccatgtgattcaacttgatatgctgatgtttttttacgtgcacaactagggctggaaacgagcagatgcgaacaaaatgttgacttgtctcttatggtttagattgatgataaatgattgacaatggatagcgtcgcggggtcgagtcatagactgaccgaggcatgagattatgtatgtaaccatgtatatcgacttgtaatgtgcaggtgtggaacataaggacggtggtcgacgactgaagtgaaggtcatgcgagctcgacggtgatggacgactgttgggtctttactgacggatcggagcagccagatgaccatccatgatggctgacacctgggactcgcactcgcgcaaggacgtggcggagcgggccgtgttggcggtacggtcgaggactgacaggagacatttccaggacgtggagggccatgcacgtggtgcgatactcatggtggtttgggagttgagcctcaaaaccacctgcactatggatgacgtgttttgctgagtttgtgcctcaaaactcggcggtggtggttccagaggcaatcggtggcggcacgtggtgtcacagcgaagggtgcgtcaaggcgaaacaacttcgtgtggagtgtgtggtcgtcagatcgaaaacctagtagttggtctattttgccacaggcgaagtggatggactctatgtaattagggtagtttagaaatagaaataaccctctgtaaataaaggggtggttagttcaacatctcttggctaccattgatttaggccttttgttttagaactcctagttttctctttaggttgtcaccagttgagccaagggatccacaatgttttttgtaattgtcgactgtgtttgtgatctgcaaatttaatccgag

SEQ ID NO: 111894 - DNA, 1427 bp, Zea Mays
agtggcccacgaacacccccagctcctcctcccagtcccactggcccgagcgcgaccccacgttggataagccaagtagagtatcgtggcaggctacacgtgtcctacgaaaatctgccaaatccgggcggtgactggcagccagcgggccagctttgcatcgcagccaggccaggccaggcccaggcggaccgtcgccgtcgtccgtccagtgaagcttttactataaagcccctgctagaccgctagaaaccacacgtccgcccctgccagtttgcgttcgccacccgtccaaaaccccccaaccaaagcccgctccggcagcccccaccccaccatcgcgtcaatggcggcgccgcctgtccagcctgtgccaaccgcggcggcggcggcggcggctgtgaacggggacgcgttccgtctgggcttcgtcggcgcgggcaacctggccgagagcatcgcccgcggcgtggcggcgtcgggcgtcctcccggcctccgccatccgcaccgcgccccaccgccgccccgagcgcggcgaggccttcgcgtccttcggcgcgtgcttgctccaaaccaatgcccatgttgtggacgacagcgatgtgatcgtcatctccgtgaagcctcagatcgtgaagcaagttctacttcagctgaggccacggctgtcagaaaaaaagcttctcgtgtccattgctgccggcatcaagatgcaagatttgcaggattggtctggtcaacgacgtattattagagtaatgcccaacaccccttcagctgttggacaagctgcatcagtcatgtgtttgggagagatggctactcaggatgatgaaaaccgtgtaagaaaactgttcagtgccattggaaaagtctggacagctgaagagaaatattttgatgctgtaactggtctgagtggtagtggcccggcctatatcttcctagcaatagaggccatggctgatggtggagttgctgctgggcttcctcgggaccttgcccttggtcttgcatctcaaacagttcttggtgctgcaactatggtgagccagacaggcaaacatccagggcaactgaaagatcaggttacttctccagcaggtactaccattgccgggattcaggagctcgagaagggcgcattccgtggaacgctgattagtgctgttgttgctgccgcaaagcgctgccgcgaactgtcatagagttcgaaacaaggctgcattttgttgatatacatgcgttggtatgcaaggtgcaaatcttctggaatagtagactaataatgtactgggtggcttcagaatcatgtgatatgataagtacatgctcccttctaaagcttggtgtcaccattatatggtcaaacggcaagccttaacaataaatccaaaaattggggcagatgcgatttttgtttct

SEQ ID NO: 111895 - DNA, 1599 bp, Zea Mays
atgaaaggtcatatgctgaattctgctttcttctctggttatagtcgaccaacatcactgcaggatcgtggtaaggatagcgatgatgaagacttccgagatagggactacgatgtggctgcacttgctagcaatttaagccaggcatttaaatatggtatttacagtagtgaggatattgatgaggctcaagcatcacttgagcgggatgatgaggatgtatattttgatgatgaatctacagctggaatgcatgatgagatcgaggatgatcagtttgaatctatttttgttcaagctgatccagtagtcactgttgacaacctgctggaacaatttggtgagaggcaacagagcacagatgcaatggatgaggatgttgtagaggaccattctgaaactgatggtgattattccaatgaacacatagaagcggtaactactgacaaagttccagaactcaagctgattgaagatatttttgttcaatctgatcatgcagttgctgctgacaacctaccagaacaagtgagagattgtgaaattaccttggagaccacatcactgatagttgatgagaagcaacagatcatggttacagtggatggagatcttgtcaaggatgattctgaaaccgataatgttcatgacgatgaacagatggaagtggtaactgctgacgaagtgctagaggacacagggataactgttgaagatgttgaggagaagcaaaagagcacatttacagtggataaagatgctgttgatgatcattttttcaaaactgatgatgttcatgccgatgaacagatggaagcgtcaactactgatgaagtaccagaactcacagaggcagattatgaagttgttgaggagaagcaacagagcacatatacaatgaatggatgctttgagaatgatcatttcaaaatccatgttgctcatgctgatgaaaagaaggaagttgttgctactgatgtgccagaagtcacagggacggacggtgaaatagaggagaagacaccagtgatagttgatgagaagaaactgagcacatttacaatggatggagatgttgtcgttgatcatgcagatggacagaaggaagtgatagttactgaagtgccagatgaagtcacagtgactggcgatgaaggtgttgaggaaaaagcagctatgattactgagggcacaccagatcacgggactgccccaagtacactactgaacccatggtggcggtgctaaaagagaagggagtaaaagcgaccaagaaacccgtgtatttgtttgcgcttagcctagggatgcttaaagccaagatcaaggagaagaaagaagcgaataggctggcgcttgccagggcagacgagaacatttgccgatcgatcccacgcaaaggggcagggcagcagcggaacctgaatctgcaacaacactaactcagggaagaagctggctctgaagtgtgtgtgcgtccatctagcatagtagcatcatgcacctatggtgaaaccatggtttctcatttacctcggctaggcatctaacttatgtgtgatttgcgtgttcgcttggagatgaggcctaaaccgattc

SEQ ID NO: 111896 - DNA, 1474 bp, Zea Mays
acttgagtatcatcatcatctagtgaaacttggtttctctcttaccttacatgtaccataatttctcgctattatatttactttaaactgagagacaagattttttgttctcatgtaggctgctgcagcaagcaactggatgatggcttccaggcagtcagggaacaatgcacaagaagcagcatcaccattggcgagtcctcctcactccaacatagccagcatcatcccttcgctgcccctcgagaccaggtgcccaccgttccctctccgccggtacgccaacttttgggtgcctgaggtaatattgaaggcagacctccccggcattcattcctgcttcaagccgagacccaccgacgtgttcgtcgcaagcttccccaagtctggcaccacttggctcaaggcccttgccttcgcgacgctgaagcgttccacgcatccgccattggatggcgaccatccgctgcgtcgttgcaaccctcatgactgtgtcaggttcctcgatgctaatttcaaccagcagaaggatgagttggaggctctcccgtccccgcgcgtgctagccacgcacctcccctactccctgctgcccggcagcatcaccggggatagggagcgctcggggtgccggatcgtgtatgtctgccgggaacccaaggacgcgctggtctctgcctggctgttcacgaggaaggcggcgtcggcgctgggggctgacgctcgatcgttcacgatccaggaagccttggagcttttctgtgatggtcgctgtatgtgcggcccgcagtgggagcacgtcctccagtactgggaggagagcgtgaggaggcctgacagggtgttgttccttcggtacgaggagatgctgattgatcccgaggcacacgtcaggaagctcgccaagttcatggggtgtggattttctgaggaggaggaggagcacggggtggtgagcgccatcgtggagctgtgtagcctgggcaagatgagggacatggaggtgaacagaaatggaagcaatatgttgggggtcaagaacgaaagctacttcaggaagggagttgctggggactggagcaaccatatgacgccggacatggcgcagaggctagacaaggtcgtagaggatgcattgcaagggactggattcagctttacgagcaaagcatgatgagccactgcgctcatggtagttgcgaactccataatgccaagaacaactcgttttgtcggtattgcttgctggatggagatcataccagccagccatggtgagcatccttcttttgtgatgaaggggaaattgatttgcgtataattcatctgtataactttgttacaaaccatagtttgtggcaccttggcgcgccaaaaccatatgcattactgtgtaagattcgtcataaagctatgtgtatcatcattgacatatttgtcttaataaaattcatcataaaccatcgttcaatgt

SEQ ID NO: 111897 - DNA, 96 bp, Zea Mays
gagaaatgcttgctcacctcgggctcgggatcacggagccttgcacacgcgccgcccacttgggaccggaacagcagcagcagcagcctcgcgcac

SEQ ID NO: 111898 - DNA, 4530 bp, Zea Mays
atggggatagaggattaccatgtcatcgacctcgtcggggagggctccttcggcaaggtttacaagggcaggcgcaagtacactcggcagacggtcgccatgaagttcattcttaagcacgggaagaccgataaggatatccacaaccttaggcaggagattgagatcctaaggaaactcaaacatgagaacataattgaaatgatcgatgcctttgaaacccctcaggagttttgtgttgtcacagagtttgctcagggagaactgtttgaggtgctcgaggatgataaatgccttccagaagaacaagttcaggcaattgctaagcagctggtgaaagcattgtattacttgcattccaatagaattattcaccgggatatgaaacctcagaacatccttatcgggaaaggatctattgtaaagctttgtgacttcgggtttgctcgtgctatgtcagctaacactgttgtattacgctccattaaagggacacctttatatatggctccagaactggtgagggaacagccatataaccatacagcagatttatggtcccttggggtcattttatatgaattgtttgttggacagccccccttttatacaaattcggtctatgcacttatccggcacattgtcaaggatcctgtaaaatatccagataatatgagcacaaactttaagagcttcctgaagggtttactcaacaaggtgcctcaaagtagattaacctggccagcattgttggagcacccatttgtcaaagatgattcaatgggatcggcagctgagtctcgacccgcgccttttgaagctagagggtctgaagatactcagaaagcagaagaaacacaatcaaggaaccaaccttccccagccggcccccaaagtaggattactgctaccaatagggaaaatgcttctgataaaccaaaaggaaacagaaaactggatgaccctatgcaagcaactcaggaccgccatggttcacctactggtgctgttgctgaaagctgctctccctcagagtgtacggctttggataaactggaaaaagcctcacaaacagtagaaggtgcaagcagcattgttcaagatattgaagcactgtcaaccattctcacccctatcaaaatttggcttactaatactccaagttcaaccagggaactcaacattgatggagcaaatcagtcgctcagaattattaaaaatttgattgatgctggttcatgccaatcttatgctgcaattgatataagtctgcttcttgagtttacaaatctcattatcaaaactaagctttcaaatgcttatggacttgtggtgaagtgcctggcaattgcacggaaactacttgatacaagtgatgaagttattttaaattcttatgacagacactggttatccctatatgaactttattcacagatcctggtttctacagtggattcatctggaagaatatctcgtgagtcaactgcctgccttgctttgatgttatctcgggttatctctggcttgaaagctagcatgtcatctgaagacccaaagccagtggaagaaagtcttctcaagatcattgatcatgcgaggacatcacaactactagagctcttgtgtgaatgtctgatggcttcaggttcagacacactatctggttctacgaacatggtacctgctgcttgtgaggcatgcaaggctatttggtacctagctcatgctgttgacattatgtccattggtgcacaccatttttcatttcccttagctaattcatggcgacagatacattcaatgcaagagcaaagttcaaaggcagattcaaactctaccaatctgattaacatatttgtcaaatcatttctcgcctcacgaccaattcaggttgcagtttaccactgcttgcataatggtctagaatcagctattcatgcttgtcttcagcttatctcaagggcctgtcttcagaatgtgactttctgtgccattatgtgtcgtccatggaattcaccatctgatgttgacgtagtagaatatggtggagatggaacaatagtatctgacatgttttccttattgtcactgtgtggatcatatttaaataaggaatccaggcagaatagcaatcagaaatgcaaactatccaaccctcatgctcttgtagtgcactgctgccttgcactagcgacaatagctgcatgtttgaaatcagagggaggatcttcagcatcacttgtcctaacaagttcccagaaaaaacagcggtcccggctctcagttcttgcacacctctcatcagttgatgatacagtgaagagttgcctgcagccacactgtgcatcagcaatgcttgcgctctcatcacttgtttctcttgaaaatggtggacaaaccagatcgtctctttgtgaaactgcccttgctttgtttcctcgtatggcaacactgcacacactgctgaagctttggttatctgatggaagcgaggcactgtgtcgatataatgctggtcttctgaatctttttggactccgcgatggaagtattggactgctggagacaaggttgaaatggggcggaccattggccattgaacaagcctgctcagttggcatcccacagctcctaattcgcttgcttactgatggtttcataaaagaggtttctgacggaaaagatggttcgacgagccgcagtgggttgtctccattgggagttgtctggactctttctgctttatctcaatgccttcctggtggagtttttcgtgaaattttgtacagaagggaacagttaaagctcttaaccgacttgttgtctgatacacatcttaaggcattggccgcctggacgggtcttggtggtgggaagaggggagttcgggaactgataaactcagtcgttgatatcttggcatttccatttgttgcagtgcagagttctccaaacatgccgtcagcatctgcatccatcaatagtggtttcctgcttaatgttgcatcacccggtgggcgcattggtactgagaataaggaaatgctcaaaactatagagcaaaacatgcctcagtacattcaagttctactagaggtctgattagttggctctaccttttcttgcctatcagtggacatttctgtgatttctctctcctcgtacaggttggaattcctggatgtatgctgcgttgtcttgactatgttgacatggaagatctaggtaggcccttggccattgtggccaaaatggcaggctacaggccacttgctttgcagcttcataaagaaggtcttctagatccaagtagagtagcagcattactcgagggtcctatagcaaaggagactttgcttgatttcctcatgattatttctgaccttgctcgcatgtcgaaggacttttatgtgcccattgataaagctggacttgttgttcttctgaagaacttcttatcaaatggagaccctgatataagggcaaaagcttgtagtgccattggcaacatgtgccgccatagctcctacttttatggcccacttgcagcaaataaggtgatccagctcgtggttgacaggtgttctgatcctgacaagcgcacacgaaagtttgcatgttttgccgttggcaatgctgcttatcataatgatatgctgtatgaagaattgagacggtccatacctcaactcaccactttacttcttggtcctgaggaggataaaaccaaaggcaacgctgcaggcgcgctcagtaatctagtgaggaactcagacatgctttgcgaagacattgtctcccaaggcgcaattcaggcgctgctgaagatggtcggcagttactctactgttgccctgagccccagcagacgagatgctctaaccgaatctccgctaagaatcgtgctcttcgccctgcgcaagatgtgcgaccacgccatctgcaggaacttcctacggtcttcggagctgctccccgtcatcgtccacctccggcagtcacctgatccaacgatctccgagtatgcttctgccatcgcgaccagagtgagccaggcctgagtgcctgacgtttctctggacaggcgcagcttaaggtgtgccaccctgggctgggcatgatcatgccacagcggcccaaatctacgatccatctgcagctgtaatgtagtgtatggtttacggatcaagcaagcttagcttgtgcatatgcataagacttctgaaaaaagagcgattccattcgctgtctgtacatacgctgatacgcaccaccagaactgaagctacatgtcatgtgtgttgatgtatgtatatgctgctagggtcgtggccatcgaatagattcatattttgcacggatgttagcactgtatcgtttttttttggctaccaacaaatacgatgatgtagcagaagcagcgttatcgtggagacatcggacgaccatgctatactgattaagtgcacgtttggatcacatgaattaaagcaaaataactaaagatttaaacaggaagagctaaaa

SEQ ID NO: 111899 - DNA, 4459 bp, Zea Mays
atggggatagaggattaccatgtcatcgacctcgtcggggagggctccttcggcaaggtttacaagggcaggcgcaagtacactcggcagacggtcgccatgaagttcattcttaagcacgggaagaccgataaggatatccacaaccttaggcaggagattgagatcctaaggaaactcaaacatgagaacataattgaaatgatcgatgcctttgaaacccctcaggagttttgtgttgtcacagagtttgctcagggagaactgtttgaggtgctcgaggatgataaatgccttccagaagaacaagttcaggcaattgctaagcagctggtgaaagcattgtattacttgcattccaatagaattattcaccgggatatgaaacctcagaacatccttatcgggaaaggatctattgtaaagctttgtgacttcgggtttgctcgtgctatgtcagctaacactgttgtattacgctccattaaagggacacctttatatatggctccagaactggtgagggaacagccatataaccatacagcagatttatggtcccttggggtcattttatatgaattgtttgttggacagccccccttttatacaaattcggtctatgcacttatccggcacattgtcaaggatcctgtaaaatatccagataatatgagcacaaactttaagagcttcctgaagggtttactcaacaaggtgcctcaaagtagattaacctggccagcattgttggagcacccatttgtcaaagatgattcaatgggatcggcagctgagtctcgacccgcgccttttgaagctagagggtctgaagatactcagaaagcagaagaaacacaatcaaggaaccaaccttccccagccggcccccaaagtaggattactgctaccaatagggaaaatgcttctgataaaccaaaaggaaacagaaaactggatgaccctatgcaagcaactcaggaccgccatggttcacctactggtgctgttgctgaaagctgctctccctcagagtgtacggctttggataaactggaaaaagcctcacaaacagtagaaggtgcaagcagcattgttcaagatattgaagcactgtcaaccattctcacccctatcaaaatttggcttactaatactccaagttcaaccagggaactcaacattgatggagcaaatcagtcgctcagaattattaaaaatttgattgatgctggttcatgccaatcttatgctgcaattgatataagtctgcttcttgagtttacaaatctcattatcaaaactaagctttcaaatgcttatggacttgtggtgaagtgcctggcaattgcacggaaactacttgatacaagtgatgaagttattttaaattcttatgacagacactggttatccctatatgaactttattcacagatcctggtttctacagtggattcatctggaagaatatctcgtgagtcaactgcctgccttgctttgatgttatctcgggttatctctggcttgaaagctagcatgtcatctgaagacccaaagccagtggaagaaagtcttctcaagatcattgatcatgcgaggacatcacaactactagagctcttgtgtgaatgtctgatggcttcaggttcagacacactatctggttctacgaacatggtacctgctgcttgtgaggcatgcaaggctatttggtacctagctcatgctgttgacattatgtccattggtgcacaccatttttcatttcccttagctaattcatggcgacagatacattcaatgcaagagcaaagttcaaaggcagattcaaactctaccaatctgattaacatatttgtcaaatcatttctcgcctcacgaccaattcaggttgcagtttaccactgcttgcataatggtctagaatcagctattcatgcttgtcttcagcttatctcaagggcctgtcttcagaatgtgactttctgtgccattatgtgtcgtccatggaattcaccatctgatgttgacgtagtagaatatggtggagatggaacaatagtatctgacatgttttccttattgtcactgtgtggatcatatttaaataaggaatccaggcagaatagcaatcagaaatgcaaactatccaaccctcatgctcttgtagtgcactgctgccttgcactagcgacaatagctgcatgtttgaaatcagagggaggatcttcagcatcacttgtcctaacaagttcccagaaaaaacagcggtcccggctctcagttcttgcacacctctcatcagttgatgatacagtgaagagttgcctgcagccacactgtgcatcagcaatgcttgcgctctcatcacttgtttctcttgaaaatggtggacaaaccagatcgtctctttgtgaaactgcccttgctttgtttcctcgtatggcaacactgcacacactgctgaagctttggttatctgatggaagcgaggcactgtgtcgatataatgctggtcttctgaatctttttggactccgcgatggaagtattggactgctggagacaaggttgaaatggggcggaccattggccattgaacaagcctgctcagttggcatcccacagctcctaattcgcttgcttactgatggtttcataaaagaggtttctgacggaaaagatggttcgacgagccgcagtgggttgtctccattgggagttgtctggactctttctgctttatctcaatgccttcctggtggagtttttcgtgaaattttgtacagaagggaacagttaaagctcttaaccgacttgttgtctgatacacatcttaaggcattggccgcctggacgggtcttggtggtgggaagaggggagttcgggaactgataaactcagtcgttgatatcttggcatttccatttgttgcagtgcagagttctccaaacatgccgtcagcatctgcatccatcaatagtggtttcctgcttaatgttgcatcacccggtgggcgcattggtactgagaataaggaaatgctcaaaactatagagcaaaacatgcctcagtacattcaagttctactagaggttggaattcctggatgtatgctgcgttgtcttgactatgttgacatggaagatctaggtaggcccttggccattgtggccaaaatggcaggctacaggccacttgctttgcagcttcataaagaaggtcttctagatccaagtagagtagcagcattactcgagggtcctatagcaaaggagactttgcttgatttcctcatgattatttctgaccttgctcgcatgtcgaaggacttttatgtgcccattgataaagctggacttgttgttcttctgaagaacttcttatcaaatggagaccctgatataagggcaaaagcttgtagtgccattggcaacatgtgccgccatagctcctacttttatggcccacttgcagcaaataaggtgatccagctcgtggttgacaggtgttctgatcctgacaagcgcacacgaaagtttgcatgttttgccgttggcaatgctgcttatcataatgatatgctgtatgaagaattgagacggtccatacctcaactcaccactttacttcttggtcctgaggaggataaaaccaaaggcaacgctgcaggcgcgctcagtaatctagtgaggaactcagacatgctttgcgaagacattgtctcccaaggcgcaattcaggcgctgctgaagatggtcggcagttactctactgttgccctgagccccagcagacgagatgctctaaccgaatctccgctaagaatcgtgctcttcgccctgcgcaagatgtgcgaccacgccatctgcaggaacttcctacggtcttcggagctgctccccgtcatcgtccacctccggcagtcacctgatccaacgatctccgagtatgcttctgccatcgcgaccagagtgagccaggcctgagtgcctgacgtttctctggacaggcgcagcttaaggtgtgccaccctgggctgggcatgatcatgccacagcggcccaaatctacgatccatctgcagctgtaatgtagtgtatggtttacggatcaagcaagcttagcttgtgcatatgcataagacttctgaaaaaagagcgattccattcgctgtctgtacatacgctgatacgcaccaccagaactgaagctacatgtcatgtgtgttgatgtatgtatatgctgctagggtcgtggccatcgaatagattcatattttgcacggatgttagcactgtatcgtttttttttggctaccaacaaatacgatgatgtagcagaagcagcgttatcgtggagacatcggacgaccatgctatactgattaagtgcacgtttggatcacatgaattaaagcaaaataactaaagatttaaacaggaagagctaaaa

SEQ ID NO: 111900 - DNA, 110 bp, Zea Mays
gatgcatagtgtttataagtgcaaaatgttatcgaaacatgttaaaatatctcgaggatgttcccgagagtttttggaatcttcggaactttcttcgggtattaaatatg

SEQ ID NO: 111901 - DNA, 1222 bp, Zea Mays
gaatgttttaataagacgagcgatcaaattggaggttgaaaaagataaacgaactatattttgaaacggagtagtagataaaataaaaaaacatgactaagacctagctcgcgtctaggacctcgtgttgggccggtggatggacttgatctccggctgagcggctcactgcatcagccacgcagagtcgcagacggcagggcagaccattttggtccaccccccaccggccaccccaccgtaggcagagcagactagagactgcaccgcacacccaggccccagtctcgaactatcgatacagcaggagcgaccgagagaggccgacgcgcaccagcagatcccaaactcaccggggaggagggagtgggcgaccggcggcggcgatgggtttcatcatggagttcgcagagaacttgatcctccgtttgatggaggacccggacaagcgtgaccaggttcggcgggagcatgtctacaagacgaaggagcggtgcgagcacaccaaggcggcgtggagcctcccgctgcgccccaacggcttctggaccttcgaccgcttcaactcgcagctctcctgggacccgcagatcaaccaggctgccggccaccgggacccttacgacgacctcatcacccgccactccggctccccgccgtcttcctaaacgcccgtgtcgatctctgcgcagaagttctacttgggcatcaataagaatctggtcccgtcaaactgattgtgattccattcacttctgtttgaaaatgttaccgacaaactaccctgttttctttatcagtttggtatggaagcagaagttgtgtgcttccattctcaagttgttgtctttgtattatgaaattatgaaatatttcattattcatatggagcactcgtttgcctttactattcagtaaattctccgagtgactacaggcgtcaggtcttgtatgttttggatggtatgtcaagcactcaagctatgttgagtctacgagcctgcatcttattgattgaggcaaagccttgaggccatgtttaatcagaccgtgctccaggtttttctgggccgaattcacccaacagtttttgtttcgtttaccaatgttcagtggccagtcaccggttacaaccatcttgcaccgcaatggtcgtttggtcacgggcatcggggcatgcagcacaaagctgtctgtatcagtatcatggtatggcatcagt

SEQ ID NO: 111902 - DNA, 1085 bp, Zea Mays
ttctctctctccatgtagtcaacctatatcaaagaagaatcagaacatagtatacagccatttacagaagcacacccactctatggctacttttgtgtgttacccatttatccttgtaatataaatcaaccaatccaaaatacagactagacctgagcaatctcaatcaatccatttcgaaatttggagcagacacaagtttcatctcaagaacaaagaagccttgtgcttgtgatccttgaagccatctttttgctgctgctgctgctgctctttgtcattggcatgctgcaaggcaccgggcacccaccaaactctgatggtcttgtcaaggctcccgctgtagaccatgcagccattggtgagcctgcaccaggacgcctggatgcatttgacggggccctcgtggcctctgacgacgcccaccttggccagctcgccggcgctctgacggcgccacaggccgatggtcttgtcggcggagccggtgcagagcaggtccctggcgacgcagaggcacagcacggcggcgtcgtgcgccctgacgtcgcacgcgagggtccagcgcgcggcggtcctgccgccgaggcggtcccaggcggcgacgtggccgtcggagcccgcggcgtagagccggcggtcgtcggcggcgacggcgagcgcgttccacgagacgccgtcgcgggcgacgaggacgccctggaggaaatgcgacgccttccccttctcccaggccttgacgcggccgtcggcggaggcggagtagacgatgccggcgtctgcggcgacggcgttgacggcgtcgtcgtgggcgcggatggactcgaggcacctgaggtcggcgacgcgccagaccttgagcgtgcggtcccaggagcccgagtagaggagcgcggcgtcgtgcacggcgacggcgaggcaggagatgctgtcggcgtgctcgatccagaggcggcggtggtgggcgcggcgcgccgccgtggtggcggtggtctgcacgtagctgtcctggcggaacacccggcccaggtagtccctggcggtgggcagcgcggcgacgagcttgaaggcgttctcggagcggc

SEQ ID NO: 111903 - DNA, 461 bp, Zea Mays
ctcggtcctgccactcccatggccgcgccccccctgcttctctctctcagcgctcgcggctctttctctcctgctccgtccatggctgtttgcctctgctcgcggcgtccctgctcgcccagccgagctctccactgcccagctccatttcacggcgctctatctgctcggttccatggccgcggtactccagctcgccgtgccctgctccctctgtttccatggcaggctctctgctcgtcgcgggcgcctggacgctctccctggtggccgcctgttctccctgtgtaccgcgcgagttctttggtagacgcgcgctgaccgtgctccacttcgcccatcgcgacgctccagttccaactcgctgcgcgccgagctcttcgctgttgtccgtgcgcgcgcgcgccgctcgtcgacctctctgctcacgcgtagctcgctcttttcttatttgccgcgcg

SEQ ID NO: 111904 - DNA, 791 bp, Zea Mays
caaagctattgcccagccctggagtctgacgacctcgtttccctgctgtctcgcctctctttcggttctcacggcgacgactgggcgagcgccgcctcccctccctcgctccgtgaggtcctcgccggcgacgagtgccgccgcccgtttccatgttttttccgccgattagtgtccaccagatctagtgaaggctggtaacttgacgcaaggggaatatagacacagaattttttgaacattgatctgtagccagtgctgcaatggctacaaagcttgtggttctcggtatcccctgggatgttgacactgaagggttacgagagtacatggccaagtttggacccctagatgattgtgtcgtcatgaaggagcggtcttctgggcgatctcgtgggtttggctatgtaacattcgcatcagccgacgatgcaaagaatgttcttgattgcgagcatgttcttgggagccgtacattagaagtgaagatagctactccaaaggaagaaatgaaatcacaaggaacaaagaaagctacaaggatatttgttgctcgaattccacagtcagtggacgagtcgatgtttcgtaggcattttgaagcttttggagaaattcttgatctttacatgccaaaggaacatggttcaaaggggcatcgtggaatctatcattttgtttcatgttgtgattttggatttgtcgtgattcacattattgacaagatgaaggcagtccttgtagttactgtatggaagtgctgtatgtgtaataaaaaagtatcatttgcg

SEQ ID NO: 111905 - DNA, 1686 bp, Zea Mays
caaagctattgcccagccctggagtctgacgacctcgtttccctgctgtctcgcctctctttcggttctcacggcgacgactgggcgagcgccgcctcccctccctcgctccgtgaggtcctcgccggcgacgagtgccgccgcccgtttccatgttttttccgccgattagtgtccaccagatctagtgaaggctggtaacttgacgcaaggtgttcaagaaatttaagccacacactcttcatcataggcccaggcaatatttgtgttaatctcagggacctccagtagattgctgagagttatccttgatacaggggaatatagacacagaattttttgaacattgatctgtagccagtgctgcaatggctacaaagcttgtggttctcggtatcccctgggatgttgacactgaagggttacgagagtacatggccaagtttggacccctagatgattgtgtcgtcatgaaggagcggtcttctgggcgatctcgtgggtttggctatgtaacattcgcatcagccgacgatgcaaagaatgttcttgattgcgagcatgttcttgggagccgtacattagaagtgaagatagctactccaaaggaagaaatgaaatcacaaggaacaaagaaagctacaaggatatttgttgctcgaattccacagtcagtggacgagtcgatgtttcgtaggcattttgaagcttttggagaaattcttgatctttacatgccaaaggaacatggttcaaaggggcatcgtggaattgggtttatcacgtttcagagtgcagagtctgtggacagcatcatgcaagagtcacatgagcttgatggcacaacagtagttgttgatcgcgcgactccgaaggaggaagatgtaagataccccccgagtagaccatctcagggtggctatggtgcatataacgcttacatttcagctgctaccaggtatgcaactttgggtgcaccaacactgtatgatcatcctggatcagcctatggaagagggtactatggatcctctcaagcagtgggcaagaagatatttgttggtagacttccacaagaagcaaacacggatgacctaagacattactttggcagatttggtcgaatcgtagatgcgtatattccaaaggaccccaaaagaagtggccaccgaggttttgggtttgtcaccttcgctgatgagggtgtggcagaacgggtatctcgtagaagccatgaaattctgggccatgaggttgcaatagacacagctgcaccacttgagaatgattcagctggtggtggttacattgatcccatggacctttacggagcttatggttcaatgagatcttttggcaggttctgcggtggtctagattataattacggctatggccccagcagcggaagcagcagatcaaggtcggattggcgataccgaccttactgaacgtgttttagtttacctctagggaaggaaactgaggagatggagaaaagaattacctgtctaagaatgctaagtgaggggggtaccttacgcgtggaatctatcattttgtttcatgttgtgattttggatttgtcgtgattcacattattgacaagatgaaggcagtccttgtagttactgtatggaagtgctgtatgtgtaataaaaaagtatcatttgcgaaaaaagttat

SEQ ID NO: 111906 - DNA, 1642 bp, Zea Mays
attgcccagccctggagtctgacgacctcgtttccctgctgtctcgcctctctttcggttctcacggcgacgactgggcgagcgccgcctcccctccctcgctccgtgaggtcctcgccggcgacgagtgccgccgcccgtttccatgttttttccgccgattagtgtccaccagatctagtgaaggctggtaacttgacgcaaggtgttcaagaaatttaagccacacactcttcatcataggcccaggcaatatttgtgttaatctcagggacctccagtagattgctgagagttatccttgatacaggggaatatagacacagaattttttgaacattgatctgtagccagtgctgcaatggctacaaagcttgtggttctcggtatcccctgggatgttgacactgaagggttacgagagtacatggccaagtttggacccctagatgattgtgtcgtcatgaaggagcggtcttctgggcgatctcgtgggtttggctatgtaacattcgcatcagccgacgatgcaaaggttgtaaaataatgaagataacttttcattttctccatgcatgatattgcataataaattctgtgtatagttcaatctttaacttaaatccatatgcagctgccttatagtgcctaattcagattagttttctgattcactgcattattattctttcagaatgttcttgattgcgagcatgttcttgggagccgtacattagaagtgaagatagctactccaaaggaagaaatgaaatcacaaggaacaaagaaagctacaaggatatttgttgctcgaattccacagtcagtggacgagtcgatgtttcgtaggcattttgaagcttttggagaaattcttgatctttacatgccaaagagtctgtggacagcatcatgcaagagtcacatgagcttgatggcacaacagtagttgttgatcgcgcgactccgaaggaggaagatgtaagataccccccgagtagaccatctcagggtggctatggtgcatataacgcttacatttcagctgctaccaggtatgcaactttgggtgcaccaacactgtatgatcatcctggatcagcctatggaagagggtactatggatcctctcaagcagtgggcaagaagatatttgttggtagacttccacaagaagcaaacacggatgacctaagacattactttggcagatttggtcgaatcgtagatgcgtatattccaaaggaccccaaaagaagtggccaccgaggttttgggtttgtcaccttcgctgatgagggtgtggcagaacgggtatctcgtagaagccatgaaattctgggccatgaggttgcaatagacacagctgcaccacttgagaatgattcagctggtggtggttacattgatcccatggacctttacggagcttatggttcaatgagatcttttggcaggttctgcggtggtctagattataatgtaagcacaaaaaagatgttctcatgtcatactactattataaagcacaaatgtaattgatgattaggtcatccaaaacaaaaatctaggcttaagttcaatctcctgttgctgtgacctatctttttactcaatatgtggctcgtcatttaataaccaa

SEQ ID NO: 111907 - DNA, 1550 bp, Zea Mays
attgcccagccctggagtctgacgacctcgtttccctgctgtctcgcctctctttcggttctcacggcgacgactgggcgagcgccgcctcccctccctcgctccgtgaggtcctcgccggcgacgagtgccgccgcccgtttccatgttttttccgccgattagtgtccaccaggggaatatagacacagaattttttgaacattgatctgtagccagtgctgcaatggctacaaagcttgtggttctcggtatcccctgggatgttgacactgaagggttacgagagtacatggccaagtttggacccctagatgattgtgtcgtcatgaaggagcggtcttctgggcgatctcgtgggtttggctatgtaacattcgcatcagccgacgatgcaaagaatgttcttgattgcgagcatgttcttgggagccgtacattagaagtgaagatagctactccaaaggaagaaatgaaatcacaaggaacaaagaaagctacaaggatatttgttgctcgaattccacagtcagtggacgagtcgatgtttcgtaggcattttgaagcttttggagaaattcttgatctttacatgccaaaggaacatggttcaaaggggcatcgtggaattgggtttatcacgtttcagagtgcagagtctgtggacagcatcatgcaagagtcacatgagcttgatggcacaacagtagttgttgatcgcgcgactccgaaggaggaagatgtaagataccccccgagtagaccatctcagggtggctatggtgcatataacgcttacatttcagctgctaccaggtatgcaactttgggtgcaccaacactgtatgatcatcctggatcagcctatggaagagggtactatggatcctctcaagcagtgggcaagaagatatttgttggtagacttccacaagaagcaaacacggatgacctaagacattactttggcagatttggtcgaatcgtagatgcgtatattccaaaggaccccaaaagaagtggccaccgaggttttgggtttgtcaccttcgctgatgagggtgtggcagaacgggtatctcgtagaagccatgaaattctgggccatgaggttgcaatagacacagctgcaccacttgagaatgattcagctggtggtggttacattgatcccatggacctttacggagcttatggttcaatgagatcttttggcaggttctgcggtggtctagattataattacggctatggccccagcagcggaagcagcagatcaaggtcggattggcgataccgaccttactgaacgtgttttagtttacctctagggaaggaaactgaggagatggagaaaagaattacctgtctaagaatgctaagtgaggggggtaccttacgcgtggaatctatcattttgtttcatgttgtgattttggatttgtcgtgattcacattattgacaagatgaaggcagtccttgtagttactgtatggaagtgctgtatgtgtaataaaaaagtatcatttgcgaaaaaagttataacgcc

SEQ ID NO: 111908 - DNA, 1650 bp, Zea Mays
ttaatttccaaacccaccagctctcagtgattcactttctctctgcgtagcgtcgtctccaacttcgccttctccttctccatgatctccgtgctggcgggcgtgacgacgacctacaacaccgggctgcgctacggcgggccggcgtccatgacgctgggctggctcgtcgtggcgctcttcaacggctgcgtggcgctgtccatggcggagatctgctcggcttacccgaccaccggcggcctctactactggagcgccaagctcgccggcaaggactggggtccactcgcctgctggatcaccggatggtttaacatcgtgggccagtgggcttgcaccacgagcgtggacttctcgctggcgcagttcgtccaagtcatcgtcctgctcgccaccgggggagccaacggcggcggttatctggcctccaaatacgtcgtgctcgccatctactgtgccatcctcgtcctgcacgggctcatcaatagcctccctatccattggctggccttcttcggccagcttggagctttctggaatcttggaggtgtgtttgtcctgacggtgttgattccggttgtcgctaaggagagggcgagcatggagttcatgttcacccactgctacacagacgatgccgtggggatccacagcaaggtctacgtactcgccattggtttgctgacgagccaatactctctcctgggatacgacacttccgcccacatgtcagaggagacgaagaacgcggagtggagtggcccgatggggatcgtcgtctcggtcgcgctgtcgagcgtcttcggatggatctacctagtggccctgacatcggcggtgaccgccgacgacgtcccgtccctcctggaccctaccaacgacgccggcgggaacgccatcgcgcaggccctgtacgccaccttccgccggaggttcggcagcggcgccggcggcgtcctgtgcctggcggccatggccgtcgccatattcctctgcggcgtcgcgtccgtgaccagcaactcgaggatggggtacgccttctccagggatggagccatgccgctgtcgcaggtgtggtaccgtgtcaacaagcaggaggtgccgttcaacgtcgtctggctctccgtctcggtggcattcgtcatggcactcacgtcgctggggagccaggtggcgttccaggcaatggtgtccatcacgacgctgggcatgtacatcgcctacgccctgcccatcttcttccgcgtcacggcggcgcggaactccttcgtcccggggccgtttcatctcggacgccgctgcagcctcgtcgtcggctgggtcgccgtcctctgggtggccctcgtcaccgtgctcttctgcttgccggtagcgtaccccgtcgccggggtcaacttcaactacacgccggtggccgtcggtggcgtgctggtgctcagcctcggcgcctgggtgctccacgcgcgcttctggttccgaggccccgtcaccaccattgacgcgtgacatgcccatggtcgatcggccctcacactaatacaaaatagctcaaagcatgtggtggaatttaattttcataggcggttttagttatcaaacatcattgttattgttaatggttatttcttaaaaaaccgccactaaaaa

SEQ ID NO: 111909 - DNA, 1888 bp, Zea Mays
gttggctcggtacatccgggctcttctgagcctggtcctcttactggaccaggctcaggctgggccagacaaccaaacacatcctacgtctcctcattcacattcatcctgtcggactgtagcgcgcacgccccggccggatcagagagatgggcaccgtcggcggcggcgagcttcccgtcgccgccccggccgccgccgacgcagaccgggcgcggctgcagcagctggggtacaagcaggagctcaagcgcggcctctccgttgtttccaacttcgccttctccttcgccatcatctccgtgctgacgggcgtgacgacgacctacaacaccgggctgcgctacggcgggccggcgtccatgacgctgggctggctcgtcgtggcgaccttcaacggctgcgtggcgctgtccatggcggagatctgctccgcctacccgacctccggcggcctctactactggagcgccaagctcgccggcaacgaatgggctccacttgcctcctgggtcaccggatggttcaacatcgtggggcagtgggcgtgcaccacgagcgtggacttctcgctggcgcagctgatccaggtgatcatcctgctgagcaccggtggggccaacggcggcggctacctcgcctccaagtacgtcgtgcttgccatctacaccgccatcctcgtcgtgcacggcctcatcaacagcctgcacatccagtggctctcctggttcggacagctcggagccttgtggaacgtcgcgggcgtgttcgtcctcgtcatcctggtcccgtcggttgccaaggagagggcgagcgccgagttcgtcttcacccacctcaacaccgacaacggcatgggcatccacagcaaggcctacatcctcgccgtcgggctgctcatgagccagtactccagcattggctacgacacgtcggctcacatgacggaggagacgaagaaggcggactggagcgggccgatggggatcgtgtactcggtcgctctttccagcgtgttcgggtgggtttacctgctggctctcacgtcggtggtcactgacatcccgtacctgctggacaccggcaacgacgccggcgggtacgccattgctcaggccctgtacgacacattccgccggagatacggcaccggcgccggcggcatcgcctgcttagtcatcatcgccgtcgccgtcttcctctgcggcaccgcctgcgtcaccagcaactccaggatgggctacgccttctccagggacggggcgatgccgttctcgcacctttggtaccgggtgaacaagcaggaggtgcccttcaacgtcgtctggctctctgtgtccgtggcgttcgtcatggcactcacggtgtgcatgcatgcgatgcgaaagctctttcatctcctcagcttctcaactgctcgcactactcacatctgtgcacatgcagtcgctggggagccaggtggcgttccaggccatggtgtccatcgcgacgctgggtctctacatcgcctacgcgctgcccatcttcttccgcgtgacgacggcgaggaagtcgttcgtcccagggccatttcacctcgggagatgcggcatcgctgtcggctcggtggccgtgctatgggtggccctcgtcaccgtgctcttctgcctgccggtggcgtaccccgtcgccaaggacaccttcaactacacgccggtggccgtcggcggcgtgctggtgctcagcctcgtcgcgtgggtgctccacgcccggttctggtttcgtgggcctatcacaaacgtctgacgttgtttgcaggcttcggtagttactttcgatgcattttatgtagtgtcaatctgttttaatgtcattgaacataaacatgaatatgaatatactccta

SEQ ID NO: 111910 - DNA, 1844 bp, Zea Mays
gttggctcggtacatccgggctcttctgagcctggtcctcttactggaccaggctcaggctgggccagacaaccaaacacatcctacgtctcctcattcacattcatcctgtcggactgtagcgcgcacgccccggccggatcagagagatgggcaccgtcggcggcggcgagcttcccgtcgccgccccggccgccgccgacgcagaccgggcgcggctgcagcagctggggtacaagcaggagctcaagcgcggcctctccgttgtttccaacttcgccttctccttcgccatcatctccgtgctgacgggcgtgacgacgacctacaacaccgggctgcgctacggcgggccggcgtccatgacgctgggctggctcgtcgtggcgaccttcaacggctgcgtggcgctgtccatggcggagatctgctccgcctacccgacctccggcggcctctactactggagcgccaagctcgccggcaacgaatgggctccacttgcctcctgggtcaccggatggttcaacatcgtggggcagtgggcgtgcaccacgagcgtggacttctcgctggcgcagctgatccaggtgatcatcctgctgagcaccggtggggccaacggcggcggctacctcgcctccaagtacgtcgtgcttgccatctacaccgccatcctcgtcgtgcacggcctcatcaacagcctgcacatccagtggctctcctggttcggacagctcggagccttgtggaacgtcgcgggcgtgttcgtcctcgtcatcctggtcccgtcggttgccaaggagagggcgagcgccgagttcgtcttcacccacctcaacaccgacaacggcatgggcatccacagcaaggcctacatcctcgccgtcgggctgctcatgagccagtactccagcattggctacgacacgtcggctcacatgacggaggagacgaagaaggcggactggagcgggccgatggggatcgtgtactcggtcgctctttccagcgtgttcgggtgggtttacctgctggctctcacgtcggtggtcactgacatcccgtacctgctggacaccggcaacgacgccggcgggtacgccattgctcaggccctgtacgacacattccgccggagatacggcaccggcgccggcggcatcgcctgcttagtcatcatcgccgtcgccgtcttcctctgcggcaccgcctgcgtcaccagcaactccaggatgggctacgccttctccagggacggggcgatgccgttctcgcacctttggtaccgggtgaacaagcaggaggtgcccttcaacgtcgtctggctctctgtgtccgtggcgttcgtcatggcactcacgtcgctggggagccaggtggcgttccaggccatggtgtccatcgcgacgctgggtctctacatcgcctacgcgctgcccatcttcttccgcgtgacgacggcgaggaagtcgttcgtcccagggccatttcacctcgggagatgcggcatcgctgtcggctcggtggccgtgctatgggtggccctcgtcaccgtgctcttctgcctgccggtggcgtaccccgtcgccaaggacaccttcaactacacgccggtggccgtcggcggcgtgctggtgctcagcctcgtcgcgtgggtgctccacgcccggttctggtttcgtgggcctatcacaaacgtctgacgttgtttgcaggcttcggtagttactttcgatgcattttatgtagtgtcaatctgttttaatgtcattgaacataaacatgaatatgaatatactcctatacacaggtattgtggttggaactggaaaagcttagtt

SEQ ID NO: 111911 - DNA, 933 bp, Zea Mays
ctcaaaaattttcagccgccaccagcagccttctcttcctccccacgtctccttcctcctcttgccgtgcagcagcaagcacctccctggcttcccttgcgcagggggctttcttctccatgggcgctggccaagatcaccccatggcgcttggctccctggaacacagcagcacgccagcgcagggccttcccatggctgcgagctccttctcccggcgagcggctgcagcagggggtcgtctcctccatggcgcggacgaactacctccctgcaggcaagcagcagccccctcagctccttctatggcgcccagtctgcatgcacgaccgagatccatcagttcctatgttccccatggccgagctcgccccatggacttggctccttggttcttctttcacgtacgcgccctctccaacctgcagcacgtcccctgctccacggccagcaggaagccagcgcccctctgcagctcggcttctcctctcccatggccgaggccgagcttccctggtgcaggcgcccccttttcttccacctctggccggtcttttctgcgcagcaagccgcgcgcagcagcagcattgttcttcgccttgcgtcgtcgtcgagcttcgccactctcctccccatgacccgcagccctcgcaccctctaccctccccaaaaacagcaagcccccagcagccccggattccctccgtgtcgcttgcatgccacccgctcgatgtattgcgcagccacattgtcgctgctcgctgcccgtcaacgtgcagcccttctgttttctccattggcacagcagccccgtcgtctccgcgcgctgccggctcgctgttttgtggagccaatggacagcacgccgtgatgcctgccgtgtgttcgctgtttttgcgcagccccaaacatcgacgtcgttcaccccggtga

SEQ ID NO: 111912 - DNA, 729 bp, Zea Mays
atctcgcctccgcccccaacagcccagctatctgcctagctgttacgagcctgctgtgaaagaaaaaagagacggcaatacgtgttcaaaggacgagatcttctttgcagcacagtggatgcaactccaaggctgattcacacacaattcgccagtgcctcaaacgagggaaattaagcagctatctccttcctctggctctcccacctttcttctcgtctatatagacagacagtccatcgccaccgctctcagctctttccttctggtctctcgttggtcgtagagctagcggcggcggccatattatggtgcaaggcgaggagagttcctgggaggatggagagggcagcgctgcctctcaaccaggcgctcgcgtatggagtccaagcccacggcgccggcggcgccgccggcttgggcagggacttccaccagcctgcggccgcggccgctgcctacttcgggttcggggagctggaggaggccctcatccatggcggcggcggcggcgtcgatcccggcgtgatcaccaagaacgacgtcgcgcaggcaaagttccggacttctagggtactttgccagaaaggctcgtccgtttcttgcgacacgggcacagcgccgcacagggcgagacatgcctcgccttttgtgctcctgccggttaccattcctatgcaagcaagcaaacacagtgtgcatgtgccgcagccgcacctgcatgtaatg

SEQ ID NO: 111913 - DNA, 4283 bp, Zea Mays
atggcatctagtacaaaatcagatttagtgtctggtagccctgatgggcatggatacttcaatgcacaacgtgggtcctatgcagctgcttcattggaaaggtcaggaagcttccgtgaaggcggtgatggctatgcgatgttttcagcatcaaactcatcaaggtcagcggcagtgaactctatcaatctagttcagtcacttgcactggacttgagaccggcaactgtggatcacaaaacatctcggttagatctaaagaaatcaataagttccatttttggaacctctgcagaagattcaacatcacttccatctctagggagaaatttaccaaatgctatcgaagagatcagacgtatgaggagtaatcttaacgacaattcaaataaggccagggaaagatctagagcttttggtggtgctatggcgaagattgataaactttgtcccaatattgtgcgaaaacgttctcgaggagacagttcatctaatgaacgatctagtgtgttatcatctggaggagttacccctaaaaatgttcctcagagccatttaaatgcagatgatatggaagctgggcttcagagagaagagaggacaaagaatgcaggacaaaataggagaatacgtacatccatggtggagggcaagcttggtgcagtggtgagagctgtctcaccgagtctccaggtcgcaggccttatttggcaatgtggcttagttgctgtttttagcatgatggatgcaagaacagctggtccatcaagaggccccggacctactgataggatctcagatcctggtaaagccaccaatggcagttctgcagttccagaagaaaaaatcagaggtttggcaactactatcgatggttgggaaaagccaaaaatgaagaaaaagcgttctaccattaaggcagacatgtcactggctggtgttttgaggactgttgatgtagaccgagagtcaaaacaaggcatgcagcacaagtttactaatgacggtagggcgagaatgacaagttctagtttcaggtctggaactgttgcatctggcacaaccaaagcagatttgctttctacacaaaatggtcttgttatgcgacccttaaataggagtgatcaagacaatggtttccatcctactaacaaaagggaacgtcaagctgcattagataaagaaacgcccaacccgagaaccattaacaagcctaatgaagacgacagtggatgtaacattgcatcattaccgaaggcgaatggatctgcgcggggaccccgatcaaattcagggtcaatattgaagtcatatccaaacattcatcgatcacaagctagttctgatgattgggaacatccgtctggtacaaataagttaatttctgctggtggatctggcattcataaacgtacaaaatcaacacattcattatctcctccgatccaatggggtgggcagaggcctcagaagatatcccgttcagcaaggaagtcaaatttagtccctataatcactactgatagtgcactggtaccaggttcgctggacagtcctgtcaatgaagattgtgcaggtttaccgaggcgtgcatctgtaaatagccttcaacaaacaaaacgaggagatcatgggctctcaactggacctgaaggcaatgagcctgtagttgctgagaaaaagctaagggacaagggcaaaagggctggtgaactggatgatgggcatggctctggttttcagaagattgctatgcttgggcatccttccaaaaggaataagttgcctgctgatgaggatattggagatgctttaaggagacaagcaagagttgtcccgggttttactctgaccaggcctgggactcctgtatccattgacaagcttgaaaatgctccgattacaaaacaaagaagtgtgaggacagtctcagagagaactgagagtaaatctgggagaccactgatgaagaaaatatctgagcgcaaaagtaatgcacggcctaggcatacaagtagcagtgtgcagtcagactctcctgtgcaatctgaagatgatcatgaggaacttcttgcttcagcaaatgctgccctaagatctgcttgtgcaagcacgttctggcggcaggttgaacctttcttcgcatttttgactgcagaagacatcacatatcttagtcaacagatacatttaccagatgattcctcttcaagtaggtcaatggaagggggtgaatgccaaaaatataagggtggtcttgaatacatttcacacccctcaactccagccgctagcaacaaagatgatcacgctgctcttccaaatggttttggcttgaatcagttggataatgacataggggttggctgggaggcaagctgcattgaacctatcctcgatcaacttgtccatgggattggggtaccaggatggtcttcagttggccaaagacttattcaagcattgattgatgaagataggatcgatagtattaccaacaacacttacataagcgagggctatgcatttgatacacatgaaattcattttgatggaggaggatggaagcctcactcaaataattataagttagaacctttagcgaattttgaagcttcaaggaggggcccaaatggtctgacaatggattctgactggaaatataatgatgtgtcaaatagaagtggcaatgtcatggataaaaccaaggtgtggcctgagtttcagtacagtgagatgtgcttcaatgataggattatcattgagctgagtgaagttggtgtatctattgaacctgtggggacggtggtcgtggttggtctgagggcacacagcagtgagggacttagggaagtgaaaggaagcggagaggtgagcgatggcggcgcatctagaggacagagggaagcgggaatcgtggcggcagcatggggcagagcagtgcaccaagggtcagggctatttctagcgcttaatgctgtgacagctgaggtcgtcctattacagcatgagataaggatagagttccctgtctgtattaagcctgatcttgcacagagtgaggacgaggatattaatgctgaaatctgtaaattagaaggccaacttcgtaaagaggttgtggagaagaaaaacttgctattgaaactggatggcattgttgcaactgcaaaagagtctcagcatagggaattctcacgccttgccatggatagacttctcctgagagcatatgagaaatatatggaagggtgcagcattagcgtcagcatgtggtccagagtggttggtgataggacctcaagctgtgtggtgtccgtctcctctagaacctgcaaatgggagagggagagtagcctcatcaaatccatctaccggcggaagtccacggatgggatgtggtcagtggccttctgtggtccaaatgtttcaagcagcaaaaatgtcaatagaactggcaaacatgctgctctaagttttgtcaaacgagtactagtgcgatgccaaaactacgaagaggcggggacaagttgctttgatgagcctattttcaaggacatgtttttatcagcgacgtctcacagacgcagtctagatactgcttcacaagataacaatacaacagcgagaccagtccacagggccggtgcaccagacgcttcgcgaggaagcagtcacccgacggacctgtcgtttgcaaaggaggatccctggacaaacaacgtaaagcagcgggaactgttgctggacgaggttgtaggtagcataacaggaggagctctgagaacctcctcctccgtccttggtatctccctcgtcagcaatacgaaagggaagagaagcgagagggaagggaaggggcacaaccgagacagcctcaggtccggccgtccgtcgccgtccaacgcaaagggtgaaaggaagaacaaaacaaagctcagacagaaggcagccaacatctctgctccttcaggaggtctacagcttccagcgaaaacaacgcctcccagcagtgggaacggcaaggaggagagcgcagcagcagcagcagctgctgctgccaggcatggtggtgatccggcggcgaatgcttcgaatgacgccgaaatgcccgacctggctaacctcgagctgccaggactggacgccgactttggcggctggttgaatctggacgacgacgacgccctccaggacctcgacctgatgggcctcgagatccccatggacgacatcaacgagataaacctcatgatatagccgtacattttccttcgtttctc

SEQ ID NO: 111914 - DNA, 1546 bp, Zea Mays
agcagctaggagaaactaaccatggccgcctctcgccgctcttccgttgagctcccagtcgccgacccggcggcggatccagaccaagtccggctgcaccagctgggatacaagcaggagctcaagcgaggcctctccgtcctttccaacttcgccttgtctttctccatcatctccgtgctgatgggcgtgacgatcacctacaacaccggcctgcgctacggcgggccggtgtccatgacgctgggctggttcctcgtctccgccctcaacgcatgcgtggcgctgtccatggcggagatctgctcggcgtacccgacctccggcggcctctactactggagcgctaagctcgccggcaaggactgggctcccctcgcttcctggctcaccggatgtgggcaggtacgacgagcgtcgacttctcgctggcgcagcttgtgcaggtgatcgtcctgcttgccaccggaggcctcaacggcggcggctacatggcatccaagtacgtcgtgctggccatctacggcgccatcctggtcatacacgggctaatgaacacctggcatggttcggccatctcggagcgttctggaacaccgcaggtacatttgctcttgtgatcatcatcccagccgttgcgacggagagggcgagcacggagttcatcttcacgcatttgaacacagacaatggcatgggcgtccacggcaaggcctacatccttgccttggggctgctgatgagccagtactcgctcatcggctatgacgcatctgcacacatgacggaggagacgaagaacgcggactggagtgggccgatggggatcgtcacctccgtcgctctgtccagcgtcttgggatgggtctacctggtggccctggcgtcgctgatgacggacatcccgtacctcctggaccccggcaacgacgccggcgggtacgccgtcgcgcaggccctctacgacgctttccgcaggaggttcggcagcggcgtcggaggcgtcgtttgcttggggatcgtcgccgtcaccaccttcctctgcggctccgcgtgcgtcaccagcaactcaaggatggggtatgccttctccagggacggagcggtgccattctcgcacgtatggtacaaggtgaacaagcaggaggtgcccttgaacgtcgtctggctctccgtgtccgtggcgttcgccatggctctcacgtcgctggggagccaggtggcattccaggcgatgctgtccgtggcgaccgtcgggccgtacatcgcctacggactgcccatcgtcttccgcgtcaccacggcccggagatccttcgtcccggggccgttccacctcgggagatacggcctcctcgtcggctgggtcgccgtcgcgtgggtggccgccgtcaccgtgctcttctccctgcccgtagcgtaccccgtcgccgaggacaccttcaactacgcgccggtcgtcgtcgtcggcgtgctgctgctcagcgtcggctcgtgggtgctccacgcccgcttctggttccaagggccaatcaccaacgttgat

SEQ ID NO: 111915 - DNA, 175 bp, Zea Mays
gctagcgctttactttaatcaatgaacatgatgagatacaatgatgatactatggtcttattctggatatgatgatatacttgtggcatttaaggggactcgggctgtttcccgagtacctctccgtaaggacctgttcgttgagagaccacccgggataacagtgcaaccatga

SEQ ID NO: 111916 - DNA, 1957 bp, Zea Mays
atccaccacaccactcgagcgcgcgcgcggcccaccgctccgccgctgcccgcccgccgccatgcgagggatcctctcctcttcctccgctctcctccggcgagccggcgcccagctctcgcgcacggactgcagtagcccctcagcgtccgcgacctctcctctccgccgctcccctcttcagaatgggaaaagagacacattttgttcgctttggttcaaaggtcgttcggtatcaaccacagttgatatgcagttagactatgagagtgatccccctcttgacgatacaaaagctattgagaaggagtcatcacttaatgttgctgtttctcaactcgcaattgacttcgatagagactctaatttatgtttggagcgattttcccgtgcaaggaaagcatctgtagtctctactggttctcttaagcttgacctcgctctcggcgttggaggattaccgaagggtagaatggtggagatatatgggaaagaagcatctgggaagacaacactcgcgcttcatgttattaaggaagctcaaaagaatggaggttattgtgcttatattgatgcagaaaatgccttcaacccttcatttgctgaatctattggcgtagacagtgaaaggctcttgatagcccaacctgattctgctgaaaattctctaagcattgtaaacactcttgttggtggttctgttgctgttgttgttgtggacagtgtggcagcacttattcccaaatgtgaaattgaaggtgaaatatacacaaattgtggagacatccaatcccatttgatgactcgggcccttagaaaaattcagtacactttatgtcgatctgaaacacttattatttttgtgaatcaggttagaacaaagaggacatcaagtaatcctgggatctacaaggaggtgccttgcggtggtaatgcactaggattctatgctgcagtcagaatgaggacttcaaggagagaactgcgctatagtgaagatgaggctaccggcgtaggtatatcagtgcagatcatcaagaacaaattggctccagcgaacctgaagaaggaagccggcatcgacatcacattcggtaaggggatctgccacgagtcggagatcctggagacggcttcctccgtcggagtgatcctgaaagacgggtgtgggtattggatcaacaacgagttcctggcaggcaaggtggaagcggagaagttcctgcgtgaaaacgctgcagtggcagatgagatctgcaataccgtgaggaacgagttcttgcaaaggtgacatagggcgaccgattagagaggctaatgcattgttagtcggaaatgttgtaccgtcatgtattcatagaagaagatttatgtaggatgttgctgtgcctgtcgtgtaactttgactcgcaacagttcattgagtttaccagggccattccctcccagatcatatcgttaggttcttctatgttgctggttgaattcagggctgacttgtcatcacacggcttgagggacggccaagaattccaaactgtgcgccgtgcgcggatacgtgttctgtccacagcaagcgaagtggcgtgcaagcgcccctgggaagggattgggtgcgtggacaaagctccacccttgattctgtaaccgcgtgttttgtccctgctcttctctgtcagcgaagcggaggaagcagtcatcggtgcggcaaatgacaaagaaggtttggctgcaacagcaggagatgggccgtgtcgggccaaaaggctgaggaagtgcaacccaaaggtctttgggccggcgtggctaaacagcacaaagtaatccagccgattattaaataagggttcggcggcgcgtagggtttttaggctgtaacagaactctagactctagttcttcttcctttccaagtactatctcaactactctgttctccgtctctgcattctccaga

SEQ ID NO: 111917 - DNA, 2483 bp, Zea Mays
atccaccacaccactcgagcgcgcgcgcggcccaccgctccgccgctgcccgcccgccgccatgcgagggatcctctcctcttcctccgctctcctccggcgagccggcgcccagctctcgcgcacggactgcagtagcccctcagcgtccgcgacctctcctctccgccgctcccctcttcaggtatgatgaccgcgtatctcgctgccgctccctcgatcgcgggctcgtggcttgttgccgtgtgctagggactgtaacttccttttgcaatagaggattttcagtcggactggtaagtcctctttgctagttaatgttgttaaactgcccttgacctttgttgggttagattggctgaaacagctgatatctgcaacggtttgaccatgagcgtacaagttctgctttgctggctcctgctcatgtgcacaagctactaaaacatagaagagtgagattcggagaaatatgcattatgggctgtaatgctgtacaatagtgctattcccacgtcagccttttcccactaggggagaactgtggcttttggtttcaaatggtgtatgtgctgctttactgtttcgttctcactggctttaataccttcataagtgaagtatcgagttcacaatgcctacttgctcatatttcaagagatctgcgcaaattgctgataatctttcttccctgtgatgtcatttgctagaatgggaaaagagacacattttgttcgctttggttcaaaggtcgttcggtatcaaccacagttgatatgcagttagactatgagagtgatccccctcttgacgatacaaaagctattgagaaggagtcatcacttaatgttgctgtttctcaactcgcaattgacttcgatagagactctaatttatgtttggagcgattttcccgtgcaaggaaagcatctgtagtctctactggttctcttaagcttgacctcgctctcggcgttggaggattaccgaagggtagaatggtggagatatatgggaaagaagcatctgggaagacaacactcgcgcttcatgttattaaggaagctcaaaagaatggaggttattgtgcttatattgatgcagaaaatgccttcaacccttcatttgctgaatctattggcgtagacagtgaaaggctcttgatagcccaacctgattctgctgaaaattctctaagcattgtaaacactcttgttggtggttctgttgctgttgttgttgtggacagtgtggcagcacttattcccaaatgtgaaattgaaggtgaaatatacacaaattgtggagacatccaatcccatttgatgactcgggcccttagaaaaattcagtacactttatgtcgatctgaaacacttattatttttgtgaatcaggttagaacaaagaggacatcaagtaatcctgggatctacaaggaggtgccttgcggtggtaatgcactaggattctatgctgcagtcagaatgaggacttcaaggagagaactgcgctatagtgaagatgaggctaccggcgtaggtatatcagtgcagatcatcaagaacaaattggctccagcgaacctgaagaaggaagccggcatcgacatcacattcggtaaggggatctgccacgagtcggagatcctggagacggcttcctccgtcggagtgatcctgaaagacgggtgtgggtattggatcaacaacgagttcctggcaggcaaggtggaagcggagaagttcctgcgtgaaaacgctgcagtggcagatgagatctgcaataccgtgaggaacgagttcttgcaaaggtgacatagggcgaccgattagagaggctaatgcattgttagtcggaaatgttgtaccgtcatgtattcatagaagaagatttatgtaggatgttgctgtgcctgtcgtgtaactttgactcgcaacagttcattgagtttaccagggccattccctcccagatcatatcgttaggttcttctatgttgctggttgaattcagggctgacttgtcatcacacggcttgagggacggccaagaattccaaactgtgcgccgtgcgcggatacgtgttctgtccacagcaagcgaagtggcgtgcaagcgcccctgggaagggattgggtgcgtggacaaagctccacccttgattctgtaaccgcgtgttttgtccctgctcttctctgtcagcgaagcggaggaagcagtcatcggtgcggcaaatgacaaagaaggtttggctgcaacagcaggagatgggccgtgtcgggccaaaaggctgaggaagtgcaacccaaaggtctttgggccggcgtggctaaacagcacaaagtaatccagccgattattaaataagggttcggcggcgcgtagggtttttaggctgtaacagaactctagactctagttcttcttcctttccaagtactatctcaactactctgttctccgtctctgcattctccaga

SEQ ID NO: 111918 - DNA, 1889 bp, Zea Mays
acaccactcgagcgcgcgcgcggcccaccgctccgccgctgcccgcccgccgccatgcgagggatcctctcctcttcctccgctctcctccggcgagccggcgcccagctctcgcgcacggactgcagtagcccctcagcgtccgcgacctctcctctccgccgctcccctcttcagttgatatgcagttagactatgagagtgatccccctcttgacgatacaaaagctattgagaaggagtcatcacttaatgttgctgtttctcaactcgcaattgacttcgatagagactctaatttatgtttggagcgattttcccgtgcaaggaaagcatctgtagtctctactggttctcttaagcttgacctcgctctcggcgttggaggattaccgaagggtagaatggtggagatatatgggaaagaagcatctgggaagacaacactcgcgcttcatgttattaaggaagctcaaaagaatggaggttattgtgcttatattgatgcagaaaatgccttcaacccttcatttgctgaatctattggcgtagacagtgaaaggctcttgatagcccaacctgattctgctgaaaattctctaagcattgtaaacactcttgttggtggttctgttgctgttgttgttgtggacagtgtggcagcacttattcccaaatgtgaaattgaaggtgaaatatacacaaattgtggagacatccaatcccatttgatgactcgggcccttagaaaaattcagtacactttatgtcgatctgaaacacttattatttttgtgaatcaggttagaacaaagaggacatcaagtaatcctgggatctacaaggaggtgccttgcggtggtaatgcactaggattctatgctgcagtcagaatgaggacttcaaggagagaactgcgctatagtgaagatgaggctaccggcgtaggtatatcagtgcagatcatcaagaacaaattggctccagcgaacctgaagaaggaagccggcatcgacatcacattcggtaaggggatctgccacgagtcggagatcctggagacggcttcctccgtcggagtgatcctgaaagacgggtgtgggtattggatcaacaacgagttcctggcaggcaaggtggaagcggagaagttcctgcgtgaaaacgctgcagtggcagatgagatctgcaataccgtgaggaacgagttcttgcaaaggtgacatagggcgaccgattagagaggctaatgcattgttagtcggaaatgttgtaccgtcatgtattcatagaagaagatttatgtaggatgttgctgtgcctgtcgtgtaactttgactcgcaacagttcattgagtttaccagggccattccctcccagatcatatcgttaggttcttctatgttgctggttgaattcagggctgacttgtcatcacacggcttgagggacggccaagaattccaaactgtgcgccgtgcgcggatacgtgttctgtccacagcaagcgaagtggcgtgcaagcgcccctgggaagggattgggtgcgtggacaaagctccacccttgattctgtaaccgcgtgttttgtccctgctcttctctgtcagcgaagcggaggaagcagtcatcggtgcggcaaatgacaaagaaggtttggctgcaacagcaggagatgggccgtgtcgggccaaaaggctgaggaagtgcaacccaaaggtctttgggccggcgtggctaaacagcacaaagtaatccagccgattattaaataagggttcggcggcgcgtagggtttttaggctgtaacagaactctagactctagttcttcttcctttccaagtactatctcaactactctgttctccgtctctgcattctccaga

SEQ ID NO: 111919 - DNA, 1020 bp, Zea Mays
atggcgattacgcaagactttgctcctttggctgttggggcaattgttgttggagttcttgcctcccttctgtcaggtgcgcagtcccacggcgtgtgctacggcatgacagccgacgacctcccaccgccgagcgaagtggtgcagctctacaaatccaacggcatcgccaacatgcgcgtctactcccccgtcggcgaggtgatggaggccctgcgcggctcgggcatcggcctcgtcctcggcgtcgccaacgaggacgtcgccagcctcgccacgtgcgcgccgtgcgcggcgtcgtgggtggaggccaacgtcagaccctaccaccaggacgtgaacatcctgtacatcgcggtgggcaacgaggtcgacgcggccgccgccgcccagaccatcctcccggccatgcggagccttcaggccgcgctggctgcggcggggctcgccggcagcatcaaagtgtccacgtgcgtgaggctcgacgtggtcaccgacaccttcccgccctccagcggcgcgttcgcgcagccctatatggtggacgtcgcgcggttcctggcggccgcaggcgcaccgctgctcgccaacgtgtacccgtacttcgcctaccggggcagcccgggcgacgtgggcctcggctacgcgctgttccagccgggcgcggcggtgagggatggcggcagcgggctggtgtacacgaacctgttcgacgccatggtggactccgtccacgccgcgctggagaaggccggcgcgcccgacgtcagggtcgtcgtgtcggagagcggctggccgtccgccggcggggcggccgccagcgtgcagaacgcgcaggcgtacgttcagaacctggtagaccacgtcgcccagggcacgcccaagaggcctgggccgctggagacgtacgtgttcgccatgttcaacgagaaccagaagcccggcgagccgacggagaagaacttcggcctcttctatcctagcaaggctccggtttatcctatcgttttccgacgctga

SEQ ID NO: 111920 - DNA, 1279 bp, Zea Mays
cgttgtatccaagagagcaaactagtgagtgagagagagacagagagatcatcgatcgatcgacgaccatggcgaggcaacgacaagttgcttccatgcttgcagctgctctgctcgttgcaacgacgtttgcgtccattcctacaaccgtgcactccatcggcgtctgctacggcacgctgggcaacaacctgccgtccagcagcgacgtggtgcagctctacaggtccaagggcatcaaaggcatgcgcatctactcccccgacgccaaagccctcgccgccctgcgcaactccggcatcgcgctcatcctcgacaccggcaacggcggcggcgtcctgggccagctcgccaggagcgcctcgttcgcggactcgtgggtgcagagcaacgtgcggccctactaccccgccgtcggcatcaagtacgtcgcggtgggcaacgaggtgcagggcgacgacacgcgcagcctcctcccggcgatgcgcaacctggacgccgccctggcgcgcgccggcttcccgggcatcaagtgctccacgtcggtgcgcttcgacgtggtcgccaactcgttcccgccctccagcggctccttcgcgcagggctacatggcggacgtcgcgcgctacctggccggcaccggcgcgccgctgctcgccaacgtgtacccttacttcgcgtaccgggacaacccgcgcgacatcagcctgggctacgccacgttccagccgggcaccaccgtcagggacaacggcaacggcctcaactacaacaacctgttcgacgccatggtggacgccgtcgtcgccgcgctcgagaaggccggcgcgcccaacgtcagggtcgtcgtgtccgagagcggctggccctcggccggcggcttcggggccagcgtcgacaacgcgcggaaatacaaccagggactcatcgaccacgtcggccgcggcacgcccaagaggaccggcccgctggagaccttcgtcttcgccatgttcaacgagaaccagaagggcggcgatcccacggagaagaacttcggcctcttctacggcaacaagcagcccgtgtacccgatccggttcaactaattaagagtggcggatcggaggaataatacatcttcatcaatcaattaacctaataatatgctacatgaataagctgctgcgtgcatgtggccggccggacttgtggaggagcggtgcaattaacttgtatgcacgtactctatctatatatgatgaataaaaagagatagaattctgatgcattcatctta

SEQ ID NO: 111921 - DNA, 1497 bp, Zea Mays
aggagcagtgagaactgcatgcaagaggcacaaagcagcagctagcagttcattcaggttagtcatcagaggtgacatcgctctggaactggaagacaagcagcaggaagacagagagatcaatggcagcgcaaggtgctggagcatcagcttctcccctgtccggcttccacgtggcgctgctcctcctcctcactatcttggcttccatccttgcaagggcggcgtcggtgggcgtgtgctacggcacgagcggcgacaacctgccgccggcgagcgcggtggtgggcatgctgcgcgacaacggcttcacggtggtgcggctctactggcccgacggcgacgcgctggcggcgctgggcgggagcgggatccgggtggtggtgggcgcgcccaacgaggccctgccggcgctggcgtccggcgcggccgcggccgcggcgtgggtccgcgacaacgtgcaggcgcacccggcggtggcgttccgctacgtggtggtgggcaacgaggtccccctggagcaggcgccgctgctcgtgccggccatggagaacgtgcacgcggcgctggcggccgccgggctgggccacgtgaaggtcaccacggccgtctcgcagggcgccatcgccgtgcacctgcctccgtcggcgggcgagttcacggaggaggcccgctcgttcatgggctacgtggtggcgttcctggcgcggacccgcgcgccgctgctggccaacctgtacccctacttcgtctacacgctggggctgggccacctgggcatggacttcgcgctgttcacggcgcccgggacggtggtgcaggacggggagtacgggtaccagaacctgttcgacgccacggtggacgcgctgtacgcggcggtggggaggctcggcgtcgccggcggggacggcgtcagggtggtggtgtcggagaccgggtggccgacggcgggcggcgccgcagcgtcgctggagaacgccaggacgtacaaccagaacctggtgaggcacgtgtggaagggcacgccgcggaggcccaggagggtggaggcatacgtgttcgccatgttcaacgaggacaagaaggacgccggagtggagcagaactggggcctcttctacccgaacatggagagggtttaccccatcacctttggagccggacggcgacactgacgacattatagaaggagcttggtggacgacgaccggtgcattgcatgcaatgatcgaatttgcactcgaccgatccaagaaatgaatacgtactggggtcatggtgtgtgtgttttatttgcgtgtacacagcattcaatgtacaatatatagaggaattgttgcgaccgctgagcgtttgtttgctcagacgtgtacgcggagaggggtcgatgcgtagctgggtctgggtgtacgtaaacgtcatgcgtagcagtatgcacaagcgtatgtacattccgtgactcttgtgagctatatacttgtgaatttgtgatga

SEQ ID NO: 111922 - DNA, 1197 bp, Zea Mays
atgcacaagtggtggcgcagccccgggcccgccctgctcgccgccgcactggcgatcgtggtggccgcgctgcggccggcgacggagcacgcggccgccaaggggcgaccgccgctgcggttcgggccaggaggagcgttcaaggtggccctgttcgcggacctgcattacggcgaggacgcgtggacggactgggggcccgcgcaggacgccgcgtccgaccgcgtcatggccgccgtcctcgacgccgagaacccagacttggtggtgtacctcggcgacctggtgacggccaacaacctcccggtcccgaacgcgagcctgtactgggaccgcgccgtctccgccgcccgaggccggggcgtgccgtgggcgacggtgttcggcaaccacgacgacatggccttcgagtggccgcccgagtggttctcccccgacggcgtcccgccgctgcgctggccgccgggtccaggatcagggtgcggcttccgtgggactccccggacggacctcatggcggcggagaccggcgcgaaccggctgctgtcctactcgtccagcgggcccagggagctgtggcccggcgtctccaactacgtcctgcaggtgctctcgcggggacggcgggcccgcggcgacggtcacgaccacgacccggctctgctcatgtacttcctcgactcgggcggcgggtcgtacaccgaggtggtgtccagcgcgcaggtcaggtggttccacacccagtctcagttcctgaatccagatggaaggatccccgagctcatcttctggcacataccgagcacggcgtacgccaaggtagctccgaaggccaagtctgagataaggaagccctgcgtcggctccatcaacgaggaggaagtggcgccgcaggcagctgaatggggcatgatggatgcgctcgccaagaggtcgtcggtgaaggcggtgtttgttgggcacaaccacgggctggactggtgctgcccctacgacggcgaggagcgggagcaggagctgtggctgtgcttcgcacggcacacggggtacgggggatacggtgactggcccagaggagcgaggatccttgaggtcacggaggagccattctcggccgtgtcatggatacggatggagaacgggaccaggcacagcgacgttacactaacctcctgaatccatctgcctgcttgattc

SEQ ID NO: 111923 - DNA, 1290 bp, Zea Mays
gcatgcagagtgcagtagaacggcatcagttacactagtagtgctcatctcgctggtactgctgagctgaccaccgccgatccttccaagatggcgaggcagggtgtcgtcgcttccatgcatgcgctggcattgcttctcggagcattcgcagccattcctacaggagtccaatccatcggcgtgtgctacggcgtgaacggcgacaacctgcccccggcgagcgacgtggtgcagctgtaccagtccaacggcatcaacctgatgcgcatctacttcccggacgccaacgcgctgaacgcgctgagcggcaccagcatcgggctcatcatggacgtgcccaacacggacctcgcctcgctggcctccgacccgagcgcggcggccgcctgggtgcagagcaacgtgcaggcgttcccgtcggtcagcttccgctacatcgccgtgggcaacgaggcctccggcggggacaccggcagcatccttcccgccatgaagaacctcaacgcggcgctggccaacgccggcctgggcggcagcatcaaggtgtccacggcggtgcagagcgacgtcacccagggcttcccgccgtcgcagggcaccttctcgcagggctacatggcgcccatcgcgcagtacctgcagagcaccggcgccccgctgctgtgcaacgtctacccctacttctcctacatcggcaacccggcccagatcgacctcagctacgcgctcttcacctcgccgggcaccgtcgtgcaggacggcagcaacgcgtaccagaacctcttcgacgcgctcgtcgacaccttcgtctccgcgctccagaacgccggcgccggcaacgtcccagtcgtcgtgtccgagagcggctggccgtccgccgggggcgacgccgccaccgcggccaacgcgcagacctacaaccagaacctcatcaaccacgtcggccagggcacgcccaagcgccctggccccatcgagacctacatcttcgccatgttcaacgaggaccagaagacgggagccgagtcggagaggcacttcggcctcttcaacccggacaaatcgccggcgtaccccatcaatttctcctaattcctaaacaagacgccgaggtccattccaagacatttataaggcaatacacacacatagatatatacatacacatacatacgggagaaagtagaataaataaactgcctgcagtagaatgcaaagtgtattcatgtaaggcaactgcttcgattatttcctaaagatcaataacaagaagtacaattatttcta

SEQ ID NO: 111924 - DNA, 270 bp, Zea Mays
atggagatttttaagcatatcagagatgtggattgttatcctaatgactctattgtttatagaatattatttattgtgcctcttactgttgcatctgctgaaagaagcttctcaaaattgaagttactgaagaattatttaagatcaacaatgagtcaagaaaggttgaatggtttggtgactttatgcatcgagaagaagctattggatgatatcgatttcaatagtataatcgatgattttgtataaaaaaatgttagaagaaatttt

SEQ ID NO: 111925 - DNA, 2047 bp, Zea Mays
ttcccccactactagccgcccctccctcctcctcccttcaacacccccgctcggcgccgcttcgcgccggtctcattcgcccgccattccgccgcgcgccgccgccagggcgccgcgtcccgggcacgcgcgcgtgcggtgcgggcgctggcgcgggcgccaggagagagagggagggaggtagcgaccgcccctgcccccggccccccggggatgctgccgtgatcgccgccgtgcgcctggagccggggggatggggcgggtcgggctcggcgtggcggcgggctgcgcggccgccacgtgcgcgatcgccgccgcgctggtggcgcgccgggcggcggcgcggtcgcggtggcgccgcgccgtcgcgctgctcagggagttcgaggacggctgcgccacgccgccgccgcgcctgcgccaggtcgtcgacgccatggtcgtcgagatgcacgccggcctcgcgtccgacggcggcagcaagctcaagatgctgctcaccttcgtcgacgcgctccccgccggaaatgaagaaggcacatattattccatagatctcggaggaacaaactttagagtgctgaaagttgaagttggtgatgggtctgtggtcactcgccgtaaggtcgagcttcccatccctgaggaattgattaagggtacaattgaggagttattcaactttgttgccgtgaccctaaaggagttcgtagaagcagaagatggtaaagacgaacaaagggcacttggtttcacattttctttcccagtcagacaaacatcagtatcttcagggtccttaattaggtggaccaaagggtttttgattgaagatgtggttgggaaagatgtggctcaatgcttaaatgaagctcttgctaggagtggactaaatgtgcgagttactgcactggtgaatgacactgtggggacgttagctctaggtcattatcacgatgaggatacagtggctgctgtgataatcggtgctggcaccaatgcttgctatatcgaacgcactgatgcaattattaaatgtcagggtcttcttacaaactctggtggcatggttgtaaacatggaatggggcaatttctggtcatcacatttgccaagaactccttatgacatctcccttgatgatgagacgcaaaatcgcaatgatcaggggtttgaaaaaatgatatctgggatttatcttggggaaattgcaaggctggtgctgcatcgaatggctctagaatcagatgtctttggtgatgccgctgataatctatccacccccttcacattgagcacaccacttctggctgcaattcgcaaggacgattcaccagatctgagcgaagtcagaaggatattgcaagaccatctgaagataccggacactcctctgaaaactcggaggctagtcgtcaaagtctgcgacatcgtcacccggagagctgcccgcctagccgccgctggcattgttgggatactgaaaaagctgggtcgggatgggagcggcattgcctcaagcgggagaacgcgagggcagctgaggcggacggtggtggcgatcgagggtggcctatatgagggctacccggagttcagggagtacctagatgaagccctggtggagatcttgggggaggaggtggcgcggacggtgacactggaggtgacagtggatgggtctggggccggcgctgccctcctcgccgccgtacattcgtcgaatagacagcaaggttccatatagggagaagggaagatggtgatacagcccctctgtgcaaatgtaaaaagggatattatttgatatctatattcatatatataaaatctggtcttgtgcagagaaatacctgttctcctatctcaagctcttatcactcttctgccttgctcttgtggatgtaggcgttgctgtgtactaggtttacctttttttttcagtgtggaagggaattatgattctttgtaagtccgagttgctgatgaactgatcttgtgaccaaaatggcaaaatgtcatgagtcatgacaagctgagataacca

SEQ ID NO: 111926 - DNA, 519 bp, Zea Mays
cgcaggctctccttgagatgagatgccagttacaagtgaaataacaggcagtgctatttgctaatcaatgcactaccctcatgcaaacttctgcactgttgttaacggaaaatacatacagaccaacatgatttcctcgggacactggttagtgatcagttgatcagcacagctcatctcaacgctgtaacaacagacaggttccttggaccgctacaaccctccaggctccactaccagtgattgcctccaaagttgcactcaccaccttcagggttcaggtgacgttgctccacattgaagtactgctttgagaagcctttaaatagcaggaaccgtcacaaagacaatgggagtgacgcctttgggaatattctctgtcctggtgctaggatggctaggggatcatatctgtgtttcctccgttcaaatgtctcccaccttgctccaaagctcatcgcatgtgcaatgctgccgtgacctgagagagacggtgctgaagaaaggaatcccactagg

SEQ ID NO: 111927 - DNA, 189 bp, Zea Mays
atgagcagacgcagagcgttggcagaacatttgcctccagacgatgtaagttagttgttaaattacattatgtaagttacttatgttgtatgatgtaagttacttgtttcataggatgctgaaatcgagtgacagtcgagagaagatgttgcagttggggcggtggtagaggaccatgcgatagatgat

SEQ ID NO: 111928 - DNA, 2064 bp, Zea Mays
atggaatgctcgcctccacgccattcatggcgccttcctcggtccccttccccacgtccgcgacgtcttgctgtactggtcggggctggtgacggctgcggcgtccttcgtggcggcggcctccgcggcgttcctgccggaggggaaccccgtcgcctccgccatcaccggcgctgccgacctcatgtacgcctgcgacgccgcgaggctggacctatcgccggtcctcatccacatctatgtgactatgtcaccacgataaagcgcttcctccaggtgctgtgggcgatcggggcgctcggctccgtcgggacctacctcgtcgccgctcgcccgctggatgagggcctcgtgcagtacgtggtggaccaccctgccgtgttgtggtttgtcggccccacgttcgtcgtgctcactggcctcgtcttcaaggaagggcccctccaacaatcgactatagaagatagtgggtttttttattttaatacacacgagtggtatactatctttggtgccgatagtcctgctattcaggagaataaggttgctacaatgcagtacatatccggtactggatctttaagagtcgaaagtgaatttcttgcaagcttatttttgaaggcttcttctgggaggacattaatcaccgcacaaattccacttgttgcgagccatccagatgtgcatgagccatgtgatgattcctttgcccttgttgatgcactactctcagataaagcacaactcttgacactacaaccaaggttatgtatggaggtagggtttggtagtggttatgtcatcacctcgcttgcaatcatgctcaggcagttaggctctggagcccagtacctagcaactgacatcaaccaacatgctgccgagacaactcaagcgacccttgaagctcatggggtgcatgcagatgtgattgttactgacatcatgtctggtcttgataaacgccttgctggtatggttgatgtggcagttgttaaccctccttatgtgccaactcatgtggaagaagtcgtatgtagaggcattgctgcgtcttgggcagtcggtttgaatggccgccaagtgatagacaggatccttcctgctgtgcgtgagatgctatcagaaagagggtggctgtacatggtggccctcgaagataatgatccttcagacatatgtcatctgatgagcgagatggggtatgcatcctgcgttatcttgaagaggtgtactgaggaggagagcctttatgttctcgagttctggcgagatccacacgctgttacaagtgcgtcgccgaaatgattattgtttcgggcccttaattggttgtacctcaacagttaataagagatcatacagattatagaggaattcccaccagcttggattttttttcagattcttctattcattttttttgtcgtagctaattgattcataaattttaggaaccttcgagaaatgttccagattgatgctgcagattacatgatgtccatatgtggtgatgacagtctgaaagagctttcttcacctgggaaaagcggcagtattttctatctctcacaggatgaacgttttgtcataaaaaccttgagaaaaactgagttgaagatactgttaaagctgctaccaaaatattacaatcatgtcagagcttatgataatacgctcattacaatttttttttggcgtccacaggattactctgaaaggcggaagaaaggtgcagaatcacatcattgttgcattactcttatttagtctgtaaatgcatgtcatatgcgatagtttttttttctaattttgtacaagttcgctttgttgtgatgagaaatatgttttgcactgagctgcgaattcatcgtaagtatgacttaaagggttctacacaaggccgatcaaccaaaaagcaaaatataaatgagaacacaacactggaggaccttgacctatcatatgtttttcatgtcgataaaccatggccggacgcacttttcaggtaagctgatgatcagttgctccctttgtttttctaacgccttaatagtcttttgg

SEQ ID NO: 111929 - DNA, 1207 bp, Zea Mays
atgtcctcgtctccatcttcaatgaaccgccgtcccccgggcccgctagcgttggggctggagtccttggcgaagaagaagacacatacaatctttgccaaatggacacagggaacctatgccccacaggactgcacaacacgtgggataggtaatgcaggtattgcccccgctggctgtggctggccgttctttgaccatgccattggtatcaacgttccaaggtcccgcttcctaccagttaaggcgacatcagatttgcagctagtacagtctgatctatataccttggttgatggcttcgttacacgtaattcagccagaacaaatccatcaaatccctcaattgaacttggtcctgagttcaagaaggttgggagcttccttggtcgcttcaagtccatacctagcattgttgagcttgacatcttgaaggtttccggtgatgtttggttcggttctggaattgtactgaaggggaaagtgaccatcactgcaaaacctggcgtcaagctagaaatcccagacggagcagtgattgggaataaggttaaatatcctatttatgatcaaacagtgtaccttaacgattatcataagaagatgttgaaggatcaatatgagggactgaagacaatcgagcagattacaatggactcagcttcggtcgagaccaatatgttcaagctctgcaaggtgaggtttgttcagtttggccaaaaaggcatcccctacctgaacacctacgacggtcgcgctatccgctacctcgacccgctcatcaaggccaacgacaccatcaagatcgatctgcagaccaacaagatcatggacttcatcaagtttgacgtcgacaacatggtcatggtgactggcgggaggaacaccaggcgtgtaggagtcatcaagaacagggagaagcacaagggcagctttgagaccatccacgtgctgcttggagctttttgctatgtctagttttctcctatttgttgtacaggaaaacttagaatagaattcaaatttggtggtcgcaaaagtgtggagactttaattcatataaagttaggcttaacattagtgcaaacaattgtattttagtttagatttagagtacacttatgtatgcgttgtttgacaatgcttatttatgatatattgaatggtacttatttatattatattaattataatgttgttcaatata

SEQ ID NO: 111930 - DNA, 745 bp, Zea Mays
gaaaggaacccaacccacgaagcatccgccacagccgaactggcccgatgtcgctggttgcctacgatgcctcctccgatgaggaagacgccggcgagcctgccgccgccgcggcgccacaccctgcccccatcggtccgcagccaaggcctccgtctcctacggcagtgagccctgctcctcggcctacgcctacgcttacgccgccgccgccagcagccagccagtaagcttccccctcgctgtcttgtctctctagggtttcgcttgtagcgacggccgttgcttggtatgtcacaagctgacggggctgactgattgagcgtgctgtactgaaagttgaagctactggctatcgaatcactgtactagcaaaccctgcatcaatacgagctgcaatccattgtttcgctttactccatagctcacggtagcgcgacatatctcgtaggaaggttcaattcggaataattactggcatgtatgcgttttttttcaatgtgcacctttagggatgctatttgtcatggcccatacttgactctgaccatgacaaaggagacagtcggctggacgcgggtgtttgacgtgtgtatcgttgatttgaatataatagcgttgtgtaagcagatgtgagtgggccgtgaagttgggccggattgtttgggcgcctatataggctgctctgttgtaacagagaagggcagaacttttgaaataacagaactcagtttccagtaaccaa

SEQ ID NO: 111931 - DNA, 975 bp, Zea Mays
gaaaggaacccaacccacgaagcatccgccacagccgaactggcccgatgtcgctggttgcctacgatgcctcctccgatgaggaagacgccggcgagcctgccgccgccgcggcgccacaccctgcccccatcggtccgcagccaaggcctccgtctcctacggcagtgagccctgctcctcggcctacgcctacgcttacgccgccgccgccagcagccagccagagtgtagcaccaattagttcgagtgatgtctctctgcccacatcatcattagatctcccagatgttgcagatctctttgctccccctgcagacaatgcatcaaggaagagggaatcaaatgggtctgctcttcatgactcgcgcaataaatttccaaggatgcaatcacaatcccaaggcataggaagtgctgcagggaacgccctaattccaccgcagcttcgtggaaggagcaatgttgttaccgaagacatgagcaaactctttgtggctaaacgaaaagagtagcatcttaaccttttctggacctgaacctctgtttggactccatagactgataaacgcatgtactgagtgcaatggatgtgccggcatgatccaaggttgttgctgaatcctaaagaaccggacgaaggatgctaacggtaggacgacctggtctcttagcctaccgtgggctgttgtcagatgtcaaaaatgccctcttagaagtttagaacatttctttggtgctcactcgcgtttcatgttcaacggtgctacatgactggtgctggatgcatgtaaactctgcaaccctatcatgttatggcagctagatgctactacgtctatcttttggtcggtgattacaaccatgtattacgtctagtagtggtaatagatcgcgatccaaatgcttcttaataaaatagtagaactctaaataattttagttaaaaaatgaatagaaataagattctgattt

SEQ ID NO: 111932 - DNA, 686 bp, Zea Mays
ttcggcgccttgtgaaagtgagaccagcttattatatgtattctctagtctatacccccctcagctaacgagtcaaatgcttacagtgaactataatatgagacatgtaggcgcattcccaggtgtatttgccaaaatgttcacattatatatttcgcatccctgagtgatgtctacctttttgttactgcttcacaggagcaatgttgttaccgaagacatgagcaaactctttgtggctaaacgaaaagagtagcatcttaaccttttctggacctgaacctctgtttggactccatagactgataaacgcatgtactgagtgcaatggatgtgccggcatgatccaaggttgttgctgaatcctaaagaaccggacgaaggatgctaacggtaggacgacctggtctcttagcctaccgtgggctgttgtcagatgtcaaaaatgccctcttagaagtttagaacatttctttggtgctcactcgcgtttcatgttcaacggtgctacatgactggtgctggatgcatgtaaactctgcaaccctatcatgttatggcagctagatgctactacgtctatcttttggtcggtgattacaaccatgtattacgtctagtagtggtaatagatcgcgatccaaatgcttcttaataaaatagtagaactctaaataattttagtt

SEQ ID NO: 111933 - DNA, 1274 bp, Zea Mays
tgcaggtctctatggagctgaagtgttatgtattggcagcgtgactggtacttgacaatactctagattaccgaacaacagtttgagccagggattatagccaaaagggattatacccccaaggggttcaagtgataaagaggggattaactcaatccctcctggattcaatacctctctggaataaaaacctgtaaaccgaacatgcccctagggaagtaatccattgcaaacgaacatgccctcagggtttactattgtgtccgctcccaccgggtctgcgcatcagagaccgacaagactgggaaatccagagatgcatttttctaccgatcagctgatcggctcggcgttcattgcctttgggctcacattgttcgtgtgtttcttctacgttgccgtcgtgtccaagctgcttccgccacatcaaaatggattcctggccgccatccaaaacgactggtattactgtctgcttgtgccgttgacgcttcctgtaataatcgtggctgtctacctgcactggctcagcatgaagatgttcaagcacgcatgaagcagtcatgcagcttccttccggtttcagaatcctggtcaaaatcgaggttggtttggtttagctgaaagtgtcaaggcaatagccaatttgcttatatacagcctgcatttttttgctgtctccaagatgtaatctggctatcgaatcactgtactaacaaaccctgcatcaatacgagctgcaatccattgtttcgctttactccatagctcacggtagcgcgacatatctcgtaggaaggttcaattcggaataattactggcatgtatgcgttttttttcaatgtgcacctttagggatgctattatctatgctatgcagcttcaaaagtcaaaaccatgggttcttcccttctatacatatctggtcatcagtatgtgcttgcccctctttagagacgagggtacagaaaaaggaattaaatggagtgtagcaccaattagttcgagtgatgtctctctgcccacatcatcattagatctcccagatgttgcagatctctttgctccccctgcagacaatgcatcaaggaagagggaatcaaatgggtctgctcttcatgactcgcgcaataaatttccaaggatgcaatcacaatcccaaggcataggaagtgctgcagggaacgccctaattccaccgcagcttcgtggaaggagcaatgttgttaccgaagacatgagcaaactctttgtggctaaacgaaaagagtag

SEQ ID NO: 111934 - DNA, 1486 bp, Zea Mays
ctgctactgcattgggttctgcacagtccttcctcctaatgctcaccatgtaccacaagtagatgatcattatgttcttctttagcatgccatcataaatcaatctggaaatattgtacttatctataagacccaactaatttggtggtggttttggtgtagcgctaaatttctcttatcatggtttatacatgctgcttatcatcagaacgagacactaatccactaatatattatgtgcctattctgcttcttctgtacgggcctgatagtttctctaaattttaactagcaagaaagagcatatttgccttgtgccattgtccttgatcttctgcctttttttagaaaaaggaattaaatggtactcctaacaggataagttggattattagatgccctgtgatgctttggtttattgggaaaaaagatcgcaattgatattggttattcaaagcagacacttccctactgcatttaatctttactgtatttcctttgttatgttatatttcattgccccctctttattttggttcctggccttgttcttttgtttcttctgattcattttcagttctagctgtgtgctgaagtgttattctggatgtatacttgattatttgtcagtttcctaaacgcacagcacattactaccattactccccccattgctatctaggtctgatatggtttttgtgagttcttaacttgttgtttttgtcattttggtccaggagtgtagcaccaattagttcgagtgatgtctctctgcccacatcatcattagatctcccagatgttgcagatctctttgctccccctgcagacaatgcatcaaggaagagggaatcaaatgggtctgctcttcatgactcgcgcaataaatttccaaggatgcaatcacaatcccaaggcataggaagtgctgcagggaacgccctaattccaccgcagcttcgtggaaggagcaatgttgttaccgaagacatgagcaaactctttgtggctaaacgaaaagagtagcatcttaaccttttctggacctgaacctctgtttggactccatagactgataaacgcatgtactgagtgcaatggatgtgccggcatgatccaaggttgttgctgaatcctaaagaaccggacgaaggatgctaacggtaggacgacctggtctcttagcctaccgtgggctgttgtcagatgtcaaaaatgccctcttagaagtttagaacatttctttggtgctcactcgcgtttcatgttcaacggtgctacatgactggtgctggatgcatgtaaactctgcaaccctatcatgtcatggcagctagatgctactacgtctatcttttggtcggtgattacaaccatgtattacgtctagtagtggtaatagatcgcgatccaaatgcttcttaataaaatagtagaactctaaataattttagttaaaaaatgaatagaaataagattctgattt

SEQ ID NO: 111935 - DNA, 3138 bp, Zea Mays
atggcgtaccttcggaacaagtcgatggagttcctcaagcggttcgaggtgccagccaagaacccctcggaggacgcgcagcgccggtggcgggaggccgtcggcactctcgtcaagaaccgccgccgccgcttccgcatggttcccgacctcgacaagcgctcgcaggtcgagacggagcgccgcaacatccaggaaaagcttcgtgttgcactctacgtgcagaaggctgcgctgcagttcatcgatgccgcccgcaagacggagcacccgttaccggagatggcgcgggaatgcggcttctccgtgagcgcggaggagctggccaccgtggtgcgcaaccacgatgccaaggccctgaggcaccacatgggcgtcgacggcgtcgcgcggaaggtgaacgtgtccctcgccgacggcgtcaagtccgacgaggtgggcgtccgggccgaggtctacggcgccaaccagtacaccgagaagccgccgaggacgttctggatgttcctgtgggacgcctgccaggacatgacgctcctgctgctcgccttctgcgcgttcgtctccgtcgccatcgggctcgccaccgaggggtggcccagcgggatgtacgacggcctcggcatcgtgctcaccatcctcctcgtggtcatgatcaccgcggccagcgactacaaccagtcgctgcagttccgggacctggacagggagaagaagaagatcgacatgcaggtcacccgcgacggctaccgccagaaagtgtccatatatgacattgtcgtcggggatatcgtccacctgtccatcggcgaccaggtgccagcggacggcctgtacatcgacggctactcgttagtggtcgacgagtcgagcctctccggcgagagtgagccagtgcatatgtccagtgcaaaacctttcctgctcggcggtaccaaggtgcatgacgggtcggccaggatgctggtcaccgcggtcgggatgcgaactgagtggggaaacctcatggaaacgctgagccaaggcggtgaggacgagacgccgctgcaggtcaagctcaacggcgtggccaccatcatcggcaagatcggtctggtattcgcggtgctcacgttcaccgttctcatggcacggtttctcgtgggcaaggcgcacgcgcccggcgggctcttgcggtggaggggagcagatgcgctctccatactcaacttcttcgccgtcgcggtcaccatcatcgtagtcgccgtgcccgaggggctgccgctcgccgtcacgctcagcctggcgttcgccatgaagaagctcatggaggagcgcgcgctcgtgcggcacctctcggcgtgcgagaccatggggtcggcgagctgcatctgcacggacaagaccggcacgctcaccacgaaccacatggtcgtcgagaaggtctgggcgtccggggcggcgcagacggtgagcaccgccaagggcttcgacgagctcaggtcgtcggtgtcggagaacttcacgagggtgctcctggagggagtcttccactgctccggctcggaggtcgtcacgagcaaggacggaaggactagcgtcatgggcacgcccaccgagacggccatcctggagttcggcctcgaggtggagaagtacaccaaggtggagcacgcggacgccaagaagctcaaggtggagccgttcaactcggtgaagaagaccatggccgtggttatcgcgtccccgaacgcggccggccacccgcgcgcgttcctcaagggcgcgtccgaggtcgtcctgagccggtgcggctccgtcttggacggcaccggggccgcggagaagctcacggaggcgaaggcgaagcgcgtggccagcgccatcgacgcgttcgcgtgcgaagcgctgcgcacgctctgcctggcgtaccaggacgtcggcggcgccagcgacgtccccggcgacggttacacgctcatcgcggtgttcggcatcaaggacccgctccgcccgggcgtgagggaggccgtgaggacgtgccacgacgcgggcatcaatgtccgcatggtcaccggcgacaacatcaacacggcgaaggcaattgcgagggagtgcggcatcctcaccgacgacggcgtcgccatcgagggacccgagttccgtgccaagagccccaacgagatgagagagctcatacccaaaatccaggtgatggctcggtcgttgccactggacaagcacacgctggtgacgaacctgaggggcatgttcaacgaggtggtggcggtgaccggcgacggcaccaacgacgcgccggcgctgcacgaggccgacatcggcctcgccatgggcattgcaggaacagaggtcgccaaggagaacgcggacgtgatcatcatggacgacaacttctcgaccatcatcaacgtcgccaaatggggccggtcggtctacatcaacatccagaagttcgtgcagttccagctcacggtgaacgtcgtcgccctcatggtgaacttcgtctccgcgtctttcacagggagcgcccctctgaccatcgtgcaactgctgtgggtgaacctgatcatggacaccctgggcgccctggcgctggcgacggagccccccaacgacgcgatgatgcggaggccgccggtcggccggggcgacaacttcatcaccaaggtgatgtggcggaacatcatcgggcagagcatgtaccagctcctcatgctcggcgtcctcatcttcaagggcaagagcctcctccggctgggcagcggcggcgatgtatccgacgcccagctcaacacgttcatattcaacaccttcgtcttctgccaggtcttcaacgaggttaacagccgggacatggagaaggtcaacgtgttcagcggcatctttagcagctggatcttcccggcggtcgccggcgccaccgccgcgttccaggtgatcatcgtggagttcctggggactttcgcgagcacggtgcacctgagcgggagactctggctcgctagcatgatgatcggctcgggaagcctgctgatgggcgccggcctcaagttcatccctgtcgatccgggcagtgaaggctcgtctgaccgccacgatgggtaccagcccatccccaccggccccaacgccgtgtga

SEQ ID NO: 111936 - DNA, 550 bp, Zea Mays
atgcgtttatcagtctatggagtccaaacagaggttcaggtccagaaaaggttaagatgctactcttttcgtttagccacaaagagtttgctcatgtcttcagtaacaacattgctccttccacgaagctgcggtggaattagggcgttccctgcagcacttcctatgccttgggattgtgaatgcatccttgattttgaccaggattctgaaaccggaaggaagctgcatgactgcttcatgcgtgcttgaacatcttcatgctgagccagtgcaggtagacagccacgattattacaggaagcgtcaacggcacaagcagacagtaatacctgtcgttttggatggcggccaggaatccattttgatgtggcggaagcagcttggacacgacggcaacgtagaagaaacacacgaacaatgtgagcccaaaggcaatgaacgccgagccgatcagctgatcggtagaaaaatgcatctctggatttcccagtcttgtcggtctctgatgcgcagacccggtgggagcggacacaatagtaaaccctga

SEQ ID NO: 111937 - DNA, 110 bp, Zea Mays
tatggacttgctaccttcaatttgcctttgctacatttgtgctcattgaaagggaaataaggttaaccatttcctattattaattttggtggttgacgaccaacacaaac

SEQ ID NO: 111938 - DNA, 345 bp, Zea Mays
gtactttgtgagttaataaaacatacatttttctgagatccaccgatcttctatttgctcgtcgttactttagattatcctgcaatagatagtattacagaaaaaagaggaaaatataatcatgtcgcaagtagaaaaagagagaagtatggagaaatgcttgagaaaaaaatatgaaaaactaactcctagaatatgaaaaagagagaagttcgtattgtagagatgtgttattttcaggagtgcgcttaaagaaaagatatgacccccaactacaaatgataagaactaattgagcaataatttcacaccataacacaatctaataaaagggtgaaaacgtac

SEQ ID NO: 111939 - DNA, 2506 bp, Zea Mays
ctccacactaatcttgcgagagcgagcaactagagcgagctcccctcccttcccctcgggcctcggctgcactcgcattccgtttcacctagctgcggtttacctctccctttctctcaccttcctcgcccacctcgatcgcctcctccttaagcaacgacgcggacgagcgacccgcgaccctagggagagagagagagagaccagtagttgggccgaccgcacgctcgcaggcgcacccactcagcggcggcaatggcggggcgccccctcccccctcgctcgtcgtcggcggccggccgggatgcgtgagatctcggcggcggatggggaaggacgccggcgaggcgcagcagcagccggacggggcgggcggtggcgcaggcggcggcgcaggaggaaataggggcggccgcttctgcttctgcggcggcggaggagcggcgagggtggttcggctgcaatgcgtggcagcgctcgtgctcggggtggccgtgctgctgtcggcgctcttctggctcccgccctttgccgggtggggcggcggcaaggagggcccggatccgggcgacgagttcggagctgctatagcggcaagctttaggctacacaagacagttcctgagctgagtggaaataaatcccagctcgaattggatatatatgaggaagttggcattcctaattccacggtggttgtgaatatgatacatccattagatggatcaaactggacaaacatcatcttcaacattgtccctttcccagagaacgtgactatatcatcaacatggttgagcattcttagatcaaagttcatgtccttggttgtacggcagtcatcaatccacttgactgagcctctattcgggaatgcgtcagcctttgaagtaattaaatttccaggaggaataacaattatccctccacaaactgcttttcttcttcagaagccccatgcaacttttaattttactctgaactatccgatctacaaattacaagacagaactaacgagttaaaggatcaaatgaaggcaggattactgctcaatccatacgagaatctgtatatcaagttgacaaattcgcaaggttcaacgattctcccgccaacaatcgttgagacctccatcgtcctcgaagttggaaaccaccagccatctgtaccaaggatgaaacagttggcgcggacgatcaccaattcatcttcatcctcaggaaacctgggcctgaatcacactgtatttggcagggtgaagcagattagcctttcatcctatcttaggcattccttacacagtggacgtggttctgatgcaccgagtcctgcacccatgcaccatcatggtcaccacagccaccaccaccgccaccaccaccacagtcacgatgacaacaggcatcctgcagctcccgctcctgctccagtacattttcctgcgccacagcccagatacggtgctccacctccatccggtgggtgtccgtacagcaaaaacaagccaaagaaaagcgggcgtgctgcaccagctgccgagcctgcagctaatgaccaccgatctgcttccatcgccttaccaccgcatccatcatcgccttcgcctgctagttggtctcagcatgctcccagtacgccggctgttcctccccctcctgctctaccagagccacctctgcccaccatctcgtttgctcatccacgtcctccaagtgaacgtggaactgggacgagtcctgctccaagtgaagaggcgacacgagcgggtccttctgggatgtcacaagtggcaccggcgcctcattcatcttatgccaccaggatgcagggcgatgttccctgctgctgggtcctttttgtcctcgcgctatgcgtcctaacgagcctgctacgatgagaaggaagtgcacggccggccaacgagatgtacatcagcgaccgctggcgtacgtgctaaagaagagaaagaggacccacggggctccaccggcgcggcgcatctggttccggcccggccacgccaccatccagcagctcccgggggcggggggtggccaccaaaggcacaaggaagctgagagcctcatcccttgtcaacccctcggcgggctgtgtcatactcttgtcgttcgttgctagttgtcagctgtcatgtaaatatgaagggatgggtataaaaggcaaggcaaagccgcaagacgggcggccgcgcgtggtggtcacgggtcaaagccacaggggggtggcaggcccttgtgcactgctgctcgcgcgcctctggtctgctggctgccgtgtgtgttcgtgtagtgtactgttgctccttctccggctccgacgctcctcaaatgtagagacctccagtttcatggaggttcgttttcttttcgttgctgtgctttatcctgattcctgcaggcagtgtttcatggtagactctcatctgtgcctgctgccgtggaatgaaatcgtcgagctcggtgatcagtgatcgcagctccctcc

SEQ ID NO: 111940 - DNA, 718 bp, Zea Mays
gctattcccctcgtggtacaaaacgcctgcttccctcccgtcctcacgtactacggtttaggccagctacactacacagcggcccgctcagcatgctggccggcggctcgtcgtacctggcgaccatgggccgccgcagcttcccctaccacaggctcaagaagctccccgccgccgccccctctcctccccatcctcctgccacgacggcgggtcctgctaccgccgccgccgccatcgaggactcgtaccggtcctactaccgcgcgctggtggcgaggcggcggaggcggggcagcggcaggcgcctgaggagggcgagagtctggggcgccctggcccgcgcgttgcggcggagggcggcggctgccggggcccgggtgcgcgcgtcggtcgccagggtggcgcgccggctgagggacggccggccctacgtcggcgacctcttcgccgggaactacatgttcctgcaggtggcgccgtcgccgatgacgatcacgggcagccacggcggcggcgctgtggtacccttcgcggagtactactacggctataaggccagggccagggccagggcagcggccgtgcagctgcaccgctatcctactggggcggtgctctacgagacgtagcgacgtgccacggatgacttcgtcgctggcctgtgttgtgttgaaataatggtaaataaatgttgttattcagtttggatttggaa

SEQ ID NO: 111941 - DNA, 100 bp, Zea Mays
ctgaacagagaggagagaaaacaatgtgggctgcctagctgcatcgcgttaaatgaccttagaactgagctgggagacagttcagtgttcacccttctaa

SEQ ID NO: 111942 - DNA, 460 bp, Zea Mays
gccttgggggtttggaaatagatttggtatatgggaccctgtgactttgttgctgcgatgcgacgataagcttccttgggcggctttccagtgacagtacccatggattgcactgaacaggctcaccgtggaaccgattctccttgggcggctttcactggcggtggcggcatgatctcctccttcttctccatctgcagcggtatttgctcctccttcatcagctcctccttgggcgatggcgacggaggaggcaggctgttctcggcaggtcgcacgccttgaagtagagggcccaacctcctgccgcatatgccgcatgccggaggaggttgttagcggctggcgggatttccggtgctcggttgggcgcgggtgggcggcgaggtttcgcggcggcggcgggcgttcggttgcggcgattttcgcgggggctgggcgcgcggtagcagcggttttc

SEQ ID NO: 111943 - DNA, 471 bp, Zea Mays
gcgaccatgggtcgccgcagcttcccctaccacaagctcaagaagctcctccccgctgtcgccccctctcctccccgtcctcctgccacgatggcaggctctgctaccgccgccgccattaaggactcataccggtcctactactttgcggtggcgaggcggcggagcaggcgcctgaggagggcgagagtctggggtgccctggcgcgcgcgttgtggcagagggcggcggcggccggggccctggtgcgcgcgtcggccgccagggtggcgtgctggctgaggaacggtcggccctacgtcggtgacctcttcgtcgggaactacatgttcctgcaggtggcgccgtcgccgatgacgatcacgggcggcggcaccgtggtgcccttcgcgcagtacaactacggctgtaaggccagggccgtgcatctgcaccgctaccctactggggcggtgctctacgagacatag

SEQ ID NO: 111944 - DNA, 474 bp, Zea Mays
ctcgcgaccatgggtcgccgcagcttcccctaccacaagctcaagaagctcctccccgctgtcgccccctctcctccccgtcctcctgccacgatggcaggctctgctaccgccgccgccattaaggactcataccggtcctactactttgcggtggcgaggcggcggagcaggcgcctgaggagggcgagagtctggggtgccctggcgcgcgcgttgtggcagagggcggcggcggccggggccctggtgcgcgcgtcgggcgccagggtggcgtgctggctgaggaacgctcggccctacgtcggtgacctcttcgtcgggaactacatgttcctgcaggtggcgccgtcgccgatgacgatcacgggcggcggcaccgtggtgcccttcgcgcagtacaactacggctgtaaggccagggccgtgcatctgcaccgctaccctactggggcggtgctctacgagacatag

SEQ ID NO: 111945 - DNA, 436 bp, Zea Mays
tcagttcttgacgaactggaggccgttggcctgagagtaccgctccatgaagcgcatgaagcggtcccagtcccggggcgtgcgcatgacgtacttggcctcgatccgcgccggcttgccgttgacgaacttggcgctcacgtccacggactgcagcacgccctcgtcgtcgatcatgtagaagcccgtgatgtccccgagctccgccgacgagtcgaacaccgacggctgctcgaacgtgaagatggccacgccgttcgtgccgtcccgggacttggtcagccgcacgtccgggatcgtctgctcgtccgtgccctggatgaactggatcgccggccggaccgccgccgccaccaccgccacctgccgcccccgccggggcgtcgcccgccgcggtcgcccagggcactgcaccgacacgccgtggaacggcgac

SEQ ID NO: 111946 - DNA, 1491 bp, Zea Mays
aagcacccgatcgcacagtcacagcagcagccagcagacaccaaaccatcccgcccagctctacccaagatggcgcagctgctgctgctcgccgtcgtctcggcgctcagcctcctctcgccgcgcacggcggcggcagcgacatcgacaacgtccggcggcaaacccctggtgacggccatcaccagggacgcggccaccaagctgtacacggcgccgctcaaggacgagctgccgctggtcctggacctctccggcccgctcctctgggccacgtgcgccgcgccgcacccgagctacgagtgccaccatgctgcgtgcgcgcacgcgcacgcgcaccacccgccgggctgcccgcgcacgggccacggcgtggccgacgagttcgacccgttccgctgcaggtgcagggcgcacccctacaacccgttcgcgcgccgggccgggtccggggacctcacgcgggcgcgcgtcacggccaacaccaccgacggcgccaacccgctcgccgccgcctccttcaccgccgtcgcggcctgcgcgccgccgacactgctcgccggcctccccgcgggcgccgtcggcgtcgcgggcctcgcgcgatccaggctcgccctgccggcacaggtcgcacgcaagcagaaggtcgccaggaggttcgcgctctgcctccccggcgaaggcggtggcatgggagtggccatcttcggcggggggcctctgttcctgctcccgccgggccggcccgacgtcacggcgtcgctggcgggcaccacgccgctccgccggaaccccggggtccccgggtacttcgtctcggccacgggcatcgccgtgaaccacgtgcaggtgcaggtgcagcagcagggcccgcttactgtcgcgctatgctcgcgtgtcccctacacggtgctccggccggacgtgtacgcgccgttcgtgagggcgttcgaggccatggccatggccgggaggaagcggatgacgccgccgacgccgccgttcgagctgtgctacgactcgcgggagctcgggtcgacgcggctcggttacgccgtgccgcaggtggacctcatgctcgagagcggcaccaactggacggtgttcggcggcaactccatggtgcaggtcagcgacgacacggcgtgcttcgcgttcctcgagatgaaggaagagaagcagcagggagggcacggctacggcggcggtgcgccggcgccgacggttgtcataggagggttccagatggagaacaacctgctggtgttcgatgaggagaatgggcagctcggcttcagtggcctgctcttcggaaggcagacgacgtgcagtaacttcaatttcactctcgctggctaggtatggtacaccgagcaccttcgactcgatcatgatgtatgtgccggttttgtatttctcctacgggttttgtatttgtcatgaacttgtttcttttgtgtgtttgtgttataaagcatttgtttagaaact

SEQ ID NO: 111947 - DNA, 2005 bp, Zea Mays
ggtactcccaactccctcccaaaccccgtccagcccagccgtcccaccacttcgtcaaaatcggcgcggtgcgacgagagcgaccgccttccgccctttccttcttccctcccgtcgtcttcactccgacgcctcccctgccgctaccgctattgcctattgggagggcggtccctgtcgcgcgcgacgccgaggcttcgtgacggggacacgctgctaatttgtagcgcaccacacgccggctcggcctcggttgcgcctcgcctcgcatcgcatcgcctcgccacgccacgccaggggattactggcgggcagcgctcgtgcttgttgtgcagccggtgcgtctgctcgtggcctgcggcgatggggcaggacctcgtcgagatccacccgcgcgagctccagttcacatttgaggtgaagaaacaaagttcatgtgttgtctgcctaaccaacaagtccaacgaatatgttgcttttaaggttaaaacgacatcccctaaaagatactgtgttcgaccaaataccggggttatccttccgaggaaaacatgtgaattcacagttaccatgcaagcgctccggactgctccaccagacatgcaattaaaggacaagtttttagtacagaccacagttgttccttatggcacatctgatgaagaactcgttcctgccgttttctccaaagaaactggcagatacatcgaggaaagcaaattgagagttgttcttgttagttcataccaatccctcgaagagcaacccactaatggaattcatgacactgagccagctgttgaagttcctttactgaaagagatgccaaatttagggagcgaagtaccagatgttgcaaaagaaattcctgcccctctggtacaaggtccagcaattgtgaccggaataccttcacctgtcaaagaggttccaggcctgagagaaattcctgtgccactgaacgaagcaccaactttattggcagaatttccttcccctcaaaaagatccctctgctattacagttgaacatgcctctaatgttacaattgagcatgcccctgctatttccattgaatccccacctttgaaacaaagtgttccagtttttaaggaatctcctctgaaacaaagcgttgcagtttttaaggaatctcctcctttgaaacaaagcatttcagtttttaaggaatctcctccactggaggaaactactcctaaagaagctgttatgctaagtgaccgagggcttttcaatgtgcagaatcatcaattatcccatgtaacagaagatgttcagaatatgaaatcaaagctcaacaatcttgaatcaaaattggaagaggctgaaaagatgataataaggctaagagaagagagcagaaataccacccaggagcgggatgagctacagcaagaaatggtattcctaagaaagaagggaaccgcaaggagtcaaatgggtttccccctgctctttgtggtgtacgtggcgcttcttggtacctgtatcggttacctgctccgcatatgagttccaaacttcaaaaaagttcagcagatgggatatgcttcgtatgtgggcaagacaattgaacggcagttgcactccaaaatgttgaggggtgaatttattagcattattagttcggaacttcatatggttttgcacataacagcagtgccaaactaccatctgcctgtatgtatagaacagttactttttttcgcgttttatagaacccacccaaaagatgtctgctgcctcgtagactaacctgggattcttcttccatctacctaagatttttttttacactttactggattcgcttgccctgaatcggtattggtcttttgtgtaactatttttacacctggtttcgttccagtctaatatcctggcctataaaggcacaaaacagtgtaccaaaaatccaagaaagtcaggaattcatggttgcgtagttcgtgtcaagataccaagatgtagtaagagccagtct

SEQ ID NO: 111948 - DNA, 1608 bp, Zea Mays
gtcagcttggttattttgaggtgaagaaacaaagttcatgtgttgtctgcctaaccaacaagtccaacgaatatgttgcttttaaggttaaaacgacatcccctaaaagatactgtgttcgaccaaataccggggttatccttccgaggaaaacatgtgaattcacagttaccatgcaagcgctccggactgctccaccagacatgcaattaaaggacaagtttttagtacagaccacagttgttccttatggcacatctgatgaagaactcgttcctgccgttttctccaaagaaactggcagatacatcgaggaaagcaaattgagagttgttcttgttagttcataccaatccctcgaagagcaacccactaatggaattcatgacactgagccagctgttgaagttcctttactgaaagagatgccaaatttagggagcgaagtaccagatgttgcaaaagaaattcctgcccctctggtacaaggtccagcaattgtgaccggaataccttcacctgtcaaagaggttccaggcctgagagaaattcctgtgccactgaacgaagcaccaactttattggcagaatttccttcccctcaaaaagatccctctgctattacagttgaacatgcctctaatgttacaattgagcatgcccctgctatttccattgaatccccacctttgaaacaaagtgttccagtttttaaggaatctcctctgaaacaaagcgttgcagtttttaaggaatctcctcctttgaaacaaagcatttcagtttttaaggaatctcctccactggaggaaactactcctaaagaagctgttatgctaagtgaccgagggcttttcaatgtgcagaatcatcaattatcccatgtaacagaagatgttcagaatatgaaatcaaagctcaacaatcttgaatcaaaattggaagaggctgaaaagatgataataaggctaagagaagagagcagaaataccacccaggagcgggatgagctacagcaagaaatggtattcctaagaaagaagggaaccgcaaggagtcaaatgggtttccccctgctctttgtggtgtacgtggcgcttcttggtacctgtatcggttacctgctccgcatatgagttccaaacttcaaaaaagttcagcagatgggatatgcttcgtatgtgggcaagacaattgaacggcagttgcactccaaaatgttgaggggtgaatttattagcattattagttcggaacttcatatggttttgcacataacagcagtgccaaactaccatctgcctgtatgtatagaacagttactttttttcgcgttttatagaacccacccaaaagatgtctgctgcctcgtagactaacctgggattcttcttccatctacctaagatttttttttacactttactggattcgcttgccctgaatcggtattggtcttttgtgtaactatttttacacctggtttcgttccagtctaatatcctggcctataaaggcacaaaacagtgtaccaaaaatccaagaaagtcaggaattcatggttgcgtagttcgtgtcaagataccaagatgtagtaagagccagtct

SEQ ID NO: 111949 - DNA, 382 bp, Zea Mays
tttttttttatatacctgaccggcgatcaagattcaggactggcagctgcgcatgcacctgcccgttcaatggcacctccatctcatcttctggtctctgcctcaacaactgttcttcaattactactgcattctaggggaagactcttgcgctctcttaagcttggttcagtacatgactaattgtgcctcagctgtcgccggcattgtgaattttttaatctacaaaaacatggtgctgttgcatcgttccacacccaaccagcatttgcaattttgtattatccaggtcatcataatagtggggataatgaagcacctgaatagctccctgccttctgagatcaacaaggacagcaacccaagcaaaaaaaaaaaaaaa

SEQ ID NO: 111950 - DNA, 4016 bp, Zea Mays
atgggctgcggtggctccaaagaagcggtggccaccggcaactccggcagcagcagatgcaaccgattcaagaggaaatccagcgtcgtcgacgccacccagccatcgtcccgtgtgcttcagccatccctcgacaatgcgtccgccgccgccgctgcaaaggctagtaacggcgaggtgacaaaggacaaggcagccacgttgaaacagaaagccgtcgaggagaagaaagaggaagccgtcgctgtgaagaacagcaaagaagccgtctctgtgaaggagggcaacgcggcgtcgtcgaaggcgagtgccatccgggaggagaagccgcaggtcgagaccaagacggatgaagcagccgccgtcacggatgccgctagcgaagcggccgccgccgccgttgaaaaggcgggcaaagaagcgttggccggtaaggccgccagggagaaggaaggcgatgaggtcgtcgtcgtcgtcaaggacaaagcggtgatcgccggtcagggactgaggataaagcattcgtcgaggacaaaacagtcgtcatcaaccggcggggacgtgaatgccatcaccgtcaccgcggggaaagaagaacacatcatcaggaaggacgacgtggtcaaaatatcgaccaccgaggcagccgtcgacaaggggaataatggcggtgacgaacctgacggtacaccatacatggcggcgatcgaggagaacgacgacgaggctgcgtcgtcgaccgaggacgtcggcgacgccgtcgaggaggaggacaagaaggaggtagacgacggcagcgtcacgttcccggtctccatggtggcagaggaggacggcagcgtcaccttcaaggtacgagtcaatgacgccgaggccaaggacgacgacgggagcgttaagttcgcgactgccgccgccggcgccgcccccacgaccagcagcaacgtggttgccgtggtggccgaggaggatgggagcgtcacgttcgcagtgccagtttcccctgtgatcaaggacgacgacgagagcgttacctccgcggctgcaccggcagccaaggtccaggacgtcgtgggcgccgtggtggcagaggacgatggcagtgtcaccttggcgaaaccgctagcccctgtgagtgtgaccaagggtggccacagcgtttcctttgtgcctgcccggcctgcaacgaccaaggacgacgacgacagtgttgcctccgcagcttccccgatgaccatggacgacgaatttgtcagcttaccggttgcactggaggaggaggaggaggaagaagaaaatgagcattggaaggacaatgatgaggcggaaaatgagcctgctgtttctgatgacgaggagggcacggccgaagctgatggcgcaacagaagccgaagaggatgaggaggaggcagggcagtccgaaccttctgaagataatgatgaggtagacgatgacgcggacctgcccgatcctactgctgtcgagcagctgctaaccaaagctgtcgaggagatcaaagcggaggaggagaggagtgcggcggacacagttggggagaacgtctccagcaaagagccagacgaggggaaacccattgcaccttcgagaccgagagacgaggacggcggtatggctgggttttcttcttctgttttggcatgaactcatgcatggcagttgatctgctctgggccaaagcaacaagtagccgccttctggctgctggctgctgccatccttaacccattcgtcccgtgtgcaggggaaccggatgggaaagaacccatggatttggaggaggaggaggccagaaccaccgaggagaagacaccggatgatcacccaggcatcccagctgagaagaagagcggcagtgatgacaaggattccgctctacctgtaagcgcgtcgtcgtcttcttgagcccagagaataattaaggagaacacgaacaccgatggaaaggcaggctgctgccggtggccgctccagtagtagtagcctctagtgcatctttgttttttttttgaacatgtatggcgtacgcgtcgttgtcatgtccaacacgccctggttcttcaacatcggtacgtactgaccatgtggtttcgaagtagttggcaagaggtagttgttgttgacgagtttgttgcgttgttgttcgaaaccaaggagaggcaggtcggcttcaaaagtctatatgcaaatgctaataggacaccagtgctatgagcacacatggtgccagcgctgatcgcggtaccaatacgcgatcaaatcaaattctaacacttggaaacgaaagtgcaggtcagaagaagatgaatctgagcagacgtgcctgtagcctgattgggtggtagtggcactagtttggtgcggagaccgactggttgagcgagtcgtctcatgttcaaccagcagacggaccaactgctgcaggctgcagcacaggaaaagcggacagcgatggctcaacaactaaccccacacagccacaacacccccccccaccccaccccccaaaaaaaaacaaagaagcctgaaagcacccagaagattcatatcaatcggacataccatgtctaccagagaatagaaagaccttccttccatccatcccacagtcagtcgttgacacaaagagaaattccacagccggggggcaaggctttaattgccccctctccctccctcgcctccttcaccatcccaccgagctttgcaacagctagtagcatgggcaagctgtgctgcagccaggaagacgacgagccggcgttcaacctcctggggctgctcgtcaccgtcgtcctcgccctgctcctgctcatgctgtgcacgccgccccgccgcaggcgctgcgtcgcctactacccccgttactgctaggacaggacggacgcggtggcggtggcacacgccgtcgagcttcagccttcttcgaggtagggaggaaaggatcaatcttctgctctgctctgcgatgggcgccgaggtaggcatcagacgtggagttcaattcgagtccgagttgtggagtatacaataaatcatgctggattgtttgtttgtatgtaaaagcgttctgttattattggtaaatcaatgtgactactgcataaggctggtcggtctgtaacctgatccgagagtctgtctgttggtaaaaaattaattgactactggaatttgttgacttggtatctgaaagattttatttttatttgtgtgtgaagttttcaagggacgagtggttcatgaattgcattgatcggtccgtgatacaccttctttttattaggctcagtcgatctgtgctactttagcatgattcgatgatacaaaagattcaaaagctactttttattatgtgtggcgatgaacagtagcagttgcaaaataaaagtagttcaagttcataaggaagcgggcaaacgtagcagcatcgatcacctggacctgggacaccgatggtccgcgacctcgcgctccgatctagtccccgtatccatccctcctcctcctcctcatgatccgcggcaacccaggcgactcctttcttcctccttgtcgaccctgtcctccccttctctggcgtggtagcgccgtggcgcagcggcccggaacacggctgggaaggggctgtagaggactacgaggaggaacgggagcccactcgccgcgaaggggccggggggggggggggggggcggggttgccgtcgccggaggagaagggagcaccaaccagtgcgcagaggggctatttcgcaaactgtctcttactacacttttccagggagttttgtgcaaaatagtcatattgctaatttgcaatgcttataaataatggcggatagctcgggactcgggaggacggatctgatgtcatcaactcatcatcagagctcaaaagttgtgactgtgatcgtgtttcgtacaaattattcgataaaatattaatacaaatcgattacatataaacgaaaccactatatttatttttaggaa

SEQ ID NO: 111951 - DNA, 1783 bp, Zea Mays
cagcatcagaccgcgacctccgatccaaactctgataagcttcagcggggcatccgcgtcatttcgcaccaaccttgttgttgttgttcttctatttcttagtatcatagcacagtatttcgtgctctcgcttcgctcccttaatttatcaccattcctaatttattctatttcttagtatcatagcacagtatttcgctcgccccgatttcccgactcttcccgtgcctcagacagcatcggattgcttgatctcgattgtcagaataagattcagcgcaggtttggattcaccgaatccaccgattgcttgcgccccgcggtcgcgcgcggcggaatttcggccgccgccaattcgggcctctccggaagggtgtccccggtgtggttcgcctaatatccgctgccctcgtgcgggactcctcgtgattttcggctgtgcgcttggcttttccagtcccgtgttgtggttccagcctttcaggggatggggcgccgcgggttgctcaaggctgcgcttctgctgtgcttccttgctgcttgctccgggagagttggtttgtctcaacgtattcattgtgttccatattactccacggtagtttcacaacgaaactttgttgtaacgctttgctttcgtcaaatagaacttacgatcaaacagaacccttccactaccatatacaactcgactcttgccaagatactcgtggaatatgcttctgcaatctatactgccgatttgacgcaattgtttacttggacatgtgccagatgcggtgacttgatcgaggggttcgagatgatagagatcattgtggatgtcgagaactgcttgcaggcatattttggttttgccagtgacataaacgcagtcgttgttgtttttagaggaactcaagagaacagcatccagaattggatagaggacttgttatggaaacaacttgatcttgactaccctggcatgcctgaagcaatggttcaccgagggttttattctgcatatcacaacacgacactacgtgatggagtagtcagtggtattcagaggactaggaaagcttacggagacattccaatcatgatcacgggtcattcaatgggtggagctatggcttcattctgtgcgctcgatcttgttgttaactacggactggatggcgtaaacctgatgacatttgggcagcctcgtattggcaatgctgcatttgcttcttatttcaagacatacttgcctcaagcgatccgagttactcatgcccatgatattgtgcctcacctgccaccatatttctcattcttcccacagaagacctaccatcacttcccaagagaggtatggacccacaatattggactaggaaccctagtgtaccccgtagaaaagatctgtgacgattctggtgaagaccctacatgctgcagatcagtaagtggaagtagcgtgcgagaccatatatactatcttggcgtcagcatgcatgcagaagactggagcagctgcagaatcgtcatggactacagcaaattgcagtatcagatggacctcaacggtaatctcgtattgtcgaagcagcccggtttgtcaaacgccagaggattcagtgctcagtgaaccagtctatgatttgtacagtataatagcttcacgaatcagtaatgttcaattgttaatggatcaaaggagaagggttggaaccagcatgccgattcggagatgcttattgtacatgtgattacgtaatgtattgttcagtttgcaaatatatattcacacacg

SEQ ID NO: 111952 - DNA, 1693 bp, Zea Mays
cagcatcagaccgcgacctccgatccaaactctgataagcttcagcggggcatccgcgtcatttcgcaccaaccttgttgttgttgttcttctatttcttagtatcatagcacagtatttcgtgctctcgcttcgctcccttaatttatcaccattcctaatttattctatttcttagtatcatagcacagtatttcgctcgccccgatttcccgactcttcccgtgcctcagacagcatcggattgcttgatctcgattgtcagaataagattcagcgcaggtttggattcaccgaatccaccgattgcttgcgccccgcggtcgcgcgcggcggaatttcggccgccgccaattcgggcctctccggaagggtgtccccggtgtggttcgcctaatatccgctgccctcgtgcgggactcctcgtgattttcggctgtgcgcttggcttttccagtcccgtgttgtggttccagcctttcaggggatggggcgccgcgggttgctcaaggctgcgcttctgctgtgcttccttgctgcttgctccgggagagaacttacgatcaaacagaacccttccactaccatatacaactcgactcttgccaagatactcgtggaatatgcttctgcaatctatactgccgatttgacgcaattgtttacttggacatgtgccagatgcggtgacttgatcgaggggttcgagatgatagagatcattgtggatgtcgagaactgcttgcagcaggcatattttggttttgccagtgacataaacgcagtcgttgttgtttttagaggaactcaagagaacagcatccagaattggatagaggacttgttatggaaacaacttgatcttgactaccctggcatgcctgaagcaatggttcaccgagggttttattctgcatatcacaacacgacactacgtgatggagtagtcagtggtattcagaggactaggaaagcttacggagacattccaatcatgatcacgggtcattcaatgggtggagctatggcttcattctgtgcgctcgatcttgttgttaactacggactggatggcgtaaacctgatgacatttgggcagcctcgtattggcaatgctgcatttgcttcttatttcaagacatacttgcctcaagcgatccgagttactcatgcccatgatattgtgcctcacctgccaccatatttctcattcttcccacagaagacctaccatcacttcccaagagaggtatggacccacaatattggactaggaaccctagtgtaccccgtagaaaagatctgtgacgattctggtgaagaccctacatgctgcagatcagtaagtggaagtagcgtgcgagaccatatatactatcttggcgtcagcatgcatgcagaagactggagcagctgcagaatcgtcatggactacagcaaattgcagtatcagatggacctcaacggtaatctcgtattgtcgaagcagcccggtttgtcaaacgccagaggattcagtgctcagtgaaccagtctatgatttgtacagtataatagcttcacgaatcagtaatgttcaattgttaatggatcaaaggagaagggttggaaccagcatgccgattcggagatgcttattgtacatgtgattacgtaatgtattgttcagtttgcaaatatatattcacacacg

SEQ ID NO: 111953 - DNA, 1685 bp, Zea Mays
cagcatcagaccgcgacctccgatccaaactctgataagcttcagcggggcatccgcgtcatttcgcaccaaccttgttgttgttgttcttctatttcttagtatcatagcacagtatttcgtgctctcgcttcgctcccttaatttatcaccattcctaatttattctatttcttagtatcatagcacagtatttcgctcgccccgatttcccgactcttcccgtgcctcagacagcatcggattgcttgatctcgattgtcagaataagattcagcgcaggtttggattcaccgaatccaccgattgcttgcgccccgcggtcgcgcgcggcggaatttcggccgccgccaattcgggcctctccggaagggtgtccccggtgtggttcgcctaatatccgctgccctcgtgcgggactcctcgtgattttcggctgtgcgcttggcttttccagtcccgtgttgtggttccagcctttcaggggatggggcgccgcgggttgctcaaggctgcgcttctgctgtgcttccttgctgcttgctccgggagagaacttacgatcaaacagaacccttccactaccatatacaactcgactcttgccaagatactcgtggaatatgcttctgcaatctatactgccgatttgacgcaattgtttacttggacatgtgccagatgcggtgacttgatcgaggggttcgagatgatagagatcattgtggatgtcgagaactgcttgcaggcatattttggttttgccagtgacataaacgcagtcgttgttgtttttagaggaactcaagagaacagcatccagaattggatagaggacttgttatggaaacaacttgatcttgactaccctggcatgcctgaagcaatggttcaccgagggttttattctgcatatcacaacacgacactacgtgatggagtagtcagtggtattcagaggactaggaaagcttacggagacattccaatcatgatcacgggtcattcaatgggtggagctatggcttcattctgtgcgctcgatcttgttgttaactacggactggatggcgtaaacctgatgacatttgggcagcctcgtattggcaatgctgcatttgcttcttatttcaagacatacttgcctcaagcgatccgagttactcatgcccatgatattgtgcctcacctgccaccatatttctcattcttcccacagaagacctaccatcacttcccaagagaggtatggacccacaatattggactaggaaccctagtgtaccccgtagaaaagatctgtgacgattctggtgaagaccctacatgctgcagtaagtggaagtagcgtgcgagaccatatatactatcttggcgtcagcatgcatgcagaagactggagcagctgcagaatcgtcatggactacagcaaattgcagtatcagatggacctcaacggtaatctcgtattgtcgaagcagcccggtttgtcaaacgccagaggattcagtgctcagtgaaccagtctatgatttgtacagtataatagcttcacgaatcagtaatgttcaattgttaatggatcaaaggagaagggttggaaccagcatgccgattcggagatgcttattgtacatgtgattacgtaatgtattgttcagtttgcaaatatatattcacacacg

SEQ ID NO: 111954 - DNA, 1705 bp, Zea Mays
cagcatcagaccgcgacctccgatccaaactctgataagcttcagcggggcatccgcgtcatttcgcaccaaccttgttgttgttgttcttctatttcttagtatcatagcacagtatttcgtgctctcgcttcgctcccttaatttatcaccattcctaatttattctatttcttagtatcatagcacagtatttcgctcgccccgatttcccgactcttcccgtgcctcagacagcatcggattgcttgatctcgattgtcagaataagattcagcgcaggtttggattcaccgaatccaccgattgcttgcgccccgcggtcgcgcgcggcggaatttcggccgccgccaattcgggcctctccggaagggtgtccccggtgtggttcgcctaatatccgctgccctcgtgcgggactcctcgtgattttcggctgtgcgcttggcttttccagtcccgtgttgtggttccagcctttcaggggatggggcgccgcgggttgctcaaggctgcgcttctgctgtgcttccttgctgcttgctccgggagagaacttacgatcaaacagaacccttccactaccatatacaactcgactcttgccaagatactcgtggaatatgcttctgcaatctatactgccgatttgacgcaattgtttacttggacatgtgccagatgcggtgacttgatcgaggggttcgagatgatagagatcattgtggatgtcgagaactgcttgcaggcatattttggttttgccagtgacataaacgcagtcgttgttgtttttagaggaactcaagagaacagcatccagaattggatagaggacttgttatggaaacaacttgatcttgactaccctggcatgcctgaagcaatggttcaccgagggttttattctgcatatcacaacacgacactacgtgatggagtagtcagtggtattcagaggactaggaaagcttacggagacattccaatcatgatcacgggtcattcaatgggtggagctatggcttcattctgtgcgctcgatcttgttgttaactacggactggatggcgtaaacctgatgacatttgggcagcctcgtattggcaatgctgcatttgcttcttatttcaagacatacttgcctcaagcgatccgagttactcatgcccatgatattgtgcctcacctgccaccatatttctcattcttcccacagaagacctaccatcacttcccaagagaggtatggacccacaatattggactaggaaccctagtgtaccccgtagaaaagatctgtgacgattctggtgaagaccctacatgctgcagatcagtaagtggaagtagcgtgcgagaccatatatactatcttggcgtcagcatgcatgcagaagactggagcagctgcagaatcgtcatggactacagcaaattgcagtatcagatggacctcaacggtaatctcgtattgtcgaagcagcccggtttgtcaaacgccagaggattcagtgctcagtgaaccagtctatgatttgtacagtataatagcttcacgaatcagtaatgttcaattgttaatggatcaaaggagaagggttggaaccagcatgccgattcggagatgcttattgtacatgtgattacgtaatgtattgttcagtttgcaaatatatattcacacacgccgatatttgacaaa

SEQ ID NO: 111955 - DNA, 762 bp, Zea Mays
aatcaacagttggaactccagcatacatagccctcgaggttctttccagaaaagagtatgatggaaaggtagtagacgtttggtcctgtggtgtcacgctgtacgtgatgctcgtgggatcatatccatttgaagatcctgaggatccaaggaacttccagaaaacgatcagcagaattcttggcgtgcaatactccatcccggattatgtgagagtgtcttcagactggagacgccttctgtctcagatattcattgtcgatccttcaaagaggatcacgatcccggagataaagcatcaccagtggttcctgaagaacctctcgagggagatctcggagagggagaaggccaactacaaggacacggatgccgccgagccggcgcaggccgtggacgagatcatgcggatcgttgaggaggccaagacccccggtgacatgtccaaggtggtcgacccggcgctgctggccgagatggcagagctggagagcgacgaggaagaggcagacaccgatggcacctactgatcgctcctgcatgcagctcagcagctgctcagtcatggtgtccagtccttgtgctgcagacatggcgccgccgagcgcccgagcttaacccgtgcgtgtgatgacggatgttgtattgcactctttactctgtttgtataataaaagtatgtacaatattgtacaattgcagattgccttgtacagataaactagtgtgcactgatatactctgtcccaaattctatgttcc

SEQ ID NO: 111956 - DNA, 742 bp, Zea Mays
atggttagaggtggcttaagccagcacgatggctgcacacccactggttcgggcctgcgcctccaccgtgcccgcgaggttcgtgacctgacgcagccgccgatcgagttaatggacgccgaggctggcgtcgccggcgccgaccagctgccgcggaggcagtactacatgaatctattgcttttggcttaccagagctttggtgttgtttacggtgacctaagcacatcgcctctttacgtttataaaagcacattctctggaaagctcaatcagtaccaagatgaggagacagtgttcggtgtgctttccctcatcttctggaccttcactctgattcctttgctgaagtatgtcactattgtgctgagtgctgatgataacggtgaaggtgcctataaatctctttcttaacatcccctgtcttttcatgtgcctggatggagtgggattagtttgttgtaatccaacatgtatatcggctagcaacgatatgcaagaaaaattaaggctatattgtttatcgtcctaataaatcttatattaaatgaataatatcccttaatgtatcttctgaaagaaggcctatcttcgcacttgtagcttacaaatgactaagggctgcctacacttttgtaggcggaccatttgctctctattcgcttctttgcaggcatacaaaactcagcttgctgccaaatcaacaagcagctgatgaggaactatcttcatactacagaaa

SEQ ID NO: 111957 - DNA, 705 bp, Zea Mays
atggttagaggtggcttaagccagcacgatggctgcacacccactggttcgggcctgcgcctccaccgtgcccgcgaggttcgtgacctgacgcagccgccgatcgagttaatggacgccgaggctggcgtcgccggcgccgaccagctgccgcggaggcagtactacatgaatctattgcttttggcttaccagagctttggtgttgtttacggtgacctaagcacatcgcctctttacgtttataaaagcacattctctggaaagctcaatcagtaccaagatgaggagacagtgttcggtgtgctttccctcatcttctggaccttcactctgattcctttgctgaagtatgtcactattgtgctgagtgctgatgataacggtgaaggcggaccatttgctctctattcgcttctttgcaggcatacaaaactcagcttgctgccaaatcaacaagcagctgatgaggaactatcttcatactacagaaatgggtttgcacctagcaatggatcttcaccttggttaagaaggtttctggagaagcacaaaaaaatgagagttgtgcttcttctcatagttctctgtggcgctagcatggtgattggtgatggtgtcctcaccccagcaatctcagtcctctcatctatgtctggattacaagttcgagctactggtttaaagcatagtaagtacaaatca

SEQ ID NO: 111958 - DNA, 189 bp, Zea Mays
attcagttgaggtttatgtggatgacatttgattcccaggatctagggctgtgtaactcaagcgtcatgacccttttgcctcatgttgcgtgttatttggcagaatttagaaatgtacatgtggtttctgttactacctacctaagtactggcagaatttagaaatgtacatgtggcacttgtgcttta

SEQ ID NO: 111959 - DNA, 2251 bp, Zea Mays
agacaagtgttgcaaaaatgtgtatgttgcgttggatttatggccatacaagaagagattgaattaccttttatcatttatatatcaaaattctctggcatgctttttagaatcactagtttacttcagaaattgatcctgctgtgtttcgcacgtggtttgtgtcgtatccaggttctgtagttctcctttcgtgcattgtgttggttggtctatttgccttgcaacaccgaggtactcagaaggttgcattcgtgtttgcacccattgtcatcatctggctgctttccattggaggaattggtttatacaacattcttcattggaatccaaatatatatcaagctctctctccatattatatggttaagttctttagaaagacaggtaaagatggttggattgctttaggagggatccttctttctatgacaggcagtgaagcaatgtttgctgaccttggtcactttacgagtgcatctgtcagggttgcctttattactgtcatatacccatgccttatactacaatatatgggtcatgctgcatttctgtcaaagaacacatttcacatgccgacaggtttttatgatactatcccagaacctgtgttttggcctgtattcgtggtggccacactcgctgcagttgttggtagccaagctgttatttcagcaacattctccattgtgaaacaatgccatgctttgggatgtttcccacgagtgaaggttgttcacacatcgaggtggatctatgggcagatatatattccagaaataaattggattcttatggttctttgtgttgctgtcactattgcatttcgtgatactactcttatcggcaatgcctacggtattgcctgcatgactgttatgtttgttactacattcttgatggcattgataatcatctttgtttggcaaaggaacataatatttgccctagtttttctggttttctttggatccattgaagctgtatatctttcgtcatctctcatgaaggttactcagggaggatgggttcctcttgtgcttgctttcatattcatgtcagtcatgtacatttggcactatgggttaaggaggaagtaccagtttgacctacagaacaaagtatcaatgaggtccatcttatctctcggtccaagccttggcatagttcgggttcctggtattggattgatttacacggagctggtcactggtgtaccctccattttctcacattttgtcactaatctccctgccttccatgaagtcctggtcttcctttgtgtgaaatcagtgccagtgccgtatgtttcaccggacgagcgataccttgtgggtaggattggacctaaagaatatcggatgtaccgttgcatcgttagatatggttacaaagatgtgcagcgggacgatgacaattttgagaacatgttagttatgaacattgcaaagtttattatgatggaagctgaggatgcatcttcttcagcaagttatgatgtctctaatgaaggaaggatggcggtcataacaaccaccgatgcctctggcagtccattggccatgagagatttcgacggcctagccgactccatgactatgaggagcagcaaatcagaaacccttcgaagtttgcaatcctcctacgagcaagaatcccctagtgtaagccggcgccgccgtgttcgctttgaggtaccagaggaggatggcatgggccggcaagtgaaagaagaactcatggcgctggtggaagcgaaacatgctggggtggcatacatcatgggccattcttatatcaaagctaggaggagctcaagtttcctgaagaagtttgctattgatgttggctactctttcctccggaagaactgcagaggtccatcagttacgctgcacattccacacattagtctgatagaagtgggcatgatctactatgtttagcctaatgcccatggccaaagttgacatgtggatacccggctgggacaattctgttttcccttcagtcctatctggcagcttgtgctttctgggccaaggatcctcgtgcgcttaagtttcagcttgtagagaagaaggcagactttccttgttaatattattttttagcctaaataaacaagcagaatgttgccggttatgtttctcatttggtatatttgcatgcatgctctgtaattttttctgcgggctatgtgatggaaatatatgcactccttataaactggtcagcgttcctctctctc

SEQ ID NO: 111960 - DNA, 1224 bp, Zea Mays
cactcgcacggatcacggccggacggacggacggagacgaacaagcagctcttctgctaccaatatggccttctcgtgtgtgcctgccatgtactcctgtgggcacctgtacgcaacacacacacacactctatgtatgtatgtatgcatcgggctgccacaccactactactagtccactctcccaatgcaagcgtacgtctctctctcgcaccaataaaacaagaaagagatcgacagacgccggcacaagcacaaagagaggccccgaccgcgatggatcgtcagcgacagaccgaccgtgacacagccaacaactaacacgcacgcgcgcgagagagaaagagagctgcccgggagagagagagaggaaatcaaacgaaggcgacgacgtacggagacggcatggccgatcaccaccaccaccaccaccacgggcatccgccggacgggcccggcggcgcgggggaccagctggaggtaatcaaggagcaggaccggctgctgcccatcgccaacgtcggccgcatcatgaagcagatcctgccgcccaacgccaagatctccaaggaggccaaggagacgatgcaggagtgcgtgtccgagttcatcagcttcgtcacgggcgaggcctccgacaagtgccacaaggagaagcgcaagaccgtcaacggcgacgacgtctgctgcgccttcggcgcgctcggcttcgacgactacgtcgaccccatgcgcaggtacctgcacaagtaccgcgagctcgagggcgaccgcgccgcgtcctcccgcggaggcggaggcggaccggccggcgccgcagaccccgcgtccgcctcggccgccgccggtcccagccccagcgccgcatcagccggtcatttcatgttcggcgccgccatggaccggcccgacaacaactcatccgccggcgccaggcccttttaatccatccttcctcatcttgcttgttattactcatcagattcagatcaacaacaaaagctacctgcgacgagctagcttaattagcttattgatttctactactgctactcattttttttgggacaggtgagtcgtcgtcgtcgtatcgtatatccaatccaaattcttgcaagctatatctatctctttattagcgctagctagtcacaacagtacgcatgtatcggtgaagaaggaattgggggttgggatgatacggttaccgatgatgaggtacca

SEQ ID NO: 111961 - DNA, 504 bp, Zea Mays
aagatgagccatacttccaatttcactggtttttcccaattagaacatccccaaccccaaagaaattctagggcatcaagttcaaccacacatgatgccaacgttaggcatgacaacaacctcttgcccattgccaatgtcgggaggatcatgaaggacgccctccctccgcaagccaagatctcgaagcacgccaaggagaccatccaagagtgcacgacggagttcgtgggcttcgtcaccggcgaggcctccgagcggtgccgccgggagaggcggaagaccatcaacggcgacgacatctgccatgccatgaggagccttggcctcgaccactacgccgacgccatgcgcaggtacctgcagaggtatcgtgagaccgaggagctagcggcagcactcaacagtggcggtggtggccacgatggcaatgccattcagattgatgtgagggatgagttgtccatcttcaagggtagcaaccagcaaggtggcagagattaa

SEQ ID NO: 111962 - DNA, 250 bp, Zea Mays
cgaggattattgcaggaggttttctggccacggtgataggcggaagtgcggcggtgtcgaagttcgacgagagattgctgctcgccgaccgtcgcacatgcccgagatgatggacgagcacccccgcggcggcccaaggaagctcccagacatggcccatagaccttccgatggtgtacaggcggaatcgactgcggcgcccgcacccaatttctccgttcatgctcccttccacgcgcaaggagtcaac

SEQ ID NO: 111963 - DNA, 261 bp, Zea Mays
tctgagttaaagcatgtcttggatcagaaagcaagtaacaagtattgcattgatgtgcgactgcattggggagactataattcacatgacatagaacattatacaagagccaagttcatggattacacaacaaacaatatgtccatatacccatcgccaaccggtatgtttctgaatatccatgaactaccaatttcttatctgttggggacttgttttcaaatgctatgagttaagaacaaggcaacacaaaatattaaa

SEQ ID NO: 111964 - DNA, 222 bp, Zea Mays
atgctgtcaggggaatggtcctgctgggaagtggccgagagtagaagcagctcccctattccagcacgcaaactctccaacaaaatgggtggtggctatggaattttccaacaccgagtggagttgcccattgaggtcgccatagggggtcacaacggcattctgcaagtatgcaagcacaacagcaataggcaccctctgaaccgtcttcaagctgactag

SEQ ID NO: 111965 - DNA, 1997 bp, Zea Mays
ttgtccgttgtccgtctctcaagagaactgaagaacacacaatttctcattttccatctctagctcatctcctacaaacaagagtctgcatatagcagtatagaaggcgtgtgtctgcctgtcaatttgttgatctcgctagcgcgtgtggctttggcgcatgcaagcagcaggttagctgattgctatcatccgcatcggatccatgtcgggagctgccggtagggagtgcaccggcggcggcggcagtcgtagcagcagcttctcttctgtgagcaacgcatcacctacggaggtggaggaagagttcctgcggtaccacaccaatccgctcctcggtggccccacgacggagatgcgagacgacggcggcgtcaccggcggcccctcggatcagccgccgctgactgtgaagaagaagagaagccttcccgggacaccagacccgagcgcggaggtgatcgcgctgtcgccgcggacgctgatggcgacgaaccggttcgtgtgcgagatctgccacaagggcttccagcgcgaccagaacctgcagctgcaccggcgcgggcacaacctgccgtggaagctgcggcagcgcggcgggcccggaggaggcgcggacggcggcgggccgccgaggaagcgggtgtacgtgtgcccggaggcgtcgtgcgtgcaccacaacccggcgcgcgcgctgggggacctcacggggatcaagaagcactactgccggaagcacggggagaagaagtggaagtgcgagcgctgcgccaagcgctacgccgtgcactccgactggaaggcgcacgccaaggtctgcggcacccgcgagtacaagtgcgactgcggcaccgtcttctccaggcgagacagcttcgtgacgcacagggcattctgcgacgccctagcccaggagaacaacaagctatcccagcccatgaacatggcgacggtggcctcagccctccaggggcaagctccccaccaccaccaccatcaccacctggcgctaccatcgtcgtcccaggcggccgacgaccacgacaatgcagccggcgatgacgacaacgacggcgacgacttcgccatcgacactaagagcccgcagctgaggatgctccccgccatgtccgactccgccgccgccgacaacaacaacaacaataacccgctattcctgccgccgccaagcatggccgggtgcatgctctccagcctgcagcagggcggcgccgcgaggcccgccccgccgccgcctgcatcctacttcagcggcggcggcaaggcagcaggcctctacgaccccagcgcgtcctccccggcgagcatgtcggccacggcgctgctgcaaaaggccgcggagatgggcgccaccgccggcgggtacggcgcgggcgcgggcttctccaccgtcggattcgggcccatgatggctgggcctagcgtcatgggcctttttgggcctgtgaagactcctgcggcgctctcgctcgaggtgtacgatgggatgccgttgggcccgacacagctggtgggcctcgacgtgggcaggctcttgccgggccagcaccacctctacggcagcagccatggccatggggtcggcatcggctccatgaccagggccatcgggtcgctgatgcacggcggcggccagcaggcggagcagcaccggcggccggacgacgacacccgcgtcgtggattacctcggcgtcgacgaccagcggacctgtttcagcggtgtgagcccctttgggcctcacataggcccatgggcttagtacctatgtaccctgcctgtgcctgtttcccttcctcatgcaaatgcaaacttactacccttgggccgtgtggtttgtttgtccggcgaggtaactgggctggccctgtaagatgctgagggtattcttgtcaatctagcatcatccgagtcaccggagcagaaaaaccctaacccacaaatcacccccctatatataaacaacggcttcctcc

SEQ ID NO: 111966 - DNA, 2934 bp, Zea Mays
ttgtccgttgtccgtctctcaagagaactgaagaacacacaatttctcattttccatctctagctcatctcctacaaacaagagtctgcatatagcagtatagaaggcgtgtgtctgcctgtcaatttgttgatctcgctagcgcgtgtggctttggcgcatgcaagcagcaggttagctgattgctatcatccgcatcggatccatgtcgggagctgccggtagggagtgcaccggcggcggcggcagtcgtagcagcagcttctcttctgtgagcaacgcatcacctacggaggtggaggaagagttcctgcggtaccacaccaatccgctcctcggtggccccacgacggagatgcgagacgacggcggcgtcaccggcggcccctcggatcagccgccgctgactgtgaagaagaagagaagccttcccgggacaccagacccgagcgcggaggtgatcgcgctgtcgccgcggacgctgatggcgacgaaccggttcgtgtgcgagatctgccacaagggcttccagcgcgaccagaacctgcagctgcaccggcgcgggcacaacctgccgtggaagctgcggcagcgcggcgggcccggaggaggcgcggacggcggcgggccgccgaggaagcgggtgtacgtgtgcccggaggcgtcgtgcgtgcaccacaacccggcgcgcgcgctgggggacctcacggggatcaagaagcactactgccggaagcacggggagaagaagtggaagtgcgagcgctgcgccaagcgctacgccgtgcactccgactggaaggcgcacgccaaggtctgcggcacccgcgagtacaagtgcgactgcggcaccgtcttctccaggcgagacagcttcgtgacgcacagggcattctgcgacgccctagcccaggagaacaacaagctatcccagcccatgaacatggcgacggtggcctcagccctccaggggcaagctccccaccaccaccaccatcaccacctggcgctaccatcgtcgtcccaggcggccgacgaccacgacaatgcagccggcgatgacgacaacgacggcgacgacttcgccatcgacactaagagcccgcagctgaggatgctccccgccatgtccgactccgccgccgccgacaacaacaacaacaataacccgctattcctgccgccgccaagcatggccgggtgcatgctctccagcctgcagcagggcggcgccgcgaggcccgccccgccgccgcctgcatcctacttcagcggcggcggcaaggcagcaggcctctacgaccccagcgcgtcctccccggcgagcatgtcggccacggcgctgctgcaaaaggccgcggagatgggcgccaccgccggcgggtacggcgcgggcgcgggcttctccaccgtcggattcgggcccatgatggctgggcctagcgtcatgggcctttttgggcctgtgaagactcctgcggcgctctcgctcgaggtgtacgatgggatgccgttgggcccgacacagctggtgggcctcgacgtgggcaggctcttgccgggccagcaccacctctacggcagcagccatggccatggggtcggcatcggctccatgaccagggccatcgggtcgctgatgcacggcggcggccagcaggcggagcagcaccggcggccggacgacgacacccgcgtcgtggattacctcggcgtcgacgaccagcggacctgtttcagcggtgtgagcccctttgggcctcacataggcccatgggcttagtacctatgtaccctgcctgtgcctgtttcccttcctcatgcaaatgcaaacttactacccttgggccgtgtggtttgtttgtccggcgaggtaactgggctggccctgtaagatgctgagggtattcttgtcaatctagcatcatccgagtcaccggagcagaaaaaccctaacccacaaatcacccccctatatataaacaacggcttcctccattcttcctctgtgccgccgcaatcctctgcagccacctgagtcgtcaggtttattcatggctcggctgacgcggaagcacgattgtccattcatcgccttcaatttcttcttcattttctctggttcttttggttttgcttctgtcttttttcctgcttgctttgtcttctgatctgactggaggctgtgatgaccaaaaatacctacctattttcagactcctgacgatagaaaccaatggatccttctgagccttcctaaggtttatactcaatttgtcttccctgcttgtttatgttttaatttgctttaaaaaaacgcgaaaggaaggcaggatttttgccttgttgatgtgatgataaacctggacagaaacttcggtgttgaccaaaatttcagactacaattatctgatcaactgcaaaatcgtgcctttctgatagtgaatttgaccaactgcaaaaatccagaccacgatttttatgatacgtcacaagtttctgagtgtatttcaacgagcgacgattcaggcagcccctttgtccgatctcaatggcaatggaggtgttgcgttgctcggagatagaaatcttttggtcttcagatcggctgagtggggaggcccgcctcccctcgctgaggctggtctagtaagtctctgaaagtgctctcgactaggcaccttttttgctatttgaatttaaataaatgaattgctcatttgtacgagcccgtgcttacaacagaaacatataataccattggtaacttatgtaagctagggatgaccatcgacacatatttgatcagatcttaagttgcatgtgcattcctgtaaatcaaaactttgtactcggcagaagcaccgcgaagtagtatgaagtagtacttggttgaccacgggcgcagctggaggtcgccgccaacctggagcg

SEQ ID NO: 111967 - DNA, 2010 bp, Zea Mays
atggacagcggcggcggcggcaagcacttcatcctgctgcacggcctggcgcacggtgcgtggtgctggtacaaggtggtggcgcagctgcgcgccgcgggacaccgtgcgacggcgctcgacatggccgcgtcgggggtgcacccggcacgcctccacgaggtggcgtcgttcgaggactactcgcgcccgctgctggacgcggtggccgcgtcccccgacagcgacaggctcgtcctggtaggacacagcctcggcgggctcagcgtcgccctcgccatggagtggttcccgggcaaggtcgccgccgccgtgttcctggccgcgtccatgccccgcgtcggcaggcacatgggcgtgaccatcgaagagttcaagaggacgatcaaaccggactttttcatggacagcacaacgacgatcgtgaacacagagcaggggcctcgaactgcacttctgtttggccccaacttattggcatccaaattgtatgatcaatgccctgcagaggatcttgaactggcgaagctgttggtaagacccggcttccagttcatggacgacccaacgatgaaggacgagacgctgctgacggacggcaactacggatccgtgaagagggtgtttgtcgtcgccaaagccgacagaagcagcaccgaggagatgcagcgccggatggtggagctgagccccggcgcggacgtcgaggaggtcgccggagccgatcacatggccatgctctccaagccaacggaggtctgcgaagttctggtcaggattgccggcagaattgacccgttaccctgtaaacgcaaaccatctgccaagaattggtcaacaattatagctttcttgcagcagaaggtgacgatgtggatgataaacaaacacggtggcaaggcccctgtacagacaaaaggcccttcaatcgatcgcgaactctgcggtagtcctcgccaacgtgaagcaatggaggtcgggggcggcgagaagcacttcgtgctggtgcacggcctctgcctcggcgcgtggagctggtacaaggttgccacggcgctggaatccgccgggcaccgcgtcacggcgctggacctggcggcgtcgggcgcgcacccggcgcgcctgcaggaggtgcgctcgttcgaggagtactcgcgcccgctgctggacgcggtcgccgcggcgcccgacggcgacaggctggtcctcgtcggccacagccatggcggtgccagcctcgcgctcgccatggagaggttcccgcgcaaggtcgccgccgccgtgttcgtggacgccgcgatgccgtgggtcggcaagcacatcggcgtcaccaccgaggggttcatgaagaaagctgcatccaaagggctgctcatggactgccaaatcgtggccatcaccgacggcaccggcagcgaagaaggcgccgggcagcgagggacagcgatcgtgatgggtccagagttcttgaagaagtgctacaaggagagccccgcggaggacctgaccctggcgacgctgctggtgaggcccggcaaccagttcatggacgacccggtgatgaaggacgaggcgctgctcacggccgccaactacgggtccgttaagaaggtgttcgtggtcgccaaggccgcccatggatccagcgccagcgccgaggaggtgcagagctggttagcggccacgaaccccggcacggagatgcaggagatcgccggcgccgaccacgctgtcatgaactccaagccgagggaactttgtgacgtccttgtcgggatagccagcagatacgactaataagaatgtcgaacactattattgccgccgcgcaactaggcgtgcatgatcggttgatgatgtgtaatttgtgctatctttaaaatagttattatgcttaaattttacctatcaacatcttccatttcaaattccatactataaatattgcagactataatgtaaaaaatattttgcataattatatatgcgattggttggctatagccttac

SEQ ID NO: 111968 - DNA, 4853 bp, Zea Mays
atggacagcggcggcggcggcaagcacttcatcctgctgcacggcctggcgcacggtgcgtggtgctggtacaaggtggtggcgcagctgcgcgccgcgggacaccgtgcgacggcgctcgacatggccgcgtcgggggtgcacccggcacgcctccacgaggtggcgtcgttcgaggactactcgcgcccgctgctggacgcggtggccgcgtcccccgacagcgacaggctcgtcctggtaggacacagcctcggcgggctcagcgtcgccctcgccatggagtggttcccgggcaaggtcgccgccgccgtgttcctggccgcgtccatgccccgcgtcggcaggcacatgggcgtgaccatcgaagagttcaagaggacgatcaaaccggactttttcatggacagcacaacgacgatcgtgaacacagagcaggggcctcgaactgcacttctgtttggccccaacttattggcatccaaattgtatgatcaatgccctgcagaggatcttgaactggcgaagctgttggtaagacccggcttccagttcatggacgacccaacgatgaaggacgagacgctgctgacggacggcaactacggatccgtgaagagggtgtttgtcgtcgccaaagccgacagaagcagcaccgaggagatgcagcgccggatggtggagctgagccccggcgcggacgtcgaggaggtcgccggagccgatcacatggccatgctctccaagccaacggaggtctgcgaagttctggtcaggattgccggcagaattgacccgttaccctgtaaacgcaaaccatctgccaagaattggtcaacaattatagctttcttgcagcagaaggtgacgatgtggatgataaacaaacacggtggcaaggcccctgtacagacaaaaggcccttcaatcgatcgcgaactctgcggtagtcctcgccaacgtgaagcaatggaggtcgggggcggcgagaagcacttcgtgctggtgcacggcctctgcctcggcgcgtggagctggtacaaggttgccacggcgctggaatccgccgggcaccgcgtcacggcgctggacctggcggcgtcgggcgcgcacccggcgcgcctgcaggaggtgcgctcgttcgaggagtactcgcgcccgctgctggacgcggtcgccgcggcgcccgacggcgacaggctggtcctcgtcggccacagccatggcggtgccagcctcgcgctcgccatggagaggttcccgcgcaaggtcgccgccgccgtgttcgtggacgccgcgatgccgtgggtcggcaagcacatcggcgtcaccaccgaggggttcatgaagaaagctgcatccaaagggctgctcatggactgccaaatcgtggccatcaccgacggcaccggcagcgaagaaggcgccgggcagcgagggacagcgatcgtgatgggtccagagttcttgaagaagtgctacaaggagagccccgcggaggacctgaccctggcgacgctgctggtgaggcccggcaaccagttcatggacgacccggtgatgaaggacgaggcgctgctcacggccgccaactacgggtccgttaagaaggtgttcgtggtcgccaaggccgcccatggatccagcgccagcgccgaggaggtgcagagctggttagcggccacgaaccccggcacggagatgcaggagatcgccggcgccgaccacgctgtcatgaactccaagccgagggaactttgtgacgtccttgtcgggatagccagcagatacgactaataagaatgtcgaacactattattgccgccgcgcaactaggcgtgcatgatcggttgatgatgtgtaatttgtgctatctttaaaatagttattatgcttaaattttacctatcaacatcttccatttcaaattccatactataaatattgcagactataatgtaaaaaatattttgcataattatatatgcgattggttggctatagccttacaataaaaaatagcttcaaacatctcccactactaaactgtttggtagtccaaatcatcggagaccagaccttgcaacaaaccccaccaaacacgtgttaaataaaatatttaggtttccttttaaatacaagtccatttgtcttctctaaattctccctcaggttttctctctcgtagcatctccaaaatgagaccctaagtagagtcgcttctttattttacaggttggaggaaaaaaacaaaatataattgtctcaaatcaagtctctatattatttttatcaagaccctcaaattattcccttggccccatcttcgagggatgtgaaggttcgttctctcggtttttctttaagtactagttttggaaccccattttttcaaggggtttctatttttccaaagaaaattagtttattttctcttggaaaaatagagatcccttggaaaaaatggagttcccaaactagtcctaattatttttttttccaaccaactccttccctcgtttcctttttttgtttctgtcgttttctttctttcgcttgtgtcatctccgccttccatgtccaggattgagatcctccactgtcgactgcaatagctgcagagtagacccaacaaggtgctagagccacacgaaatgattgttgcactctacagtcgactgcagaggaacccatctcccatgtccatctaaaagcgggaaagaagtgggtaagcgagaaagaagtggcgtcaatagatcggggtccaaggctacctgagtcctccttggtatgccacctccgtcagcactactcgccccattatatactactcccttatacaacgagcctccttccatgtctgccacgtcccccaacgtgactcgcctccgctatacttttcccttgccatggctcctctgccctagcacgaacaagcatatcttagtccatgagagtgaggaagagaaaatgatagagaataatggcaattacgtcccatgtatatcggtgtcaattgaattggacttaagggccttgatttgagagcttctgctgtggtagataaaaaagtttaccctcaaaaagtagagaagccctcaaatcaagatcataaaccatgaattgagggctcctgctcaagttggtcttagttcttttagagcaagtataataatagattgtaaacaagctaaatgttaaagtggaggagagagagaataggagagagaagaagcagacttaaatttacagccggctaaaacacaagaaccaaaaaccgttgtgtaagagacaaatagggtcatgcattagtaatgaagagctaattaccatatggatggactgcaaagatccttagagtcagcggccggctatagtattaaacttgctctcggtcgttagtcgggatctaaaagccctatttcaaagtccgacgctcgacattcatccaggtccttcaacgaaattttagtagtgtgttataaattcgcgcttggtttaaatgattatactctactccataccataagttaatttctagatacatagatttcattgtgtatatagacatcatgtatatctaagtatgtagaaaaaaaatcatgtacctaaaaacattagaataatttataatttggaatagagcgagtagaacaatataaaccctaatttctatatattaaagcaggtagcaaatcttctccctaaagctgtccacgccggtatttttgttttcatccgcacgttcgacaatcaacggctacgggacaaccttcgatacaacttttctttttcggatgaggtgaacgttctagaatgagcggaggcgagcattccagtacatctacgaactcactcaccttcgttcgctagtcgtcacccagagattcgttgccgacctcaccgtcgccgacgcgacgcgacgccaccgacgttgggagcacacagcgccacgtcgtcgcggcttccatgacttctccatcacgttcgctgtgtccccaaccctctgcgcgcacctcatccacgacttccccaacatcaccgttaccacgaccgctgacccgactgactccctatcgcacatgctgttgcagttcgggagtgggacggatgacacggaggccatcacgctagggttcggcctttccgacttcccctaagtagggaaggcgctgcttgatgacgactccttcgcgtgaccagtggcgttcgacctgggtgcatgctgggacagcgctgggttcgtcgacctaaatgccactggtctcttcctcaacttcccgtgacacagcggtgaggcgtcctgctctgagatagttgaatttaaaagtaaaatgagtttgttcatatcttgctggaaaaggagtttgtttatatctcaacctacggtgacacaaaggtgaggcgtcctactctgctatgtcaggtatggttttttgtcttgctcagctcaggtgaatctgacatccttgaattaaatggaaagcactttgttcatatctagctggaaaaggagttcgctcatatctagctggaaagcattgtgtttaaacttatctaaaatttacttcacctttacagatccatttgttgctaagcatcgacgaacaagataaaacattaccaaaggcaattgaaatcagtgatagttatcttgctgaaggtggatatagagaagataaatctactatgtactccttaagagattgatatttgcagttaaattatatttgtttcaaggatccaacaccaaacatgtatacttgctgatttgttacttttattctattgactaaattttctgaaggatagcatgaatacttgctgatttgtcaagccaatatgacaacaac

SEQ ID NO: 111969 - DNA, 1102 bp, Zea Mays
gtagaaggcgaaagaaggtcggaccaatggcaagataagtgtctcaaaaagaaaactagttactacaaggcaaggatattttgtctcttcctcctccgatcgaagtgtgcttgcgtcctgatcccaccaaccgcagaggacagaggaccatggagagcggcacggagcggcggcggcggcggcaccacttcgtgctggtgcacggcacctgccacggcgcgtggtgctggtacaaggtggccacactcctgtcatccgcgggccaccgcgtgacggcgctggacatggccgcgtgcggcgccagccccgggcgcgccgaggaggtgccgtcctttgaggagtacagccggccgctcctggccacggtggccggcctggcgcccgaggagaaggtggtcctcgtcggccacagcttcggcggggtcagcctcgcgctggccatggagcagtacccggacagggtcgccgtcgccgtcttcgtcgcgaccggcatgccctccgctgggaagccgatggcgttcgtcttcgagcagtttttgcaagaagagtacccagcggaccgctacatggactgcgaattcgaaaccagcggcgacccccagcgtcccgtggagacatttcggttcgggccacagtacctgaagcagagactgtaccagctcagtcccccagaggacttgaccctggcaatggcgatggtgaggccgtcacagcggttccgagacgacgcgacgatgaaggggggtatcctgacggcggaacggtacggcggcgtgaggcgggtgtgcgtcgtcgccgaggacgacgcgtcagtgccggcaggcttccagcggcggatggcgtcgtggaaccccggcacggaggtgacggggttgcagggagccgaccatatgtccatgctctcgaaaccaggggagctgtcagaacttctcatggaggttgccaacaagtacagctgaaacttgtatcatgtaaatggctatcagcaaaatggttgttcaggtacgcttgtttcagatgaacaaatggagacggaagtttgaagtaacacgatgaaataagactagattttgtatccaatgcagttgtaactttctaaggt

SEQ ID NO: 111970 - DNA, 979 bp, Zea Mays
atggcgacgacgcggccgctggagctgacactgatctcggccaaggacctcaaggacgtgaacctgctatccaagatggaggtctacgccgtggcttcgctctctggcgacccccggtcgcggcagcggatccaggccgaccgcgccggcggccgcaaccctacctggaacgccacgctccgcttcgccgtcccggcaaccggcgcctcctcctccctccacatcctcctccgcgccgagcgcgccctcggcgaccgcgacgtcggtgaggtccacatcccgctctccgagctcctctccggcgcccccgacggccccgtccccgccaagtttgtcgcctaccaggtccgcaagatctcctcgggcaagccccagggagtcctcaacctgtcgtacaggctcggcgaggtcacccagacgacaggcgccaacggctacgcccccgcccaggccgcctacacccaggccgctgcgtacccgcctacctccgcgtaccagccaccgtccggcaaggccgacacgtacccgcctccttcaggcaaggccgacgcgtacccgcctcctgccgcatacccgccggcagccaaggccgacgggtacccacctccgggcggcgcgtacccgcctgcggcaggcaagccggccaaggcgggcgagccggtgacggcctaccctgccgccggtcccagcacggcggcgccctacgccgctcctccgtcgcagtacggcggttacgggtacccgccaccgcaggccgccgcgtacgggtacccgccaccgccacaggccgggtacgggtatcagcagcagcccaagaagaagaacaacttcgggatggggctcggcgccgggctgctgggtggcgccgtcgggggccttctggtcggggacatgatctcggattcgtcggcgtatgatgccggctacgacgccgggttcgacgacggcggtggcttcgatttctagagcagcgcagtgg

SEQ ID NO: 111971 - DNA, 1561 bp, Zea Mays
ataaggatattgcacgagtttaaattagaatgtatggatcaaaaaataactagttttgagagatacatgaattaaatgatggatttaatcccaccatagaattagatatgggatataaattcatccaagaggaaggccttaactgtaacccaaacccaacaggtgagtcgtaggaacgggccttgcggttgtgggccgaaaattttgttgttgttcgaatcaacagtcacgtcgctcaggaagaagggaattacggtgaagaaaacgcgtccatccaatccaagcttcacaaaaagatcagcactagtaggatatgcaaagaccaaccaaaaggcaatgaacacacacgaaagcaacagtgtttattacacaggctgttaacacatggcgcagcagcaaatgcaagacaggatgctgcctcttttattcgactcggggctccgacgcatccgcgacccaggcaacggcgcaacgcaaggcgaggtcaagccgaggaggagggcggcgggggcaaggggatggcggcgacggtcttctggaacgcggggcgggcgacgatggcctcccaccaggccttgacgtgggggcgggcggcgacgagcccggccttgggggtcttgctgaggtagagcaggtaggacgcgtggttggcgtcggcgagcgtgaactcgtccccggcgaggtacttgttgcgggcgaggtgcgcctcgtacacgtcgagcaccttggcgagctgctccgcgtgcttgtccaccaccgccgcgtcgggggcgccgcccaggagcggcctcacgagcagctggaacaccagcggcgacgcgttcgggtagaagtggtgcgactccacctctagccacacctccagcttcgccgccgacgccgtcgcggggagcaggtccgtgccctccgacgcgtacttgctggcgatgtaccggttgatcgcacgggactctgcaacgcgagattgcggttcttacacgacacgacagctattgagttcttaggacagttcagcacagaaatccgagtggtcaacacaacagggataaggttcatttttttaaaaaaaaaaattgaaaaaaaaatccagagattactgctcctagatctggatctagatctcgtacgttatttaatttcataacaataatcaaccgcgacgaagaattattatcagtaaaaacagaggcgggggagtttaccgaagaggacttcgtctccgtcgacgagagccgggatctggccgaaaggctgttcggacgaaagagggagccacacagatcaggcgcaagctaaattagcagagagagaggaaagacgcatgaacatgacgcacgttgagggcgaggaagtcgggctgcttgtgggcgccggtggtgaggtcgacggggacgatctcgaagtcgaggcccttctcgttgagcacggtggccacgcgcaccacgttgggggacagcggcatcccgtacagcttcagaggcgccatccctgctgctgctgcttggtcaagtctctcgcacgcgtccaggccgcagtggataggagtagagtgggagcgagt

SEQ ID NO: 111972 - DNA, 802 bp, Zea Mays
gattcgatgttattgatcatctatgctctgttgatctgttcctctgttcctgctatgcttgatatatttttcactacttccacgctagcactacttttctgtactgtagttgagttgctcaggcaaaacgaacactgaaattaaactcatggctaggtaccagttttaactctcttcggcttggcatggaattgaactgaaggttttcgttccaacgtcacgcaggggagccattcctgtactggatgggtccgcggccccgggtctgcctcttcgactacgagtcgtgctcatctcagatctccccaccggtgggcgacacgttctctgaaatgcattcgttcatggccggtttcgtaagtttttatatttggagacgatggtcagctgtgctgagccactgatcaagcggtgggaacagctcacagccagcagatccagcgaggacggtgggaggggagaagtgcaagtggagttcagcaagcagttccaggacctgacggcagacgttatctcccacaccggtttcggaagcagctacaaggagggcaaagaggtgtttcatacgcagaagcagctcctggcgctcgccatagcgactctcctcaacgtgcagctgccaggattcaagcaagtcgatctatttcttttcttgcctcttcttggtcaccactcaccagtaatcggtcttgcctttttctgtacatccaaacgacggtttggttgattgagttctgtacattaccttattccttaatttttatgtatgatgaagctggagacatgaaatcgctctgctata

SEQ ID NO: 111973 - DNA, 685 bp, Zea Mays
ttcgttctaggacaaggtcttcgcctgcaaagacagttacaaagaggttgttcaccgacatagatggaggaaccactggcttcaaggatgccgcagataacactgctgctcctagcccttccaaagatgcttagtcacatagtggcacaagtcttttgggctcacagttgcagctgttcgctcttttggatgatcgttgtctactgcttttgtatccaagctgctatgtacagttgctttcggaaggatgtatgatacatgttcatgtccacgtgctcgatacaaattggcccaaagcagacttaacaaagttactactagatcgtggttcgccatcgatgctatgcacaggccacactggatttctatgcttgttgacatgaatgtgcttcgctcccttcatgtttaagcctaagcagcttgatgtgcttgtgccaaagactttttaagaactgcgcagcaaaccaacgcttacagcgtgcttttgtgtacaacgatcatctgcttgttgcaccgtacatgtatagtctatggagctgtaaactgttagagttatgtactgttgtattgaacactgtttcgcaactgcatgtacgctgtcttttagagacagttgtggaacctacgcccgtgccatatgtattatattgtcatattgtatcctacaatatgtttgtgttcctac

SEQ ID NO: 111974 - DNA, 902 bp, Zea Mays
gtataaagctctctccctccgcgcttccgatcagttcacgacgactccaggtccaggaggggcgcacttgactttcccctcctcctcctgcgagcaccttcctcgcctcgctctcatggcctcatcagagcctatagagtgccaggtaccaatgttctctcctcttctctctttaatctctttccctggacccgatcgagttccagttctggtacatgtttgcagagcgcgcaattggtcttcttcttcagcttgtctgattcctgttccagcggtccagccactgtttttattttcttcatcttcttcttctttctgtttgattcttcttcttctcagcgatccgtctgtgactgtgtgtcctgttttaattcaggttgtggcgctgagggtgtcgattcactgccaaggatgcaagaagaaggtgaagaaggtgctccagaacatcagcggtacgcgtcgcacgctcttagctagcgggtctttcagtttaccacccacacgtcgtagcttggcattgtccaaggccttgcttacacagctccttgccttcgattgcagcacctactcagcactagtacatgcctttttttttttgcaagcaattgccggcctcgttcttgttttttttctaatcggtaaaataacgaaacaaagtcgatggcaagtctctgggacagtttgatcgggtgaaggtgctgagtttgtgttgtttttgatcctgttcaaggcgtgtaccgatgcgaaatcgatgcccggagcaacaaggtcgtggcgacggtctcgacggagctcgacccctacatgctggtcgccaagctgcgcaagtccggcaagcaggcggagctgtggccggagcagccggtgcagcagcaggagcagccggcaccagtaccaccagc

SEQ ID NO: 111975 - DNA, 1804 bp, Zea Mays
gtataaagctctctccctccgcgcttccgatcagttcacgacgactccaggtccaggaggggcgcacttgactttcccctcctcctcctgcgagcaccttcctcgcctcgctctcatggcctcatcagagcctatagagtgccagagcgcgcaattggtcttcttcttcagcttgtctgattcctgttccagcggtccagccactgtttttattttcttcatcttcttcttctttctgtttgattcttcttcttctcagcgatccgtctgtgactgtgtgtcctgttttaattcaggttgtggcgctgagggtgtcgattcactgccaaggatgcaagaagaaggtgaagaaggtgctccagaacatcagcggcgtgtaccgatgcgaaatcgatgcccggagcaacaaggtcgtggcgacggtctcgacggagctcgacccctacatgctggtcgccaagctgcgcaagtccggcaagcaggcggagctgtggccggagcagccggtgcagcagcaggagcagccggcaccagtaccaccagctgagagccaaaggcaggaggagcccaagaacaaccagcctgcggagccgggccgacccagcgaacctgccgaggagcgcggcgccgccgccgacacggccgaggccgccgcggcggagccgagcaacccgctaccttcgccgccggagcccaagccgagcgccggcggaggagaggccccgaatccggcggcccaggacagcaaagaaaacgccagcgccgacgacgtcggcggcggcgacgatacggccgcggcaccggcaccggcgcagcaaggacccagcgaggcgaaggggaaagcgaaatcgaagcagcatacggcggagatggaggagaggcagcccgtggacgccagagtgactgtggagtacgaccaccgaggcgtcggtgggggctacgtgagccgcatgccgccgccggcagtcatgagctacaaccaggtgcgcccgagcgtgagcgcgtcctactacgcccccgccccggctccggcgccggcgccgatgccgatggggaggcccgggccgtcgcagggctacatcgacgagcactacacgccgtcttacagcagcagtagcaacaactactactcctccaaccggtcgccggcgtacgagccgtactactacagcgctccgcagccggcgccgtatagctaccagtaccagtaccagccggcttcttcgtccgaggattactactacagcgcgccgccgcagaggagcgccttctcgccgccgcgggagggctacggcgacatgttcaacgacgagaacgccaattcttgcaccgtcatgtgaagggaggatgcatgcaaacatggaagtagctagtttacttacagttccttattaatcaagcgactctctctatatatatatatatatatttgtgtgtgttagtatattttagaaccagtaattaagtacgagtaaggagatgtattaaaagcactgttcagtcttgatggcgctgaataagttgagagctctgagcttgaatgcttgatgcatgtaccaaccgtgatagatagaggagaatgtgaggatctgaatgaacagctctggtgttcatcacagcaaattttgtaatgtatgacatggtcaaaatggggacttccaatctcttcaacttcttcattcatgtaagaactttgtatgtacacagaacatgagcaaagacacgatcgagctgttctgtttccgtgtgaatcttgcacctgaaaaggagctagctatgtgtcaatcattcaggaggttggtta

SEQ ID NO: 111976 - DNA, 1823 bp, Zea Mays
gtataaagctctctccctccgcgcttccgatcagttcacgacgactccaggtccaggaggggcgcacttgactttcccctcctcctcctgcgagcaccttcctcgcctcgctctcatggcctcatcagagcctatagagtgccagttctggtacatgtttgcagagcgcgcaattggtcttcttcttcagcttgtctgattcctgttccagcggtccagccactgtttttattttcttcatcttcttcttctttctgtttgattcttcttcttctcagcgatccgtctgtgactgtgtgtcctgttttaattcaggttgtggcgctgagggtgtcgattcactgccaaggatgcaagaagaaggtgaagaaggtgctccagaacatcagcggcgtgtaccgatgcgaaatcgatgcccggagcaacaaggtcgtggcgacggtctcgacggagctcgacccctacatgctggtcgccaagctgcgcaagtccggcaagcaggcggagctgtggccggagcagccggtgcagcagcaggagcagccggcaccagtaccaccagctgagagccaaaggcaggaggagcccaagaacaaccagcctgcggagccgggccgacccagcgaacctgccgaggagcgcggcgccgccgccgacacggccgaggccgccgcggcggagccgagcaacccgctaccttcgccgccggagcccaagccgagcgccggcggaggagaggccccgaatccggcggcccaggacagcaaagaaaacgccagcgccgacgacgtcggcggcggcgacgatacggccgcggcaccggcaccggcgcagcaaggacccagcgaggcgaaggggaaagcgaaatcgaagcagcatacggcggagatggaggagaggcagcccgtggacgccagagtgactgtggagtacgaccaccgaggcgtcggtgggggctacgtgagccgcatgccgccgccggcagtcatgagctacaaccaggtgcgcccgagcgtgagcgcgtcctactacgcccccgccccggctccggcgccggcgccgatgccgatggggaggcccgggccgtcgcagggctacatcgacgagcactacacgccgtcttacagcagcagtagcaacaactactactcctccaaccggtcgccggcgtacgagccgtactactacagcgctccgcagccggcgccgtatagctaccagtaccagtaccagccggcttcttcgtccgaggattactactacagcgcgccgccgcagaggagcgccttctcgccgccgcgggagggctacggcgacatgttcaacgacgagaacgccaattcttgcaccgtcatgtgaagggaggatgcatgcaaacatggaagtagctagtttacttacagttccttattaatcaagcgactctctctatatatatatatatatatttgtgtgtgttagtatattttagaaccagtaattaagtacgagtaaggagatgtattaaaagcactgttcagtcttgatggcgctgaataagttgagagctctgagcttgaatgcttgatgcatgtaccaaccgtgatagatagaggagaatgtgaggatctgaatgaacagctctggtgttcatcacagcaaattttgtaatgtatgacatggtcaaaatggggacttccaatctcttcaacttcttcattcatgtaagaactttgtatgtacacagaacatgagcaaagacacgatcgagctgttctgtttccgtgtgaatcttgcacctgaaaaggagctagctatgtgtcaatcattcaggaggttggtta

SEQ ID NO: 111977 - DNA, 1653 bp, Zea Mays
gtataaagctctctccctccgcgcttccgatcagttcacgacgactccaggtccaggaggggcgcacttgactttcccctcctcctcctgcgagcaccttcctcgcctcgctctcatggcctcatcagagcctatagagtgccaggttgtggcgctgagggtgtcgattcactgccaaggatgcaagaagaaggtgaagaaggtgctccagaacatcagcggcgtgtaccgatgcgaaatcgatgcccggagcaacaaggtcgtggcgacggtctcgacggagctcgacccctacatgctggtcgccaagctgcgcaagtccggcaagcaggcggagctgtggccggagcagccggtgcagcagcaggagcagccggcaccagtaccaccagctgagagccaaaggcaggaggagcccaagaacaaccagcctgcggagccgggccgacccagcgaacctgccgaggagcgcggcgccgccgccgacacggccgaggccgccgcggcggagccgagcaacccgctaccttcgccgccggagcccaagccgagcgccggcggaggagaggccccgaatccggcggcccaggacagcaaagaaaacgccagcgccgacgacgtcggcggcggcgacgatacggccgcggcaccggcaccggcgcagcaaggacccagcgaggcgaaggggaaagcgaaatcgaagcagcatacggcggagatggaggagaggcagcccgtggacgccagagtgactgtggagtacgaccaccgaggcgtcggtgggggctacgtgagccgcatgccgccgccggcagtcatgagctacaaccaggtgcgcccgagcgtgagcgcgtcctactacgcccccgccccggctccggcgccggcgccgatgccgatggggaggcccgggccgtcgcagggctacatcgacgagcactacacgccgtcttacagcagcagtagcaacaactactactcctccaaccggtcgccggcgtacgagccgtactactacagcgctccgcagccggcgccgtatagctaccagtaccagtaccagccggcttcttcgtccgaggattactactacagcgcgccgccgcagaggagcgccttctcgccgccgcgggagggctacggcgacatgttcaacgacgagaacgccaattcttgcaccgtcatgtgaagggaggatgcatgcaaacatggaagtagctagtttacttacagttccttattaatcaagcgactctctctatatatatatatatatatttgtgtgtgttagtatattttagaaccagtaattaagtacgagtaaggagatgtattaaaagcactgttcagtcttgatggcgctgaataagttgagagctctgagcttgaatgcttgatgcatgtaccaaccgtgatagatagaggagaatgtgaggatctgaatgaacagctctggtgttcatcacagcaaattttgtaatgtatgacatggtcaaaatggggacttccaatctcttcaacttcttcattcatgtaagaactttgtatgtacacagaacatgagcaaagacacgatcgagctgttctgtttccgtgtgaatcttgcacctgaaaaggagctagctatgtgtcaatcattcaggaggttggtta

SEQ ID NO: 111978 - DNA, 1884 bp, Zea Mays
gtataaagctctctccctccgcgcttccgatcagttcacgacgactccaggtccaggaggggcgcacttgactttcccctcctcctcctgcgagcaccttcctcgcctcgctctcatggcctcatcagagcctatagagtgccaggtaccaatgttctctcctcttctctctttaatctctttccctggacccgatcgagttccagttctggtacatgtttgcagagcgcgcaattggtcttcttcttcagcttgtctgattcctgttccagcggtccagccactgtttttattttcttcatcttcttcttctttctgtttgattcttcttcttctcagcgatccgtctgtgactgtgtgtcctgttttaattcaggttgtggcgctgagggtgtcgattcactgccaaggatgcaagaagaaggtgaagaaggtgctccagaacatcagcggcgtgtaccgatgcgaaatcgatgcccggagcaacaaggtcgtggcgacggtctcgacggagctcgacccctacatgctggtcgccaagctgcgcaagtccggcaagcaggcggagctgtggccggagcagccggtgcagcagcaggagcagccggcaccagtaccaccagctgagagccaaaggcaggaggagcccaagaacaaccagcctgcggagccgggccgacccagcgaacctgccgaggagcgcggcgccgccgccgacacggccgaggccgccgcggcggagccgagcaacccgctaccttcgccgccggagcccaagccgagcgccggcggaggagaggccccgaatccggcggcccaggacagcaaagaaaacgccagcgccgacgacgtcggcggcggcgacgatacggccgcggcaccggcaccggcgcagcaaggacccagcgaggcgaaggggaaagcgaaatcgaagcagcatacggcggagatggaggagaggcagcccgtggacgccagagtgactgtggagtacgaccaccgaggcgtcggtgggggctacgtgagccgcatgccgccgccggcagtcatgagctacaaccaggtgcgcccgagcgtgagcgcgtcctactacgcccccgccccggctccggcgccggcgccgatgccgatggggaggcccgggccgtcgcagggctacatcgacgagcactacacgccgtcttacagcagcagtagcaacaactactactcctccaaccggtcgccggcgtacgagccgtactactacagcgctccgcagccggcgccgtatagctaccagtaccagtaccagccggcttcttcgtccgaggattactactacagcgcgccgccgcagaggagcgccttctcgccgccgcgggagggctacggcgacatgttcaacgacgagaacgccaattcttgcaccgtcatgtgaagggaggatgcatgcaaacatggaagtagctagtttacttacagttccttattaatcaagcgactctctctatatatatatatatatatttgtgtgtgttagtatattttagaaccagtaattaagtacgagtaaggagatgtattaaaagcactgttcagtcttgatggcgctgaataagttgagagctctgagcttgaatgcttgatgcatgtaccaaccgtgatagatagaggagaatgtgaggatctgaatgaacagctctggtgttcatcacagcaaattttgtaatgtatgacatggtcaaaatggggacttccaatctcttcaacttcttcattcatgtaagaactttgtatgtacacagaacatgagcaaagacacgatcgagctgttctgtttccgtgtgaatcttgcacctgaaaaggagctagctatgtgtcaatcattcaggaggttggtta

SEQ ID NO: 111979 - DNA, 270 bp, Zea Mays
atggcatccagtaaggacgcagtgatcgctgctatcttcatccaggtcttgctcctcatggcatcgtcctattgtgcggaggcaaagatatgcacgaagcctaatccattttacctgaccttatgccaaagcgacaaggcctgcggagactcgtgcattcactttggcatcggcaccagcgggttctgcaaaggcagacgaccacccaccagagtctgcacgtgtaacttcgaatgtccagggcaagagcgaagcaacacgtttacatga

SEQ ID NO: 111980 - DNA, 483 bp, Zea Mays
ctcacatgcaccaaataaccatggcggcatctaacaagattgcagcggcacatgtcgtcttcgtccttgccttgctccttgtggcctatcgtgcggaggcaactgtctgcatgaggcataacaatttctatcacggcccatgcatgagcaacaaggactgtgccaactcgtgcgttcaacataacctcggtgtcggcgggtattgcaggggcaagatcccattcaacaaagaatgcatgtgtacatttgaatgcccatgagtcaaaagccactatatctgacgggcgcaacttgttatatatctagggatgggatgtcgtttggcatgtcctccattttgaaagtgtccaagtgagactttatacatatatgcagttgagagatggaattaataataagagcaaacaattatgttgttgtgcatgttttaagaaatcttgtggaagtaatgatatgaacaaaaaaatgaatgacctaaggcac

SEQ ID NO: 111981 - DNA, 518 bp, Zea Mays
tatagaacatcgaaagtatcatgctggtggaagtataaatattgaacatctatatgttcttttcctcacccaaataattaaccatggcatccaacaagattgtaggggtgcctgttgtcttcatcctcgccttgctccttgtttccggttatgtggaggcggaaatctgcgcaaggcctaatcctcattatcctggcgcatgcaggagcaataaggactgtgcaggctcgtgcattcagcaaaacctcggcaccagcgggtactgcaagggcagtgtcccccttttcaaatcatgctattgtacctttgaatgtcccatggaggacgaggcagaggagggagggcactagtcgtgagccgccatctgcatgactaaattcaaagtatctgagtgtttatgcaattgacctgtggaataaggcgggcaaaataaacaatatatttgtacacatccatgctttaagaaatcgtgtgaaagcaattaagagatatgaacaaaactgttattatttgatgtg

SEQ ID NO: 111982 - DNA, 1298 bp, Zea Mays
gtcgccggccatcacagcacagcacagcacagcagtggtagatgcagagccggcaccacatctctctctctctcccttgcaggctaagcgaactagtctgtgccggggtttgtgtcctatatatacatcctagcaccggcagtccacaactccaaaagcataccatcattccatccacagccccgacctccatcccaatcccatccagcatcggcggcctgcagatatcctctagcttgacccggcaaatctcgcacaggcagctgtggtgcgctactacagtactatggaggtgcacgcggcggtggggaagcggctgtggagctacgtgcgcgcggccttcttcatggcgcgcaacggcgtgctctccaacaagcgcaagctcctcctcagcgtgccgcacctcctcgccaacaggcgccgcggcaccacgcgcgccgtcgccaacctcctctcctctcaccgcggcagcaccgccgccgccgcctatgcgctgcgccgccgcgactacgagttctcctcctgcagcaacagttcggcgggcccctcgtccttctcatccagcaggcgccgcctcccctacttcccctgcctcagcgcggcggccgaggaggacgagcgccagtacgacgggtacggctccctctccctccccgtcgagcccgcgccgcccctcgccaggatcgactaccacgcctccgccgcggcatcatcgcccgggctcatgctgcggggccggggcgacggcgacgacctcgcgcctgaggacgaggaggagtacgtgtacgccttcgcgtcgtcgtcctcgtcgcccgcgctgctgctcccgggcgcggccagcggcgagttctctgtgcgtgtgtccaactactcgtccgaggacgaagcagcgggctgcgactgtgacgccgtggacgccgacgcggaggacttcatccgccgcttctacgaccagctccgccgccagaacacccacgcgctgctcccctgctacatgcagcaggaatccgtcgcctcatcctcttgatcaggaatcaggatcaaccccacgcggacacggtcggcacgaacgcacggtgtgtcattgcattgcttggtgtgcatgccatgcatgggatccggtgtacagtgtgcacagtacgtgcctaggcttttgcatgtacatgcgtaacgtgatgtgaagaacaagtcccccgttgtttttgctgggaccactgcagataatgtattaagtttgagtaattcctaacaaaatacctaatttttcatcgatttgtgagtaaatccaaggaaaaaaa

SEQ ID NO: 111983 - DNA, 1518 bp, Zea Mays
aaaactacaatattttaaaattgcattcccaaacaggccctaaactctcagtatccacgttccggtttgggctgctgctgcgcagttgcatttttcgcgagcgttcctcggatgatcgtggtcacctactcacctttttgcaaccaccgtcatttttttttgaccccggttcttcttttctcctctgcttccagtcccagcactccagcatgatccgttaggcactcgctctgctggaccgcagggatgagtcgaggcagctacggatcgctcgagcaagtggatcctccgtccagggctgggatgccaaggtacgatgccaagctcgcaggacaataaaacaatattttatcaacggaaggagaatcacagtgtagataatgagagacatgactccgaggaggtcatctgtgttgttgatcccgtttgtgaaggtgctggagaaaacatagagcggagaagtccccatgtctccgtagaccacacctatgctctggaatgctaggtgcagtgtggtcgcccagccaaccttcattaccaaagtgcatactctgaatcagattacatttgcctcgaaaagaaagcaagaaagaaagcagacaatatgcttttaggcacacaacccttagatgatgaagcagctagctgatatgcttagtctcttcagtaaggcaaggacgaacacgacagtgcagcagttacttaagatttcagcagaaccatagaaacactttacgagatgaaaaaaagaacacatacaagaagaaaaaaaaactcaaccacatatggatactcccattagactttgttctaagaaggcaacaggggtttcatggaccctggagttcaagggtcgagaatctttcgtgcaacacgttacacacggctctaaggcaaaaggaggatcattatctgattggataagagtagtcggagaactaacatataccttggctgcatgcgtcgatccaccagcagggaacattccagcctccatgtgcagtgaatcatatctctgtagcctcttgggcggcattttctccgacgcatcatcagcatcaccgtgagcagctccgttgctgcttgtgtggtgaggttcagccatgctagactagaagtgcatgcatgttggcggaggccagacgctgttgctgtcgttcgcttcacttgccgaggtcttcgttcaacgccgcagccgtgaaacgcttgtgattttctttacacaagccgggaaggtggctacgtgcgtggtgggagggcgtggtgacttttcttcatccgcagtggctgtcactggtaagtgtagcgctgtactctagactttccaccatacgaatctgcgacttggcccttcagttccagttttcccccatactccttgacaatgatgaaccatattgagccatatgcccatgaatggatgtcctgatcccttttttttaaaaaaaaagtcagtaacgactactgtttttgaatcatatagacatatctgttaaaagtttaaaatagaaactataa

SEQ ID NO: 111984 - DNA, 1311 bp, Zea Mays
atggccgagtccgacctcaaggataagggactttgtgatggaaaagtggtgatgatgggtctggattgttataaggttcatttagatgatcctgacattggtgttgatattgtaaagatgaggtcatttacgagtttggtggacaccaactacatattagatgctatccatggttctgagttattggaagtgcaggttaacaatgcaggtgtaaacttcaacaaaggagcagataattctgttgagtttgctgagcaagttatcgagacaaattactatggcacgaagcggatgattgatgctatgataccgctaatgaaacgctctgcgtatggtgctcggatagtgaatgtaagctcaaggcttggtagagctaatggcagacggaatagaattggtgatgtgagcctaagagatcgactgttgaaagacgattgtttatcagagcagctgattgatgagatgatcacgaaatttctcgaacaagcgaagcaaggtacttggtccctgaatgagtggccacagatgtacacggactattcgatctcaaagctcgctgttaatgcttatacacgactcatggcaaggaggctctcggatcggcctgaaggccaaaagatatacattaactgtttctgccctggctgggtaaaaaccgccatgactggttgggaagggaatgtttctgctgaagaaggtgctgacacaggtatatggctcgccttattgcctcaggaaacggacacaaacggcaagttcttcgccgagagatgtgagataagcttctaaggctatccatgattttggtgcttggtagcgatcatatgacaagccgatggtcaagatcattaaagggggcaccgctatgtcacattgatggaaagcccatgacctcgaattctgttgattaaggtgatctacgaaatgtttgttggccatgaatgaagtatcataaaagcggaatgcttatcaggaccgccagaaaaatgggcaacttggaagcacggccagctggctgtttcctacgtgtgctacaaggctgcagcaatgacctgtattgctgtagtcagtatattacatgtttggttggttttagcacaacaaggtgaatgtgcaagcgcagcattgatgtaccatcaggtcatgcaaatctcagactggagtggttttcatgtacagaaagcaaacacgtgcttatttattatttgcgatttggagatggagacagattaagcatgtcgatgtaacttccctccctctgactattttattccctgttctgtgaatggaagtggggcaaaggcttgagac

SEQ ID NO: 111985 - DNA, 1349 bp, Zea Mays
atggccgagtccgacctcaaggataagggactttgtgatggaaaagtggtgatgatgggtctggattgttataaggttcatttagatgatcctgacattggtgttgatattgtaaagatgaggtcatttacgagtttggtggacaccaactacatattagatgctatccatggttctgagttattggaagtgcaggttaacaatgcaggtgtaaacttcaacaaaggagcagataattctgttgagtttgctgagcaagttatcgagacaaattactatggcacgaagcggatgattgatgctatgataccgctaatgaaacgctctgcgtatggtgctcggatagtgaatgtaagctcaaggcttggtagagctaatggcagacggaatagaattggtgatgtgagcctaagagatcgactgttgaaagacgattgtttatcagagcagctgattgatgagatgatcacgaaatttctcgaacaagcgaagcaaggtacttggtccctgaatgagtggccacagatgtacacggactattcgatctcaaagctcgctgttaatgcttatacacgactcatggcaaggaggctctcggatcggcctgaaggccaaaagatatacattaactgtttctgccctggctgggtaaaaaccgccatgactggttgggaagggaatgtttctgctgaagaaggtgctgacacaggtatatggctcgccttattgcctcaggaaacggacacaaacggcaagttcttcgccgagagatgtgagataagcttctaaggttaccgatactttccggtgcctgtgtgatctatttaggctatccatgattttggtgcttggtagcgatcatatgacaagccgatggtcaagatcattaaagggggcaccgctatgtcacattgatggaaagcccatgacctcgaattctgttgattaaggtgatctacgaaatgtttgttggccatgaatgaagtatcataaaagcggaatgcttatcaggaccgccagaaaaatgggcaacttggaagcacggccagctggctgtttcctacgtgtgctacaaggctgcagcaatgacctgtattgctgtagtcagtatattacatgtttggttggttttagcacaacaaggtgaatgtgcaagcgcagcattgatgtaccatcaggtcatgcaaatctcagactggagtggttttcatgtacagaaagcaaacacgtgcttatttattatttgcgatttggagatggagacagattaagcatgtcgatgtaacttccctccctctgactattttattccctgttctgtgaatggaagtggggcaaaggcttgagac

SEQ ID NO: 111986 - DNA, 1630 bp, Zea Mays
atggccgagtccgacctcaaggataagggactttgtgatggaaaagtggtgatgatgggtctggattgttataaggttcatttagatgatcctgacattggtgttgatattgtaaagatgaggtcatttacgagtttggtggacaccaactacatattagatgctatccatggttctgagttattggaagtgcaggttaacaatgcaggtgtaaacttcaacaaaggagcagataattctgttgagtttgctgagcaagttatcgagacaaattactatggcacgaagcggatgattgatgctatgataccgctaatgaaacgctctgcgtatggtgctcggatagtgaatgtaagctcaaggcttggtagagctaatggcagacggaatagaattggtgatgtgagcctaagagatcgactgttgaaagacgattgtttatcagagcagctgattgatgagatgatcacgaaatttctcgaacaagcgaagcaaggtacttggtccctgaatgagtggccacagatgtacacggactattcgatctcaaagctcgctgttaatgcttatacacgactcatggcaaggaggctctcggatcggcctgaaggccaaaagatatacattaactgtttctgccctggctgggtaaaaaccgccatgactggttgggaagggaatgtttctgctgaagaaggtgctgacacaggtatatggctcgccttattgcctcaggaaacggacacaaacggcaagttcttcgccgagagatgtgagataagcttctaaggtgactgactaccttatccatactcttgccttaccttcaagtaggaaatatcaggactcaagatcgtaaacccatcttcacaaactgttctgattgctactcaccaccatccatcgagattcacaagccataaagttttttttctcaaacacacaagccataatagtatgcgtattgctatggatagaagaaggtaccaagtgtactgtggggagtgctcattgttctgttactcaattctgaaaatggtttatttactcgcaactgactgctatttaggttaccgatactttccggtgcctgtgtgatctatttaggctatccatgattttggtgcttggtagcgatcatatgacaagccgatggtcaagatcattaaagggggcaccgctatgtcacattgatggaaagcccatgacctcgaattctgttgattaaggtgatctacgaaatgtttgttggccatgaatgaagtatcataaaagcggaatgcttatcaggaccgccagaaaaatgggcaacttggaagcacggccagctggctgtttcctacgtgtgctacaaggctgcagcaatgacctgtattgctgtagtcagtatattacatgtttggttggttttagcacaacaaggtgaatgtgcaagcgcagcattgatgtaccatcaggtcatgcaaatctcagactggagtggttttcatgtacagaaagcaaacacgtgcttatttattatttgcgatttggagatggagacagattaagcatgtcgatgtaacttccctccctctgactattttattccctgttctgtgaatggaagtggggcaaaggcttgagacaa

SEQ ID NO: 111987 - DNA, 217 bp, Zea Mays
ccatcttccgctccctcccttacttgcgcttggcacgcaggcgacggcgacggcgcccagtctcgtactctcagcggcagcgtcagtggcttcccctcccgcctctcgccagtcgcctcgcgccctcgcctccggtcctgcgcacgccggcctgttaccctgcgtgcgtgcctctctctctcctcccgcctccggtggatcgtcaacggcgctcggc

SEQ ID NO: 111988 - DNA, 114 bp, Zea Mays
acaatcggtaaccatatcaatatgaaaatatgtcaatataacacgttcacaatacaacaaagtttacaaatatcacaaagaccacaagttcacaattcacaatgtaaaaagttg

SEQ ID NO: 111989 - DNA, 1845 bp, Zea Mays
gagccgccagccaccattcctggctgggctgcttcttccttctacatcttttctgctttctttctttcacccgcaaccgcaaccgcaacggccgcgcgccaaaccagagtttttttttcagcatcttccgctccgctttccgctgatgtttacagctcaaccctaccagtatatataccgacatgtttgtgttgatttgctgctggtttcccaattccaatccgccccccgctggaggaagaagacggggcggagtcaagaattggtacaaacggaacgtgttgcctgcagaatggattcggcatttgaccccgctgtcgtgctcgcacgtacatgatgcctctaaaccagagccatctgctgcagatatctgcagatttcatcaccacagctacaaagattactgcgctactctgaaggaggatatccaatactagatgtcaggacttcttgcagaagctcttggagctgctgcaggaggatgtgcactactacttattgtcataattataatagtactttgcctacagcatcgcaaaagaacctcagactcttcagaaagtggtttttcagatcaagctctaccagagtcgcaggaagcaagatgtcttagtttagaggaattgaattttgctacaaggaatttcagcaatggcaaccttattggacaagggacgttcggagaggtatataagggtttgctccaggatggcacaatagtagctgttaaaagacggcattctcctcctagccaggaattcattcaagaggttaattatctagcatctctctgtcattggaaccttgtaaaacttttggggtactgtcaggaggatggcatgcagatgcttgtttatgagtatatctccaatggcagcgtatcaacacatttacatggtaacagccatgctctaggttcaaggctagaattcaagaagagactttctattgctcatggcacagctaaaggcctgagtcacctgcattcgctgacaccccctgcggtccatatgaatttcaaaacttctaatgtacttgtggacgaggacttcgcaccaaaagttgcagatactgggattccaggcatgcttgatcgacttggtgttacaggactgtcttccagaacatttaatgatcctttcgtggaacctcgaatgaaggaagctatgaacttgaacttttccatacaaagcgatgtgtacagctttggcgtattccttctggagctaattagcggacggaaagctgtctctgatcaatgcatcattcagtgggcacagagcttccaggaatcaagtgacatctccgtgatcgcagacagcagaatggccggtggctttacctcacaaagcatgaaggaattgctgagcctgacagcacggtgcgtaaatccgacgagcgagcagcgcccgtcgatgagctcggtggaggctgagatacaacggatccgcgagcaggagatcagcctcacagcagtcatggcggaaggtaccccaaccgtgactctaggcagtcagctcttcagaacatccaggtgaaacaaacatcagtgggatgtgtagtctagaagaaaagctagttctctcctcctcagggcagtagaccagccttgttctctttcggaattcgggaaaaaaaagaagagcccgtcttcatagcgagccagctgcatcccaagtgtaaaaaaaaaagagaggaaacagctgcgaggcttaccctttttttctccccagttttgttaccctgatggttccttcctaattctcccttttctgcacatgtttttaggggaattaatgacattttccttttgttgaataataataagaatgggtgggtggtggc

SEQ ID NO: 111990 - DNA, 1480 bp, Zea Mays
aaaaatacctcccaggccatctcacctcgctcacagaatcactcacggtcacttcctccacaatacagcaggagagtagcagggggttgaataggaggaagaagacggggcggagtcaagaattggtacaaacggaacgtgttgcctgcagaatggattcggcatttgaccccgctgtcgtgctcgcacgtacatgatgcctctaaaccagagccatctgctgcagatatctgcagatttcatcaccacagctacaaagattactgcgctactctgaaggaggatatccaatactagatgtcaggacttcttgcagaagctcttggagctgctgcaggaggatgtgcactactacttattgtcataattataatagtactttgcctacagcatcgcaaaagaacctcagactcttcagaaagtggtttttcagatcaagctctaccagagtcgcaggaagcaagatgtcttagtttagaggaattgaattttgctacaaggaatttcagcaatggcaaccttattggacaagggacgttcggagaggtatataagggtttgctccaggatggcacaatagtagctgttaaaagacggcattctcctcctagccaggaattcattcaagaggttaattatctagcatctctctgtcattggaaccttgtaaaacttttggggtactgtcaggaggatggcatgcagatgcttgtttatgagtatatctccaatggcagcgtatcaacacatttacatggtaacagccatgctctaggttcaaggctagaattcaagaagagactttctattgctcatggcacagctaaaggcctgagtcacctgcattcgctgacaccccctgcggtccatatgaatttcaaaacttctaatgtacttgtggacgaggacttcgcaccaaaagttgcagatactgggattccaggcatgcttgatcgacttggtgttacaggactgtcttccagaacatttaatgatcctttcgtggaacctcgaatgaaggaagctatgaacttgaacttttccatacaaagcgatgtgtacagctttggcgtattccttctggagctaattagcggacggaaagctgtctctgatcaatgcatcattcagtgggcacagagcttccaggaatcaagtgacatctccgtgatcgcagacagcagaatggccggtggctttacctcacaaagcatgaaggaattgctgagcctgacagcacggtgcgtaaatccgacgagcgagcagcgcccgtcgatgagctcggtggaggctgagatacaacggatccgcgagcaggagatcagcctcacagcagtcatggcggaaggtaccccaaccgtgactctaggcagtcagctcttcagaacatccaggtgaaacaaacatcagtgggatgtgtagtctagaagaaaagctagttctctcctcctcagggcagtagaccagccttgttctcttt

SEQ ID NO: 111991 - DNA, 107 bp, Zea Mays
cgtgaggggtttccttctccctccaacccgcatcgttcaccaatcccagggagatcgattctacaacacgatcatggcatgcacagccttaaagtaacactataatt

SEQ ID NO: 111992 - DNA, 229 bp, Zea Mays
cggcatatatatataggtttctgaaagagatactgcaccaccagccactaattaaactgaatctaactgaacatcccatgtatccccgccaaacagtctcactggtgaaggtgcactccacaacaacaggccccaagagggcaatcgctccacaacaaaatgtctagcttccaggtgctcagctcgcacaaaactaccacttaacatgattgttccagatgcatctaat

SEQ ID NO: 111993 - DNA, 479 bp, Zea Mays
actggacacaaatgcatgataagctacaccatctccatggccttgcctaccactactccttgcagtttaccggtgcgctggtggtgggctgctgctccctccttgttgccgctgccgccgccgtgttgggtcttgctgctggccgtcttcatgaagcagaagcaggagcagcagggacactggaacaagagcttcatcatgcccagagctcaggatcgagatcgtcttcgttcctctcggccgtctcagccagctagcgctatggtctggactggcctctgtatgtatttctgtaccctctcaactctaaatatcaacctggctggctagctacgttttccttcctaatcaacgcaagagctagctggcctcggcaacctatcgatgatcacctactaagcatacatatatatggaacgcaaggtctgaaatgggtgtgatgaactgagtgctcgctctcagcagcatcgacgagccac

SEQ ID NO: 111994 - DNA, 2181 bp, Zea Mays
ccttcccactctccctcgccccggcatcgccatctccgcgccgcagccgcccgcccgccggcccagatcccaccggcgagccgcagcatggaccgtctccgggcgggaagccccgtctacgggcggcagcggagcggcagcagcacgggctcctcctcccccggcggcgtctccccctcgcaccaccgctcctcctccacctcctccgctgcctccgccgcgggcgcgcccggcacctccaacatccgccgcacgcagaacgtcgccgcgcgcgccgcggccgcgaggctcgcgcaggtcatggcctcgcagaacgccgccgcggccgccggcgacgatgacgacgacgatgactacccgcccccggctcctgggaggttcggaagtggaagagtggcgcacggcagcaacggcgtgtccctgcttggacgctccgcgagatctccctctcctgcgttaggtcggaatattgtagagccacctcctacggcccgctcatcatcggcaggcaggccagctgttgcatcacgacccaccaccacagtggtgccgccaatcaaaaccaacacgacgctgcgaacaccgtcccctattccaccggtggctgtggagcctccagcggatcgcactcgaccgaaaagatttgatgcagcgcttcatagctcaagagaatcaggactgaaaagagaggcatctacacttcacgatgagcttgatatgctacaagaggagaatgaaagtgttctagaaaagttgcgacttgctgaagaaagatgtgaggaagctgaagctagagccaaggagcttgagaaacaggtagctgctcttggagaaggagtatcattagaggctcgcctcttgagcaggaaggaagcagcacttaaacagagggaggctgcgctaaaagctgcaagagaatcaaaggatggcagagatggggaagtaacaacactaaggcaagaacttgagtctgccaaagaagaggttgcatcagcaatggaccagctaaaggaggcagagtctgaaacgaaggctctccgatctatgactcagagaacggtcttaactcaagaagaaatggaggaggttgtcctaaaaagatgctggcttgcacgctattggggcttagcagttcaatatggtgtgtatcccgaaattgcggtatcaaagcatgaacattggtcatcattggctcctcttcctcttgaggttgttctttccgccggtcaaaaagctaaggaggaacctcgaaaacaaggtgacaatgttcaagggagaaataaacttgcacgagaaatgagtgatgtaatgggagaaggcaatatagagagcatgctttcagttgaaatgggccttagagagctttcttcattgaaggtggaagatgctgttgtagttgcagttggccaacatcgcagacctagcatagttcgtcagttcacatcagatttcaaatcacctggtgaacctaaatacttggaggcatttgatcttagcccagaagaggctgaagatgttagctttaagcaggcatggcttatatacttctggagaagagccaaaactcatggtgttgaggaagatattgctgatgaccggcttcagctttggattggtcgcaacgcacaagctccaaattctcatgacgctatcgatgtggagagaggtctaacagagctgaggaaattgggcatagagcagcaactgtgggagggctcgcgagcagatatagatcaagcttctttggcgatggagaatcagtaagaattttccacggctgtctatgcttcgtgtatcatcccagttttggagaaacgggaactccatttcccagcaggtctcggccctttgcatcatcaggtatcacagtcacaggattgtgctccgatcttggggtgtgaccgatggacttccgatgagtttgtgtagtgcatgtgcaagccattcatctgttgttattaaaatagctttgtgaaatgtgtaatagctctgctttggcaagagaaacgatggcaacgacgaccccacttccagcaattgtgaattttgtgattatcccaccttgtttgttctctgctgtcgagcccaacctctccgcaccagggaacgtgtgtgttcctgcaacggatgaacgaaatggtttttgtgtatctctgggtagtatgagttctgtgcaaatgg

SEQ ID NO: 111995 - DNA, 1647 bp, Zea Mays
attccagttaaactgtgaccactttagcaatcatgcaaatcattctatagattagatttgatgcagcgcttcatagctcaagagaatcaggactgaaaagagaggcatctacacttcacgatgagcttgatatgctacaagaggagaatgaaagtgttctagaaaagttgcgacttgctgaagaaagatgtgaggaagctgaagctagagccaaggagcttgagaaacaggtagctgctcttggagaaggagtatcattagaggctcgcctcttgagcaggaaggaagcagcacttaaacagagggaggctgcgctaaaagctgcaagagaatcaaaggatggcagagatggggaagtaacaacactaaggcaagaacttgagtctgccaaagaagaggttgcatcagcaatggaccagctaaaggaggcagagtctgaaacgaaggctctccgatctatgactcagagaacggtcttaactcaagaagaaatggaggaggttgtcctaaaaagatgctggcttgcacgctattggggcttagcagttcaatatggtgtgtatcccgaaattgcggtatcaaagcatgaacattggtcatcattggctcctcttcctcttgaggttgttctttccgccggtcaaaaagctaaggaggaacctcgaaaacaaggtgacaatgttcaagggagaaataaacttgcacgagaaatgagtgatgtaatgggagaaggcaatatagagagcatgctttcagttgaaatgggccttagagagctttcttcattgaaggtggaagatgctgttgtagttgcagttggccaacatcgcagacctagcatagttcgtcagttcacatcagatttcaaatcacctggtgaacctaaatacttggaggcatttgatcttagcccagaagaggctgaagatgttagctttaagcaggcatggcttatatacttctggagaagagccaaaactcatggtgttgaggaagatattgctgatgaccggcttcagctttggattggtcgcaacgcacaagctccaaattctcatgacgctatcgatgtggagagaggtctaacagagctgaggaaattgggcatagagcagcaactgtgggagggctcgcgagcagatatagatcaagcttctttggcgatggagaatcagtaagaattttccacggctgtctatgcttcgtgtatcatcccagttttggagaaacgggaactccatttcccagcaggtctcggccctttgcatcatcaggtatcacagtcacaggattgtgctccgatcttggggtgtgaccgatggacttccgatgagtttgtgtagtgcatgtgcaagccattcatctgttgttattaaaatagctttgtgaaatgtgtaatagctctgctttggcaagagaaacgatggcaacgacgaccccacttccagcaattgtgaattttgtgattatcccaccttgtttgttctctgctgtcgagcccaacctctccgcaccagggaacgtgtgtgttcctgcaacggatgaacgaaatggtttttgtgtatctctgggtagtatgagttctgtgcaaatggttctggagttttctataagatcttaaaaaccatcacccttcgatccagcatc

SEQ ID NO: 111996 - DNA, 1751 bp, Zea Mays
gtgtcttctactacacctcctctctcctccgcggcaccgcctataagaggcgcaaccagggccacggcactctgggttgagagaagggagagagagagagttgccagtgaaccaggataagtgaggaggagatcggcaaggagcggacggccgtggcggtagccatggacgactcggcggaggtgaagctggtggacgagatcacgggagagggaggggcggcgggggactggggctacctgggctccgacgggatgggctccggctcctacccggcgttccccttctccagagacgtcctatccacgccgacctccgcgtcgttgctcctctccatggaccccgcggcgctcttcgacttcaacggcaccttccctccctcctccgcggccgcggccaccgccggctcctcgctgtccgccttccacgacttcagctgcatcaaccccttcgacgacgccggccacttcctcggcgctcccccgccggtgccggcggcggcggcgcctcagcagcaggggcagaaaggtgggttctttgcgccgctgccggcctcggacttcaacgacgccgggatgagctgggacgacgaggacgagatcgaccaaagcgtcgacgcctcctcgatggccatctcggcctccatggagaatgctgcgggcgcggtggcgggggcaagtggcgccggcggtggcagcgggagaggcaagaagaaagggatgccggccaagaacctcatggcggagcgccggcgtcgcaagaagctcaatgaccgcctctacatgctgcgctcggtggtgccgaagatcagcaagatggatagggcttctatccttggcgacgcaattgagtatctgaaggagctcctgcagaggatcagcgatcttcacaatgaacttgagtcagctccgagctcttcgcttgttggaccaacatcagctagcttcaacccatcaacaccgacattgcagacatttcctggccaggtcaaggaagaactttgcccgggctcattcccaagccctactggacaacaagccacagtcgaagtcaggatgagggaagggcatgcagtcaatatccacatgttctgtgcgcgtaggccaggcatcctgctgtcgacaatgacggccctcgacagcctaggcctcgacatcgagcaggcggtcatcagctgcttcaatggctttgcgatggacgtgttccgagctgagtgcgcggatggtcctggaatggtgcctgaagaaattaaggccgtgctgatgcacaccgccggcctccacaacgcaatgtagccggtccgaaaacgggccaccgccaggatgacgacgatcctcctcctttctactaagggcttcggttcggaagcggcataagattaagctgtggtggccattggttttctggggcaagtgatgaattttaagatgatgaggctcgccatctcgggcatgaggcatgagtgatgatgtaactatgggattcttttttttcttctcattagcctaatgtcggattttctcctctctgatacacttgtggtgtaatagaatctatgctgcgtgttgaacaatatatggtggtgaatggtgatgcggtagctagcatcaaactcagtgcctgttggtcagagatcgatggtgcaaagagagacgagttcattcatcagcgtccagcaatgattttgactggctatgggtccgtccgtccttgattcgaatcaaatgaattgaatcctctggcttcttgtt

SEQ ID NO: 111997 - DNA, 1641 bp, Zea Mays
agggagagagagagagttgccagtgaaccaggataagtgaggaggagatcggcaaggagcggacggccgtggcggtagccatggacgactcggcggaggtgaagctggtggacgagatcacgggagagggaggggcggcgggggactggggctacctgggctccgacgggatgggctccggctcctacccggcgttccccttctccagagacgtcctatccacgccgacctccgcgtcgttgctcctctccatggaccccgcggcgctcttcgacttcaacggcaccttccctccctcctccgcggccgcggccaccgccggctcctcgctgtccgccttccacgacttcagctgcatcaaccccttcgacgacgccggccacttcctcggcgctcccccgccggtgccggcggcggcggcgcctcagcagcaggggcagaaaggtgggttctttgcgccgctgccggcctcggacttcaacgacgccgggatgagctgggacgacgaggacgagatcgaccaaagcgtcgacgcctcctcgatggccatctcggcctccatggagaatgctgcgggcgcggtggcgggggcaagtggcgccggcggtggcagcgggagaggcaagaagaaagggatgccggccaagaacctcatggcggagcgccggcgtcgcaagaagctcaatgaccgcctctacatgctgcgctcggtggtgccgaagatcagcaagatggatagggcttctatccttggcgacgcaattgagtatctgaaggagctcctgcagaggatcagcgatcttcacaatgaacttgagtcagctccgagctcttcgcttgttggaccaacatcagctagcttcaacccatcaacaccgacattgcagacatttcctggccaggtcaaggaagaactttgcccgggctcattcccaagccctactggacaacaagccacagtcgaagtcaggatgagggaagggcatgcagtcaatatccacatgttctgtgcgcgtaggccaggcatcctgctgtcgacaatgacggccctcgacagcctaggcctcgacatcgagcaggcggtcatcagctgcttcaatggctttgcgatggacgtgttccgagctgagcagtgcgcggatggtcctggaatggtgcctgaagaaattaaggccgtgctgatgcacaccgccggcctccacaacgcaatgtagccggtccgaaaacgggccaccgccaggatgacgacgatcctcctcctttctactaagggcttcggttcggaagcggcataagattaagctgtggtggccattggttttctggggcaagtgatgaattttaagatgatgaggctcgccatctcgggcatgaggcatgagtgatgatgtaactatgggattcttttttttcttctcattagcctaatgtcggattttctcctctctgatacacttgtggtgtaatagaatctatgctgcgtgttgaacaatatatggtggtgaatggtgatgcggtagctagcatcaaactcagtgcctgttggtcagagatcgatggtgcaaagagagacgagttcattcatcagcgtccagcaatgattttgactggctatgggtccgtccgtccttgattcgaatc

SEQ ID NO: 111998 - DNA, 658 bp, Zea Mays
tcgatggccctattgcgtaaaacaataaacccgccttccccaccactggtcatcagtctccactccacgcccgacagagcaggaggactcagaaatggcaatcccagtgcgatcggctgccgcgccccgccgcctcgttccgtcgatacctccggcgagctctggacatgttcgaggactggcgtgcttcggtacccgaaccgggcctcgcggtgcaagagggttgtcaatggtggtcgccgactccaccagccgtcgggccaagcaagcggacggcggggacggcgtccttggggcgcctgttctcggagggctcgggatggagggattgggggatcagctcagcgtggtgatgaagttcggggggtcctcggtgtcgtcggccgcgaggatggctgaggtggccggcctcatcctgacgttccccgaggagcgccccgtcgtcgttctctctgccatggggaaaaccaccaacaaccttctccttgtactgatcgcttcgcagtgctctttgttgattttcttgtagacttttatttagctctgtgggatctttctctgctttggcaaaagtttgctgttgcctttgcctgcataactcacgggttgaaatgttgaatgcatcaagaaaaaacctcagttacctaaagtaaacttt

SEQ ID NO: 111999 - DNA, 1647 bp, Zea Mays
tcgatggccctattgcgtaaaacaataaacccgccttccccaccactggtcatcagtctccactccacgcccgacagagcaggaggactcagaaatggcaatcccagtgcgatcggctgccgcgccccgccgcctcgttccgtcgatacctccggcgagctctggacatgttcgaggactggcgtgcttcggtacccgaaccgggcctcgcggtgcaagagggttgtcaatggtggtcgccgactccaccagccgtcgggccaagcaagcggacggcggggacggcgtccttggggcgcctgttctcggagggctcgggatggagggattgggggatcagctcagcgtggtgatgaagttcggggggtcctcggtgtcgtcggccgcgaggatggctgaggtggccggcctcatcctgacgttccccgaggagcgccccgtcgtcgttctctctgccatggggaaaaccaccaacaaccttctccttgctggagagaaggcagtagggtgtggagttatccatgtttctgaaatcgaagagtggaatatggtcaaaagcctacatatcaagacggtggatgaacttggacttccaagatctgtaatacaagacatgctagatgaactggagcaactattgaaaggtatcgctatgatgaaagagctgacgcctaggaccagtgactaccttgtttcatttggagaatgcatgtccaccaggattttttctgcttatttgaacaaaattcgtgtcaaggcacggcaggggccatgtaaccagcctagctgcaaatccccatatgacgcatttgatattggtttcattacaactgatgaatttggtaatgcggatatcttagaagcaacctatcctgctgttgcgaagagacttcatggggactggatacaggatccagcgatacctgttgttactgggttccttgggaagggctggaaatctggtgctgtaactactttaggccgaggtggtagtgacttgactgctacaaccattggtatggaaagatgttgatggtgtacttacttgtgatccaaatatctacccacatgcaaagactgttccatacttaacatttgaagaggccacagaacttgcttattttggtgctcaggttttgcatccacaatcgatgagacctgctagagaaggtgatattccagttagggttaagaattcatacaaccctaaagctccaggcacccttattaccagacaaagagacatggataaggttgtactaactagcatagtgctcaagtcaaatgtcactatgttggacattgtgagcactcggatgcttggtcagtatggtttttctggcaagggtatttgctatatttgaagatctatgtatatctgtggattgtgttgctaccagtgaagttagtgtttctgtgtcacttgatccatcaaagatctggagtagggaactgatacagcaggaacttgaccatgtagttgaagagcttgagaaaatagcaattgttcgtctacttcagcagagggcgataatttcacttatcggaaatgtggagcaatcgtctctcatactagaaaaggtataacgctatctacattaaatatttcttctttgggttttcctctctaatgttattttcattgga

SEQ ID NO: 112000 - DNA, 2079 bp, Zea Mays
tcgatggccctattgcgtaaaacaataaacccgccttccccaccactggtcatcagtctccactccacgcccgacagagcaggaggactcagaaatggcaatcccagtgcgatcggctgccgcgccccgccgcctcgttccgtcgatacctccggcgagctctggacatgttcgaggactggcgtgcttcggtacccgaaccgggcctcgcggtgcaagagggttgtcaatggtggtcgccgactccaccagccgtcgggccaagcaagcggacggcggggacggcgtccttggggcgcctgttctcggagggctcgggatggagggattgggggatcagctcagcgtggtgatgaagttcggggggtcctcggtgtcgtcggccgcgaggatggctgaggtggccggcctcatcctgacgttccccgaggagcgccccgtcgtcgttctctctgccatggggaaaaccaccaacaaccttctccttgctggagagaaggcagtagggtgtggagttatccatgtttctgaaatcgaagagtggaatatggtcaaaagcctacatatcaagacggtggatgaacttggacttccaagatctgtaatacaagacatgctagatgaactggagcaactattgaaaggtatcgctatgatgaaagagctgacgcctaggaccagtgactaccttgtttcatttggagaatgcatgtccaccaggattttttctgcttatttgaacaaaattcgtgtcaaggcacggcagtatgacgcatttgatattggtttcattacaactgatgaatttggtaatgcggatatcttagaagcaacctatcctgctgttgcgaagagacttcatggggactggatacaggatccagcgatacctgttgttactgggttccttgggaagggctggaaatctggtgctgtaactactttaggccgaggtggtagtgacttgactgctacaaccattggtaaagccttgggactgagagaaattcaggtatggaaagatgttgatggtgtacttacttgtgatccaaatatctacccacatgcaaagactgttccatacttaacatttgaagaggccacagaacttgcttattttggtgctcaggttttgcatccacaatcgatgagacctgctagagaaggtgatattccagttagggttaagaattcatacaaccctaaagctccaggcacccttattaccagacaaagagacatggataaggttgtactaactagcatagtgctcaagtcaaatgtcactatgttggacattgtgagcactcggatgcttggtcagtatggtttttctggcaagggtatgttgaacactgagccatttttgtatttatattacactgttctgatcactgcatgtatgaccttgagcaggtatttgctatatttgaagatctatgtatatctgtggattgtgttgctaccagtgaagttagtgtttctgtgtcacttgatccatcaaagatctggagtagggaactgatacagcaggaacttgaccatgtagttgaagagcttgagaaaatagcaattgttcgtctacttcagcagagggcgataatttcacttatcggaaatgtggagcaatcgtctctcatactagaaaagacgggacgtgtgctgaggaaaagtggggttaatgttcagatgatctcgcaaggagcgtcaaaggttaacatgtcgctgatagtccatgatagcgatgcaaaggcactcgtagaagcccttcatcaggcgttctttgaagacgatgtcctatcacaagtcgaagcggagaacctactcgtgggctgatcaacgtaggctttgctgggtccaggcgtgttatctgttatagattcccactcgcctccatgaacggcatgggcattggatcattgatcatgttttgcttgaaacaagtatgtcttccaggttctcagccaatgactgcaaaactgtgtttctgttttagaactgtttgcagacaccacagtctgagctgcgagcaccgattgtcaacaagatggcaagcctgtgatataattccaactgtct

SEQ ID NO: 112001 - DNA, 645 bp, Zea Mays
atcccatgcctgaacattttagttctctgtgcttcacaattgttaacaatctttcaggaacttgaccatgtagttgaagagcttgagaaaatagcaattgttcgtctacttcagcagagggcgataatttcacttatcggaaatgtggagcaatcgtctctcatactagaaaagacgggacgtgtgctgaggaaaagtggggttaatgttcagatgatctcgcaaggagcgtcaaaggttaacatgtcgctgatagtccatgatagcgatgcaaaggcactcgtagaagcccttcatcaggcgttctttgaagacgatgtcctatcacaagtcgaagcggagaacctactcgtgggctgatcaacgtaggctttgctgggtccaggcgtgttatctgttatagattcccactcgcctccatgaacggcatgggcattggatcattgatcatgttttgcttgaaacaagtatgtcttccaggttctcagccaatgactgcaaaactgtgtttctgttttagaactgtttgcagacaccacagtctgagctgcgagcaccgattgtcaacaagatggcaagcctgtgatataattccaactgtctctaatcaatatatataataaacattatcaatatctattaatt

SEQ ID NO: 112002 - DNA, 1847 bp, Zea Mays
cccaactccaactcccgcttcacgcccacaccaatggacccgcagccgccaccgatttgccgggaggcgtgggagggctgcagcgtcctcctcgacatcaatgacggcgaccgcctagccttcttccgcctcacccccggcgcgacggtgaagattgggaacaagacttgttcactgaagccgctcgtgggacgcccctttggctccctattccgcctcggcgccggcggactcgttccctgcgccgccgcggacgccacatctcgtgatcataacacgccagatgatgccaatggacaaacgcaggatgaaaccagagacaataggtctctggttgataataatacagctcaaaatttatctagcgatgacatagaggcaatgaagagggatggtgcaactggtgacgagattgtagaagctttaatagcaaacagctcaacatttggaaataaaactgtcttctcacaggagaagtacaagttaaagaaacaaaagaaatatgcgcctaaagttcttttgcgacgcccttctgctcgaagcatttgtgagacatacttcaagaaaactccagctcgtatagggtttatgcgagttgacacactatctctcttgttgtctatggcaaacattggtgcgtattcagatgtgcttgtggttgatatggttggaggtttagttgttggagctgtagccgaacgtttaggaggtacagggtatgtttgcagcacatatcttggttcagcacccagctccatcgacattataagaatgtacaatttgagcagtgatatggtcagcaggattgttcaggcgccaattagtgccctatgttcaatgcaaagttctgggaataccccttctgttgtcaatagtagcgctgaaggggagatgatagaacctgctgtagatgaggatgcacaatcatctttggcacagcaagtggacacagcagtgccagatgagaaggcacagttatcaacagatcagccaagtgatatggaggtctcggagccttctttggatgagcatcttgttcaagatgagaattcttcattaggtggcaaagacagcgacggtaccttaaatgcttcaaaacctcctaaacctggaaaagcaccgtcaccagaaaagatgaaatattggaaggaacatggctttagtagtttgattgttgctgcccctggccacgaagtagagcgtcttgttgctgatatgcttccacttttgtcttattcagccccatttgctatatatcaccagcatctcgagcctcttgcaaagtgcatgcacagcttgcagttatcaaagatggctattggattgcagctttctgaaccctggctgcgtgaataccaggtccttccatctcgcacccatccacacatgcaaatgaatgcttttggtggttatatcttgaacggcataaggatacacaatccagatcgtgtggtagcaaacaagtgagtcgtcaataaaggcatgctccagcctttcaagcaaaaaaagaaaaggatggcacgccatttttttttaccttaaaaggtggtcaaagttttgtggtgaacttgcgtgtaaaccagtgtgtgttttatcagacagacatacgtcgccatgtttacagagaatagcatacgtcgccatgtttacagagaatagcacctgggagtaggacaagggcatcgctaccaatatgtatgcacctgagaatagcctgcgttgcttgtttgctgtagtttttagttaattcgtgcggaacttatttacgatatttgaatcgtgtgaaatctgtttccatgatatactactacttacaagggtgattctagaagtcggtttattttagt

SEQ ID NO: 112003 - DNA, 630 bp, Zea Mays
cttaatatgtactactctcagacactttatgctgttgtttctgtggttattaggtttatgcgagttgacacactatctctcttgttgtctatggcaaacattggtgcgtattcagatgtgcttgtggttgatatggttggaggtttagttgttggagctgtagccgaacgtttaggaggtaaaatatattcctctttttctcttgttgtctatggcaaacattggctccggagtggtcacatggcatgacatatgatgacactggacacacagacgtggccaagaggggaaggtttttggattgaggttgaccgacgaagacgtcggtcttctaaggggggtagattgtgatatcctgacccctgtggatggtgatatcctggtccaatgcttaataaaattaatagagtactcatatcaacaaggtgcatcttctttttcggaaggctatctcgaaagaacctccaaattaagcgagcttggcttggagcaatttgggatgggtgactggccgagaagttttctcgggtgcgcatgagtgaggacaaagtgcacacaaaagacttgtgttggtctgtgaggacaatatatgattctagtgagctgacaggagtaagtaccgccggttcg

SEQ ID NO: 112004 - DNA, 115 bp, Zea Mays
tttttttttcttacaaaacacacttttttgtctagcgcatgatcccccgttcggccgttctttccgtggcggcctggcctgtgcgtcactacttactccctcagtccctcactcc

SEQ ID NO: 112005 - DNA, 2920 bp, Zea Mays
cattaaatcgatccgatcggttcacatcccgcgagataatccatggctgggtgctagggtttacggcttcctccattcgcacgcacccctgggcgctgcgggctcgcggagcaggatcgatcagttcggatggaggatggggagacggaggaggcgcagcgggacgcgatcacggcgaggatgcgggcccaggactacgcgggcgcgagggcgctgctgctgcggacgcttcagacgaaccccaggctggagggtgccctggagatgctcccggtgctcgaggtcctctgctgcgccgccgccggccgtgggggcgtggactggtacagagtcctccaggtgctgcctgtggatgacgccgccaggatcgaggcgcgctacaagagcatcgtggcccaggtggagccggccatgggggctctgcccggcgccgaattggccctcaagctcgtcgacgaggcttacgcggtgctgtctgatccagagaagcgagaggggtttgattcgagcaacgttttcacccggttcgttcggtccggtgtcgttgatgctccaccgcccggtggcacactcgtccgtcctgacagggtgagcagccttcacacaaacaagattatggcgttaaatggtacgagcaatgcagtctcgcgtaccaaccacgccgacaggccatgctttgatggaagggattcccgtctttcaaatgtggcgagttcatccgggactaagaggatggatccttgctttcttgctgatgacggtgagttgcagtcacctgatggcactcatgttaacaaggggcaaaagagtgtcagtgaaaaggatgtttattgcatgtctccctcacaggaaaactgggatacctgctttgatgatccatcacatgctaaggaagaagatttggatgcctgctttgatgatccatctggtaccaaagaaggtgagctatgcagtagcaagtcgtatgaataccataattttgaagaagatcgagcgatcgagaattttgctcctggccaggtttgggcagcatatgactgggggaggtttcctcgtagatatgcactgattgttaaagtactgacggataaaatgcagttgtatgtctcatggttcatgccctgtccgcaaactcctgaagagaagaaatggtcccttgtggggttgccattggtttgtggaactttcgttgcagatgaacaccgaatctcgttaacatgtccaactatgttctgtcaccaaatttccaacaacaacatgaatcaagatcttgaagtgtatccacaggaaggtgaaatatgggccatttatagaaattgggatatcggatggtacactgatcctaggatgtggaagaatagtgacttctctattgttgaaattcttactagctattctaatgaatcaggttacactgttgcacatttgacaaaggtggatggttatggaagtgttttccagaggcattttaagagtggaacagaacatttgttacacatacatggtcaaaatcttatcatgttttctcacaggatcccttctttcaaatttactcatgatgctggaactatgttcgagcttgatcattctgcagttccagaaaaaatgcaccaaaaaaatacatctgcgtgtatttctcatttgtctgagctttcaggtttacctgatgacacagatggcttccctgaaactgctgttgcacaattctcaaatccttcagcaacaagcaaaatggaagcaggttccccgacgcaagccatgatgagctacaataccaagtggtttcccaaggattttctagagggccaaatatgggctgtatttgattctcgggaccggatgcctaggtcttatgtcaggataatccatgtggtttcatctacttcagtttttgtattgaagttggaacctcaccctatgcttaatgaagagatacagtgggttgaagatggtctaccggttgcttctggagtatttcgcgctggtactgaaactacttacaaggatatctgggaattctcacaccctgtagagtgtgactggagtgcaaaaagatctttttaccgtatattcccccaaaagggggaaatatgggcaatgctaaaaaattggaggatcaccttgaataccactgacattgacaaatgtgaacctcgcatggttgagatcctctcggaatactctgatgaaaatggagtaaatgtttgcagcttggctcgggtaaaaggttgctttaccttttttcatagggtagcagtggaggatttctgtttgacaaggtggattccaaggtctgaaatgctcagcttttcccaccgtgttcctgcttttgacattgttgacatcaaagatcatgatataccacaagggtcatggtatctggaaccaagtgcccttcctacaaggatcatacattaacacatgtatagtagcagaagtagccatagccctattgtaatgaactaatgactccacccttctctatccctccattttgaattgttctacttatctccattaatcatcttgtacttactgactcatttgtgaagagaactgtttgatcaactcttcaaaattcccatgtatgaccaattgcagatcaggtctgacaagtgttaaaatttggaaatgaactcttttaccatgaaatacaaaacgagaaagtaacgtaacttaaagtaaggtttactgcatctgtatttgagatttgaccgctgccatcgactgccaattggtgctgctacaggctccctggttagtattatatgttgttcagcccttaatgttcttttagttgcttcacaatgagcatgtgtgatatcagtgtaccggaagtatcggaagtatgagctctgacaccgtagagtatgcaatcaccaacttcattcctgattaatatttaggtgttgtttggttc

SEQ ID NO: 112006 - DNA, 690 bp, Zea Mays
acaggaaagggagggggagctcaagcatcaagaagagcccacgcgcacgccgccatggacatggagctggagcacggagggaatgaagacgacagggggagtgagtcctcctcctcctcctccaagcggagcttcggcgcctcgtcggacgcaaccgtcagcagcacgccaagcaagctacaggctctgaggtttgcggaagatctctccctcccatcggtgcaggtggtggtgatgagcgccaacatgggttgctcgcactgccggcagcgggtcgccgacgtcgtctccaagatgaacgcagggctgctggactacatggtggacttcgggaagaaggaggtgacggtgcgcgggaaggtggcgcacaccaagaacaagaggaagcacaggaaggcactgctgggtgctccagcaggttgggacgacgccagatcggcggcggccgcgtcgtcgtcttcgcccggcggccatgccaggacgacgctgtcatggtttttgggatgctacggctcatgaccaccacaccatagtccatagctagtatatataagtctccgcatagatatagtatcatcatatatactgctgtatgtatgtatgtgcttgttatgttcatatataactagtagcagctgcatatatagtttgtaatgatagtaataatctattgatttccattgctttctt

SEQ ID NO: 112007 - DNA, 2023 bp, Zea Mays
acaggaaagggagggggagctcaagcatcaagaagagcccacgcgcacgccgccatggacatggagctggagcacggagggaatgaagacgacagggggagtgagtcctcctcctcctcctccaagcggagcttcggcgcctcgtcggacgcaaccgtcagcagcacgccaagcaagctacaggctctgaggtttgcggaagatctctccctcccatcggtacgcgctctccctttcttcctcatcattgccagcaagctgatcagcgccaagaaatgagaactccgcaatggcttgcatgtcgttgggttcttgaaacccagctgcgactatcaatcactctgctagcgactctgtctttctgccggagcaggactctgtgctctctccttcctgcctcgttgaggatatgatgctagcctttgctgttcaggcttcagtggtagtgtcgtagcacagtaaagtcactccatccttcaccgcatttcgacagacagtctccatctccacacgttcagtgtccgttgttccactgcacacatcgagggagaagaggaagagagagatgctggagcctggctgctggtttgatctccttggattctcaaaagggacccggtcgctttttgccctcccagtccggcttttagcgtaaaggtgagaagtccagcccctgttactgttagtggcttagtgccaatccgccaaacaactccagtgcagggagcaagtttgcttccctgtctgtctgtctgtctctctttctttctactgtagtatcttttaacttgctctgatgatcctggagatgagaatctgtgagctacacattattgttcttgtccacatgcaaatcaatggcagtaacttgttggcaagaccaagagactgaatctgctggtagcagacaccgggcacgcatgcagcgcctgtagcctgtttcttgcgccgctctatgcaatgcaatgcaatgctatgctattgcagccacttgtttgttgcgccgttctcggccacagctgatgagctgttattagctgttggctgttgccgggagagagctcgagctgcttgtctggcggccaggagcccataacgaaggtgaaagtgaaaccgtctgtctttgaccggtgagcatgccaggcagtagacgaataggctaaggcacgagcaggttcactgtacaggcagccgccatgcctgatgaatgctcctcgtttataaccccctcaccaactacgcttgcacacgcttcctttgacctgataataataaattaattaagcgcacacgcttctccttctcatcccaacatcatatgatatactggcgggcgttcctgcctgcatgtgcagtgtgtgtttttgaccattatatttgactcagtcatttacagtatttcaccatcatcagttagctagctgctatgaccgaacattatatttcttaatctctagaattcctcctgcacgagtttaatctgtatgggaatgggactagatctccggaggagtctttgcattggcctgttgcctgatcagagaagatcgcaacggtgcaggtggtggtgatgagcgccaacatgggttgctcgcactgccggcagcgggtcgccgacgtcgtctccaagatgaacgggctgctggactacatggtggacttcgggaagaaggaggtgacggtgcgcgggaaggtggcgcacaccaagaacaagaggaagcacaggaaggcactgctgggtgctccagcaggttgggacgacgccagatcggcggcggccgcgtcgtcgtcttcgcccggcggccatgccaggacgacgctgtcatggtttttgggatgctacggctcatgaccaccacaccatagtccatagctagtatatataagtctccgcatagatatagtatcatcatatatactgctgtatgtatgtatgtgcttgttatgttcatatataactagtagcagctgcatatatagtttgtaatgatagtaataatctattgatttccattgctttctt

SEQ ID NO: 112008 - DNA, 687 bp, Zea Mays
aggaaagggagggggagctcaagcatcaagaagagcccacgcgcacgccgccatggacatggagctggagcacggagggaatgaagacgacagggggagtgagtcctcctcctcctcctccaagcggagcttcggcgcctcgtcggacgcaaccgtcagcagcacgccaagcaagctacaggctctgaggtttgcggaagatctctccctcccatcggtgcaggtggtggtgatgagcgccaacatgggttgctcgcactgccggcagcgggtcgccgacgtcgtctccaagatgaacgggctgctggactacatggtggacttcgggaagaaggaggtgacggtgcgcgggaaggtggcgcacaccaagaacaagaggaagcacaggaaggcactgctgggtgctccagcaggttgggacgacgccagatcggcggcggccgcgtcgtcgtcttcgcccggcggccatgccaggacgacgctgtcatggtttttgggatgctacggctcatgaccaccacaccatagtccatagctagtatatataagtctccgcatagatatagtatcatcatatatactgctgtatgtatgtatgtgcttgttatgttcatatataactagtagcagctgcatatatagtttgtaatgatagtaataatctattgatttccattgctttctttc

SEQ ID NO: 112009 - DNA, 174 bp, Zea Mays
atgactagaactagaaatgttttgacaattgatagcaaatatgagatgtgtcatattattttcacgcgaagtccacccatccaaatcataagaagacggtgggcactatcaatacaacaactcagtttgttgtatttgttcaagtatacctcagaggttgtcaatgatggctga

SEQ ID NO: 112010 - DNA, 297 bp, Zea Mays
atggcgttgaagctcagctcggctcctccggccaggttcatctccctgctcccttggactcttccagacctccacgccggtgttccttcatgtgccggatctttgcttgaaaacaaccactcgtttcggcttttccagatgctccaagtcatgagtataataatctccatagagaaggggacgttaagctggtggttaaggttcgcagctgccacctcagggttagagattctgggcggtgttatgccaattgagctccagcaggctttcgcgaaattgcatctgagaaacaggtga
